United States Patent Application Publication US 2011/0182862 A1 - sequence listing, part 19

SEQ ID NO: 27245 - DNA, 2129 bp, Muscodor strobelii
  misc_feature: SGI EST ID NO. CUFF.64338.0
  misc_feature: Variant of the nucleotide sequence at SEQ ID NO 27243
ttttatttcaacacagtgcacctgtaatcgttccgacacgaaaggcgcaccaagttggaacacatatcggtcgactacctgcacttctgacctgcgactcaagctcatctcgcacttgcaaaggtgacgactggacaatttacgctgtgctcgtttccgcttgagatttgggactttgccgggactacagtgcaatccgcacctgccaaacttgcctgacatccctcacttgcacaacacaagacaacccgatccttggcggcacttatcgagaacatttctgctcggtgttcttgcctcaagctctgcacaatctttcttttccgtcagaccactcaaccgactgacagatcgcggacgtcactgacgatgccgcattctctcacctccgacggcttgtcggaggagcatcccaccaaagtcgacatgacacccatcgtgaatgacaccgagaaagcaatctcgattactgaagacatcgccaatgtacctggcggtgcaatcgaccccgccgccgagcgccgactgcttttcaagatcgacatgcacgtttaccctatcctcttcattgtgtatgccctctcgttcctcgatcgcatcaacatcagcaatgcacgcatccaaggcctcaccgaagagctcgatctctatggcaatcggttcaatattgccctcttcgtttacttcattccttacatcctactggagatcccaagtaacatgctcatccagagagtgcgcccatcctggtatctcgcagggctcatggctgcatggggtcttatcaacatgtccatgggtttcgtcaaaacctatggccagcttgtggctctccgtttcctgctcggcatatttgaggctggggtcatgcctggtatcatttatctgacttccatgtattatcgtcgtcacgtctttcaagtccgcatgagctcatacttttgctctgtcgttgtcgcaggagcattcggagggttgctcgcgtacgggatctctgatttgcaggggcagcgaggacttgctgcttggcgctggatcttcatcatcgagggggccattactgtcttcgtctcgattatctctgcattcttgatagtggactggcccgatcaatgtcggttcttgaacgccgaggataagaacctgcttaaagcaatcttagcccaagatggtgccgaggaggcccgcatggacacactgaaccgcgacgcataccgacgcattttcaaggattggaagatatacctaggctcttttgtatatctaggtgtgggcatcaccgggtactcgctcgtgtactttctgccaacaatccttgttgaatttggctggaaggctgccgaagcccagattcacacgattcctgtttacgccgtcactgctgttgccatgatttctgtcgcgtgggtctcggatcgatatcagcatcgttacggctttatcatctttggctgcgtgttggctactataggctatgccatgctcctcggacaagatggcttaggtcgtaatgccaaatacggcgcggtattcctcgtatcaattggtggttacatcggcaccccaatggcactcgcttggcttgccaacaacgtctcgggtcattggaagcgctcgtttagcgctagcatgcaaatcacgattggcaacattactggtattgctgcgtctaatattttccttgagagcgaatcacctcgctatcctactggatatggcacggcactagcactgacatggttcggaggactcactgctaccattttattcttcaaactcaagcgtgagaacaagttacgcggggctgggggtagagattatcgactgttgtgcccgaaggaggaactagagaacatgggagacgatcatccttctttcaggttcactacatgagcgaatgggctggatctacttgcattagggttgaggcttcgttaacagtcggagattgagaatgatctgccaattgaggatgtggtcttacatcacagagagctcatgtactttgtagttgacatgaaaaagctattgccctgtagacgtaggcccgaggatgagcaaaatggcgtatgcgaaaattcgacatcagataggcatcatgccgtctgaacagacctaatcaacagaaa

SEQ ID NO: 27246 - DNA, 501 bp, Muscodor strobelii
  misc_feature: SGI cDNA ID NO. 569332
  misc_feature: Elevated expression when VOC is produced
  misc_feature: Encodes the peptide sequence at SEQ ID NO 27247
atggggtgcccgaccgacattgcaatcgctgtaggatccaaggtatgcaaatatggcgaatatcttgacaccaagcaatgggacaaattcgcaggcgaagttttattgccagagtgtcaatggttcatggtcaaccaagaaggcgagcctctccgatttaaaggcaaggacttgaccttcagttcaacgcccgtctacctagatcatttcagcaagatgctcaaggatttcaactcgacgcacatgttcggcgttggctcgtatgagttggtagctcctgacaccgttaaacatatctgcaccgtcgaagatcagctcgtatctaagcccatgggccagtgggttgagctacgcggtggtggctatttctatacgacttggaagcttcgtgacggtgaatggcgctgccaagaggtcacgttaaaacgccactaccagaacatgtcccccattgtacggtttgccgtgtggttggaatcatggggcctcaatgtgatgtga

SEQ ID NO: 27247 - protein, 166 aa, Muscodor strobelii
  misc_feature: SGI Peptide ID NO. 569332
  misc_feature (6)..(156): NCBI GI: 256724359 Blast Desc: NECHADRAFT_102143 [Nectria haematococca mpVI 77-13-4]
  misc_feature (1)..(145): NCBI GI: 46118186 Blast Desc: FG04691.1 [Gibberella zeae PH-1]
  misc_feature (1)..(102): NCBI GI: 115384444 Blast Desc: [Aspergillus terreus NIH2624] gi|114196461|gb|EAU38161.1| [Aspergillus terreus NIH2624]
  misc_feature: Useful for introducing or modulating the production of volatile compounds
MGCPTDIAIAVGSKVCKYGEYLDTKQWDKFAGEVLLPECQWFMVNQEGEPLRFKGKDLTFSSTPVYLDHFSKMLKDFNSTHMFGVGSYELVAPDTVKHICTVEDQLVSKPMGQWVELRGGGYFYTTWKLRDGEWRCQEVTLKRHYQNMSPIVRFAVWLESWGLNVM

SEQ ID NO: 27248 - DNA, 1726 bp, Muscodor strobelii
  misc_feature: SGI EST ID NO. CUFF.64344.0
  misc_feature: Variant of the nucleotide sequence at SEQ ID NO 27246
tggtcatgcaactctgcggcacagagatgctataactgagtaatcccccatttgtcataacgcgtatctagtcatcaatttgagttcatacggtatgtatatagaggaagtgcctagggtgattgggcatcgagaccgatttcttcaatctcactcatttccagtccttgcttctgctttcagcttgccttgggtcatatctcgccgatacctgtccagctcaattagactaccgaaatcctggtcatcttgtaagcgaaagcgcttcaccatatattcttcataattcgtagtttacggcaactacatcatctgcactttacaaattctgatctagctatacactcgttcgactgctatagtgcatatagtctgacaagtgtagaaagttatcatcatggggtgcccgaccgacattgcaatcgctgtaggatccaaggtatgcaaatatggcgaatatcttgacaccaagcaatgggacaaattcgcaggcgaagttttattgccagagtgtcaatggttcatggtcaaccaagaaggcgagcctctccgatttaaaggcaaggacttgaccttcagttcaacgcccgtctacctagatcatttcagcaagatgctcaaggatttcaactcgacgcacatgttcggcgttggctcgtatgagttggtagctcctgacaccgttaaacatatctgcaccgtcgaagatcagctcgtatctaagcccatgggccagtgggttgagctacgcggtggtggctatttctatacgacttggaagcttcgtgacggtgaatggcgctgccaagaggtcacgttaaaacgccactaccagaacatgtcccccattgtacggtttgccgtgtggttggaatcatggggcctcaatgtgatgtgaaagaggtcgaccgcgatgtaacgacaccgaataatctgctgtgcagtgacgaagagccaaggctcgctttgtctatgggtcatttagctcagatcgcgtggacattatgcctcttcagcaacaacgctcgacaaaggtatcggggtagggaagcttaggataggaaatcagggaaacgaacctgggcatgccaggaagcacctatcatgtcgcaatcttcttccaaatcatcccgatgtcacttggcccgggtgcgttcctcgaatccagcagtcaaccggctatacgacaatgtaccaagaacctcatttaacgtattattacccggggcgagagaaggattttgcttaactttctgacggggttcttgggagcgccgccttgggaaggccgcatttggtacgttgaattcaatgtcggagagttaggtgcggcattgacgaaatagatatgatggcatacatcgtgagagttgggccatggctatctcacagatacacgacagactaccctgtactatgataagatactactagcagatttgcaggacacggggcgaagtatgctaacaatggcgcgtacttcttggtaacgcaactgcttatggcaactccgggaaaatacatattgtgtcgtgccatggttacttcaatatcacgcgttcgctgtcatgtctcgctagtaacacccaaggatactgcatagtcagagaataattgcgaatatgtcatggtttaagactctttaataacaaaccgcatgccgctttctcataaaatcgaccgcaccaagtccgtctaggtagagactatgaatggcaatgtcgag

SEQ ID NO: 27249 - DNA, 1344 bp, Muscodor strobelii
  misc_feature: SGI cDNA ID NO. 569333
  misc_feature: Encodes the peptide sequence at SEQ ID NO 27250
atgagtagtacagatgtcgaactggtgtccatatccactgcaccggcagcgccctcgccgtctcgagacacagccactgacacgggcgacacccatcgggaactcaccgagcttgcacctgtagatcgtggccccagggcctggatactgctttccgctgcttttgtcttcgaggccttgctatggggcttcccgctgtcgttcggcgtcttccaagagtactactccaacgtcccagagtttgcgggtaaccgctatatatcagttgtcggcactattgcttccggctttggctatctcggggctcccgtcatcatgcctatcatccagcgttggcagcgccaccgccggcacatgattatcgtcggatggtctatctgtatcctcgggctcgtcgccgggtcctttgcgagtacgctggaggtgctgatactcactcaaggcgttgcctacgggctcggcttcctgattttctattatcccattctcagcatggtgaatgagtactgggtggctcgtcgtggcatggcctatggattactatgcggtgcgtctggtgtctcgggctccgtcattcccttcgtcctccaagctctcctggtcaagtacgggtataaaatcacactccgcgccgttgccgtggccctcatcctgctcacggcccccttcatcccgctcttgaagggccgcttacccgcttctgtgcggactacgactcctaagactagttggtccttctttcggactccactcttttgggtatactcggtttcgaaccttctgcaagggttcggctacttcttcccttcgctgtacctaccctcctatgcatcatcactagggctagggggaaagagcggcgcgcttctcatcgctctcatgagcgtgtcacaagtcgccggtcaattcgtctttggtatgctatccgatcacagggttccgctcaatctcctcgcttgcctttctactgtcgttgctgcagtggcctgctttacgctgtggaaattggcagagtcactattggtcctcgtcatcttcgcgatagtatacgggtttttcgccgctggatttacggccacctgggcgagaatgagtaccgccatcaccgacgatgtgacggccggacccatcgtcttcactctactcaacttcggcaaaggtattggaaacatcgctgctggaccgattggaggtttcctcatatcgtccgccaagtcggcgggatcttcatcgtccgcgtcctatgaatgggttatcgtcttcaccggagtgtccatgttcgcaagtgctttgaccatatgcctacgaagcgcaaaatacttgggcgtcatcgtcaggcaataa

SEQ ID NO: 27250 - protein, 447 aa, Muscodor strobelii
  misc_feature: SGI Peptide ID NO. 569333
  misc_feature (50)..(394): Pfam Id: PF07690 Pfam Desc: Major Facilitator Superfamily
  misc_feature (37)..(446): NCBI GI: 46140117 Blast Desc: FG11573.1 [Gibberella zeae PH-1]
  misc_feature (7)..(430): NCBI GI: 169619561 Blast Desc: SNOG_12979 [Phaeosphaeria nodorum SN15] gi|160703852|gb|EAT79779.2| SNOG_12979 [Phaeosphaeria nodorum SN15]
  misc_feature (4)..(371): NCBI GI: 154316530 Blast Desc: BC1G_04196 [Botryotinia fuckeliana B05.10] gi|150845996|gb|EDN21189.1| BC1G_04196 [Botryotinia fuckeliana B05.10]
  misc_feature (19)..(434): NCBI GI: 261358315 Blast Desc: conserved [Verticillium albo-atrum VaMs.102]
  misc_feature (21)..(433): NCBI GI: 256731602 Blast Desc: NECHADRAFT_85217 [Nectria haematococca mpVI 77-13-4]
  misc_feature (22)..(431): NCBI GI: 256723642 Blast Desc: NECHADRAFT_52270 [Nectria haematococca mpVI 77-13-4]
  misc_feature (21)..(421): NCBI GI: 225555322 Blast Desc: conserved [Ajellomyces capsulatus G186AR]
  misc_feature (21)..(441): NCBI GI: 189194439 Blast Desc: conserved [Pyrenophora tritici-repentis Pt-1C-BFP] gi|187979122|gb|EDU45748.1| conserved [Pyrenophora tritici-repentis Pt-1C-BFP]
  misc_feature (20)..(439): NCBI GI: 169778464 Blast Desc: [Aspergillus oryzae RIB40] gi|83772435|dbj|BAE62564.1| protein product [Aspergillus oryzae]
  misc_feature (28)..(439): NCBI GI: 238499151 Blast Desc: MFS monocarboxylate transporter, [Aspergillus flavus NRRL3357] gi|220692563|gb|EED48909.1| MFS monocarboxylate transporter, [Aspergillus flavus NRRL3357]
MSSTDVELVSISTAPAAPSPSRDTATDTGDTHRELTELAPVDRGPRAWILLSAAFVFEALLWGFPLSFGVFQEYYSNVPEFAGNRYISVVGTIASGFGYLGAPVIMPIIQRWQRHRRHMIIVGWSICILGLVAGSFASTLEVLILTQGVAYGLGFLIFYYPILSMVNEYWVARRGMAYGLLCGASGVSGSVIPFVLQALLVKYGYKITLRAVAVALILLTAPFIPLLKGRLPASVRTTTPKTSWSFFRTPLFWVYSVSNLLQGFGYFFPSLYLPSYASSLGLGGKSGALLIALMSVSQVAGQFVFGMLSDHRVPLNLLACLSTVVAAVACFTLWKLAESLLVLVIFAIVYGFFAAGFTATWARMSTAITDDVTAGPIVFTLLNFGKGIGNIAAGPIGGFLISSAKSAGSSSSASYEWVIVFTGVSMFASALTICLRSAKYLGVIVRQ

SEQ ID NO: 27251 - DNA, 2493 bp, Muscodor strobelii
  misc_feature: SGI EST ID NO. CUFF.64357.0
  misc_feature: Variant of the nucleotide sequence at SEQ ID NO 27249
tgacattatactatctcaatcattattagcagaaatcgcccgatttctcaagcgatacctgcagccagctgtaggtcaccgttgatgcttgaagtattgtggccgttgccgctgctcctggcagccgtcccatgcggatatcctgaaaatgggagacgaatctctggcttctgtcttcagcttgactatattttcctaagactattgttctgaatgatcaactctcgcagtagatatcgtcccatctttagaccgaaattttccatgtgcatgatgattttcccatgttaagtatgtggtttcctgactgctatacccgagcgagaaagtggcctgctgtttccaagacgagtgcatcccgaaattgtaacctcggcctgtgaattgctatgatagtcccaccacatgtccgcacttgagagcatttatatgtatgcatttctcacatatacctatgaagcaaccatatacctaacattaaatcgcaaatcctaaacgcctaacctattttactgccctcaaataccttcgtcatgagtagtacagatgtcgaactggtgtccatatccactgcaccggcagcgccctcgccgtctcgagacacagccactgacacgggcgacacccatcgggaactcaccgagcttgcacctgtagatcgtggccccagggcctggatactgctttccgctgcttttgtcttcgaggccttgctatggggcttcccgctgtcgttcggcgtcttccaagagtactactccaacgtcccagagtttgcgggtaaccgctatatatcagttgtcggcactattgcttccggctttggctatctcggggctcccgtcatcatgcctatcatccagcgttggcagcgccaccgccggcacatgattatcgtcggatgtacgtccatgctcgcccttgtagccttgaaccgcggtcggtactgctgaccgaaacctcagggtctatctgtatcctcgggctcgtcgccgggtcctttgcgagtacgctggaggtgctgatactcactcaaggcgttgcctacgggctcggcttcctgattttctattatcccattctcagcatggtgaatgagtactgggtggctcgtcgtggcatggcctatggattactatgcggtgcgtctggtgtctcgggctccgtcattcccttcgtcctccaagctctcctggtcaagtacgggtataaaatcacactccgcgccgttgccgtggccctcatcctgctcacggcccccttcatcccgctcttgaagggccgcttacccgcttctgtgcggactacgactcctaagactagttggtccttctttcggactccactcttttgggtatactcggtttcgaaccttctgcaagggttcggctacttcttcccttcgctgtacctaccctcctatgcatcatcactagggctagggggaaagagcggcgcgcttctcatcgctctcatgagcgtgtcacaagtcgccggtcaattcgtctttggtatgctatccgatcacagggttccgctcaatctcctcgcttgcctttctactgtcgttgctgcagtggcctgctttacgctgtggaaattggcagagtcactattggtcctcgtcatcttcgcgatagtatacgggtttttcgccgctggatttacggccacctgggcgagaatgagtaccgccatcaccgacgatgtgacggccggacccatcgtcttcactctactcaacttcggcaaaggtattggaaacatcgctgctggaccgattggaggtttcctcatatcgtccgccaagtcggcgggatcttcatcgtccgcgtcctatgaatgggttatcgtcttcaccggagtgtccatgttcgcaagtgctttgaccatatgcctacgaagcgcaaaatacttgggcgtcatcgtcaggcaataattgtaagagacaaataaacaggcggactaccagtatgcaatcgctcagtcaccagtacacctgactatgtagtttttgccgtccgctgtgaaggagtcaacccaagtgccatttctcgatcctagagcatgcaacatccggatatgcagtggcgagagattatagagaacggttacaacgattgcaatggagttagaacgacgtgacagttcccgtgtaatcactacctagtaagtaattttctccgattttgctattctgcatgggccgactaaggtcgagaggtccacttcggcaattttctgttgcatgctcccgtacccctgacacatttgtgtcagccgcacggcagtgaaacaggcaggtcacaaagctgctgtaggcaatgatatttcccttctactgtacataatcgtttttacactgaactgcttatcatttgataatgactgtactatacggtacataccattggtcaacgataacgggcagagcaacgggggtcgaaattgcctgccctggttatatatataatgttttcaggccggtggccg

SEQ ID NO: 27252 - DNA, 2058 bp, Muscodor strobelii
  misc_feature: SGI cDNA ID NO. 569334
  misc_feature: Reduced expression when VOC is produced
  misc_feature: Encodes the peptide sequence at SEQ ID NO 27253
atgaagggaaagaaaaccatggttttcactgcacttgctagatggcgaactgtcaaaacaccaaacattgagatcttaatcaagtctcgtacgcttctcgctctacaatatcgccaacctgcacgcagtgtatcacagctccagcgtggagggattatcaacaaatatcataaaaccggcaagcgaggagaaagaataccagcttcggaaatcaacgagatatcagcaaagactatctcagcgagctctgatttcgatccgtggagtgcttttgagaagtccttcgggtcaaagcccaatccacagaagaaaaacctgcatcgtttaggttggccggggctggctagcaaatctgcacggcgtgcatcttgggacgacatggaggaccagagcaaagagcaaaatgaaactcatgagtttacgcctcgtgagaagaggccacatcccgggaccaagtcacatctgtctcagaagcgagtgcagaagaaagccaagaagaagaagagagagcgcgatatgaacagtggctcttacgagggggttcttggcattgatatacaaaatcttaagatctcactggatgagacgaaggctgacgcagaatctgtgaccgagcagacattgctagagctaggcttagaaattgaggtcaaggtcgtcgagctctcatctacgggcgacgctctagcattgcaggagggttcctcgcagatctatgttgttcccttcgcggtccccggcgatgttgtgaatgtcaaggtctaccgtcatctcgaagaagaaggctacacagctgcagatttcatctctgtcgttacgccatctgaaaagcgcgatgatagccgcataaaatgcaagtatttcgcctcatgcgcaggctgtcaattccagatgctcgattacgcagagcagctccgtctcaagaagcgcatagtggaaaaggcattcaagaacttctctgaccttccgcctgagctcatccccgcgatccaagacaccatcggtagtcctttacaatacggctatcgtaccaaactcacaccccacttcgacggacctcaggggtggagcaggaagaatcttgacgctcgcttcaccgagcgtccagccatcggattcatgcctaagggcaagcgctcaacgatagacatcgaagactgccccatcggcaccgatgctgttcgcatgggtatgaagtccgaacgcgagagaatgtccgtggagttcggcgactacaaacgcggagccaccatcctcctgcgcgaaagcacgctccgcgtctccaaggactcctcgagcgaagaattacaaattccggacaacgcaataaaatcagaaacagagacttacacagattacaagacttgcgtaacagacaacaaggggacgagcacagattacatcgactcataccagtttaccaacccagcaggatctttcttccaaaacaacaactccattctctcaccattcacagcctatatccggtcccacgtcatgcccccgtctccctccccatcctcatcctcctcatcatcttcttcagcgcccaaaatcaaaaacctaatagacgcctactcgggctcaggcctcttcacaataaccctctcatccctcttccaaggttcaacgggaatcgacatctcacccgcctccatcctccacgcacggaaaaacgcctcactcaacggaatggcagccaaccaagcgaatttcatcgccgcggacgccggggaactattcaaatccgtgacctatgcatccgatgaaacggtcgtgatcctcgacccgccgaggaaaggctgcgatacgaattttctgggacagttgctggattttggacccaggcggattgtgtatgtgagttgtaatgtacatacccaggcccgagatgtcgggatgctggtccgtggacatactggggtgggggagagcagtgggaatgggagaggggggaagacgaggtatgtgattgagagtcttaggggttttgatttcttcccacagactggccatgttgagggtgttgctgtgttggatcgcgttgagggtgtatga

SEQ ID NO: 27253 - protein, 685 aa, Muscodor strobelii
  misc_feature: SGI Peptide ID NO. 569334
  misc_feature (200)..(683): NCBI GI: 156034222 Blast Desc: SS1G_13414 [Sclerotinia sclerotiorum 1980] gi|154698817|gb|EDN98555.1| SS1G_13414 [Sclerotinia sclerotiorum 1980]
  misc_feature (129)..(685): NCBI GI: 261357023 Blast Desc: tRNA (uracil-5-)-methyltransferase [Verticillium albo-atrum VaMs.102]
  misc_feature (145)..(684): NCBI GI: 116205099 Blast Desc: CHGG_10433 [Chaetomium globosum CBS 148.51] gi|88176561|gb|EAQ84029.1| CHGG_10433 [Chaetomium globosum CBS 148.51]
  misc_feature (142)..(683): NCBI GI: 256728913 Blast Desc: [Nectria haematococca mpVI 77-13-4]
  misc_feature (143)..(682): NCBI GI: 46138691 Blast Desc: FG10860.1 [Gibberella zeae PH-1]
  misc_feature (107)..(683): NCBI GI: 85110766 Blast Desc: NCU06780 [Neurospora crassa OR74A] gi|18376010|emb|CAB91744.2| related to endo-exonuclease yNucR [Neurospora crassa] gi|28925307|gb|EAA34385.1| NCU06780 crassa
  misc_feature (176)..(683): NCBI GI: 171689586 Blast Desc: protein product [Podospora anserina] gi|170944755|emb|CAP70866.1| protein product [Podospora anserina]
  misc_feature (175)..(684): NCBI GI: 189189148 Blast Desc: tRNA (uracil-5-)-methyltransferase [Pyrenophora tritici-repentis Pt-1C-BFP] gi|187972519|gb|EDU40018.1| tRNA (uracil-5-)-methyltransferase [Pyrenophora tritici-repentis
  misc_feature (175)..(683): NCBI GI: 169623498 Blast Desc: SNOG_14991 [Phaeosphaeria nodorum SN15] gi|111056414|gb|EAT77534.1| SNOG_14991 [Phaeosphaeria nodorum SN15]
  misc_feature (160)..(681): NCBI GI: 145254861 Blast Desc: An18g03220 [Aspergillus niger] gi|134084367|emb|CAK48706.1| protein product [Aspergillus niger]
  misc_feature (199)..(682): SWISSPROT Homolog: EC 2.1.1.35 tRNA (uracil-5-)-methyltransferase
  misc_feature: Useful for introducing or modulating the production of volatile compounds
MKGKKTMVFTALARWRTVKTPNIEILIKSRTLLALQYRQPARSVSQLQRGGIINKYHKTGKRGERIPASEINEISAKTISASSDFDPWSAFEKSFGSKPNPQKKNLHRLGWPGLASKSARRASWDDMEDQSKEQNETHEFTPREKRPHPGTKSHLSQKRVQKKAKKKKRERDMNSGSYEGVLGIDIQNLKISLDETKADAESVTEQTLLELGLEIEVKVVELSSTGDALALQEGSSQIYVVPFAVPGDVVNVKVYRHLEEEGYTAADFISVVTPSEKRDDSRIKCKYFASCAGCQFQMLDYAEQLRLKKRIVEKAFKNFSDLPPELIPAIQDTIGSPLQYGYRTKLTPHFDGPQGWSRKNLDARFTERPAIGFMPKGKRSTIDIEDCPIGTDAVRMGMKSERERMSVEFGDYKRGATILLRESTLRVSKDSSSEELQIPDNAIKSETETYTDYKTCVTDNKGTSTDYIDSYQFTNPAGSFFQNNNSILSPFTAYIRSHVMPPSPSPSSSSSSSSSAPKIKNLIDAYSGSGLFTITLSSLFQGSTGIDISPASILHARKNASLNGMAANQANFIAADAGELFKSVTYASDETVVILDPPRKGCDTNFLGQLLDFGPRRIVYVSCNVHTQARDVGMLVRGHTGVGESSGNGRGGKTRYVIESLRGFDFFPQTGHVEGVAVLDRVEGV

SEQ ID NO: 27254 - DNA, 4173 bp, Muscodor strobelii
  misc_feature: SGI EST ID NO. CUFF.64363.0
  misc_feature: Variant of the nucleotide sequence at SEQ ID NO 27252
aaagaaaaccatggttttcactgcacttgctagatggcgaactgtcaaaacaccaaacattgagatcttaatcaagtctcgtacgcttctcgctctacaatatcgccaacctgcacgcagtgtatcacagctccagcgtggagggattatcaacaaatatcataaaaccggcaagcgaggagaaagaataccagcttcggaaatcaacgagatatcagcaaagactatctcagcgagctctgatttcgatccgtggagtgcttttgagaagtccttcgggtcaaagcccaatccacagaagaaaaacctgcatcgtttaggttggccggggctggctagcaaatctgcacggcgtgcatcttgggacgacatggaggaccagagcaaagagcaaaatgaaactcatgagtttacgcctcgtgagaagaggccacatcccgggaccaagtcacatctgtctcagaagcgagtgcagaagaaagccaagaagaagaagagagagcgcgatatgaacagtggctcttacgagggggttcttggcattgatatacaaaatcttaagatctcactggatgagacgaaggctgacgcagaatctgtgaccgagcagacattgctagagctaggcttagaaattgaggtcaaggtcgtcgagctctcatctacgggcgacgctctagcattgcaggagggttcctcgcagatctatgttgttcccttcgcggtccccggcgatgttgtgaatgtcaaggtctaccgtcatctcgaagaagaaggctacacagctgcagatttcatctctgtcgttacgccatctgaaaagcgcgatgatagccgcataaaatgcaagtatttcgcctcatgcgcaggctgtcaattccagatgctcgattacgcagagcagctccgtctcaagaagcgcatagtggaaaaggcattcaagaacttctctgaccttccgcctgagctcatccccgcgatccaagacaccatcggtagtcctttacaatacggctatcgtaccaaactcacaccccacttcgacggacctcaggggtggagcaggaagaatcttgacgctcgcttcaccgagcgtccagccatcggattcatgcctaagggcaagcgctcaacgatagacatcgaagactgccccatcggcaccgatgctgttcgcatgggtatgaagtccgaacgcgagagaatgtccgtggagttcggcgactacaaacgcggagccaccatcctcctgcgcgaaagcacgctccgcgtctccaaggactcctcgagcgaagaattacaaattccggacaacgcaataaaatcagaaacagagacttacacagattacaagacttgcgtaacagacaacaaggggacgagcacagattacatcgactcataccagtttaccaacccagcaggatctttcttccaaaacaacaactccattctctcaccattcacagcctatatccggtcccacgtcatgcccccgtctccctccccatcctcatcctcctcatcatcttcttcagcgcccaaaatcaaaaacctaatagacgcctactcgggctcaggcctcttcacaataaccctctcatccctcttccaaggttcaacgggaatcgacatctcacccgcctccatcctccacgcacggaaaaacgcctcactcaacggaatggcagccaaccaagcgaatttcatcgccgcggacgccggggaactattcaaatccgtgacctatgcatccgatgaaacggtcgtgatcctcgacccgccgaggaaaggctgcgatacgaattttctgggacagttgctggattttggacccaggcggattgtgtatgtgagttgtaatgtacatacccaggcccgagatgtcgggatgctggtccgtggacatactggggtgggggagagcagtgggaatgggagaggggggaagacgaggtatgtgattgagagtcttaggggttttgatttcttcccacagactggccatgttgagggtgttgctgtgttggatcgcgttgagggtgtatgagggctctagtcttcggattttatgcttcaccgcccacaacgtgtctgcaggtacggggcataccggggcaggccacaaagaccatgtcttctctgcagaaatacgccgataccatgtaaatatacgtttgagatgggatgaaaggatacgtggctgtaagatactatgaaaaaaaatgagatttcccgatgacaatatgtacgatacggactagataaaatttggtgtattagatttgagatatggtgtcccttggagctactgtgtgcaaaagtagaggatatcgtattgctgcttcgaactctgtagctgtattgccttgcggctggccagatggatatgaccctacgagatgccgaccgatgaccacttcccccgcgtcacgcgctggcatacttgacatgaagaaagaccttcagttactcactcctccgcacatatggtccagtcgtcaaggtaataaattgaaagaattcaatcatcatgatgattctctatagtcgttattcagcgtaggcactgttcatgagtgcccgcaatgccagatgtcctaataaacacagcccgtcaccactcgtacacaaaagaccgtagtatgtcaagcacgaccgtcctaccgggccgtaacgccatacttctagccaggcggcaccggcgttccagccacactcccactgccactctcctccctgcccgtgccattaacagccttcttcttcttctttttcctcctcgggaccacggccggtttaccgccatagttgcctagcgccagtttcgtcccacacgtcaggcactcggcgttctcgggtatttcgcagaaaatcgacagacagatcgagcagacgaatcccctatccactgtccgccgatgacagaaacacgcagccttgaagtcgattatggcttgtgtgggcgtgacgagagactgtcgcgcagagttgtcggggagaaatccgaacatgaggtatgagaggaggcccctcagattctcggagcaggagaggtatgttccttgggttatgaatgatgcttgttggaggaatgtcggggtggagtggagggagaggacgtcgatgggtattccgctgtgtgaggcggcgaatacggcgttcattgtgggtatgtactgcgatgcggcagaggacgatacggagaggacgaggattcgggcgtggaggttgggagcggcgggtctcgtcgagggggctgttgtgggatttgctgggtcggttgacgtctttggcggggagaaggagagcgaggtcttgtggatgtaggatagtgccatggtcaaggcgcctgagatgagggttgtgggagtgaggtcggatggagaggtggcgtcgatgagcgtcttgagggaggtgaggatggaggtctcgatctgggcgaactgggggtatttatttgccgatgtgccgagttggtggccgcctctagtggcactgctgtcgactccggacatgtggacatcgccattgctgtccggacgctcggggttgttggatgtagggtataaccagacagctcggttggtgtgtgcagcgaggacggcgacttggttctcgttaccgaaggctaggtgggcgttgacgaagactagaatattggctatggccttagatatgggtaacaggtcgtgaagtagggcccaggtgcgtggattggtgtcgatgatgatggtcaggagcgagggcgtctggctggcgaagccgctctcgtcgtagtgctccgacgcatcgatgcgattcatcttgacaagatgctgccgctggcaggtctatgattctggtttcagaaatgacgacggcagtttaaagccttcagaggctggcctggatgttgaaggaaggaagagagagtgggcgttattggaagaaatcgacgattttcacatcatcgaaaagtgaatgcctccattcatgcctccctcttccctgccagcctgcgaagccgtctgccgcctggcgcctggatcagcactatagcgcaacaaagccgccgagaatttccggttagaaagagaattgtcttcggcagcgcgccaagaataagttatgcctgggtgcaagactaagtctcctttggaacgatatgctacgacggtagtattcacgatg

SEQ ID NO: 27255 - DNA, 1119 bp, Muscodor strobelii
  misc_feature: SGI cDNA ID NO. 569335
  misc_feature: Reduced expression when VOC is produced
  misc_feature: Encodes the peptide sequence at SEQ ID NO 27256
atgaatcgcatcgatgcgtcggagcactacgacgagagcggcttcgccagccagacgccctcgctcctgaccatcatcatcgacaccaatccacgcacctgggccctacttcacgacctgttacccatatctaaggccatagccaatattctagtcttcgtcaacgcccacctagccttcggtaacgagaaccaagtcgccgtcctcgctgcacacaccaaccgagctgtctggttataccctacatccaacaaccccgagcgtccggacagcaatggcgatgtccacatgtccggagtcgacagcagtgccactagaggcggccaccaactcggcacatcggcaaataaatacccccagttcgcccagatcgagacctccatcctcacctccctcaagacgctcatcgacgccacctctccatccgacctcactcccacaaccctcatctcaggcgccttgaccatggcactatcctacatccacaagacctcgctctccttctccccgccaaagacgtcaaccgacccagcaaatcccacaacagccccctcgacgagacccgccgctcccaacctccacgcccgaatcctcgtcctctccgtatcgtcctctgccgcatcgcagtacatacccacaatgaacgccgtattcgccgcctcacacagcggaatacccatcgacgtcctctccctccactccaccccgacattcctccaacaagcatcattcataacccaaggaacatacctctcctgctccgagaatctgaggggcctcctctcatacctcatgttcggatttctccccgacaactctgcgcgacagtctctcgtcacgcccacacaagccataatcgacttcaaggctgcgtgtttctgtcatcggcggacagtggataggggattcgtctgctcgatctgtctgtcgattttctgcgaaatacccgagaacgccgagtgcctgacgtgtgggacgaaactggcgctaggcaactatggcggtaaaccggccgtggtcccgaggaggaaaaagaagaagaagaaggctgttaatggcacgggcagggaggagagtggcagtgggagtgtggctggaacgccggtgccgcctggctag

SEQ ID NO: 27256 - protein, 372 aa, Muscodor strobelii
  misc_feature: SGI Peptide ID NO. 569335
  misc_feature (19)..(325): Pfam Id: PF03850 Pfam Desc: Transcription factor Tfb4
  misc_feature (193)..(325): Pfam Id: PF03850 Pfam Desc: Transcription factor Tfb4
  misc_feature (19)..(163): Pfam Id: PF03850 Pfam Desc: Transcription factor Tfb4
  misc_feature (1)..(370): NCBI GI: 46138695 Blast Desc: FG10862.1 [Gibberella zeae PH-1]
  misc_feature (1)..(369): NCBI GI: 261357025 Blast Desc: RNA polymerase II transcription factor B subunit 4 [Verticillium albo-atrum VaMs.102]
  misc_feature (1)..(361): NCBI GI: 39943732 Blast Desc: MGG_03877 [Magnaporthe grisea 70-15] gi|145014573|gb|EDJ99141.1| MGG_03877 [Magnaporthe grisea 70-15]
  misc_feature (1)..(370): NCBI GI: 156034244 Blast Desc: SS1G_13425 [Sclerotinia sclerotiorum 1980] gi|154698828|gb|EDN98566.1| SS1G_13425 [Sclerotinia sclerotiorum 1980]
  misc_feature (1)..(370): NCBI GI: 154310839 Blast Desc: BC1G_06398 [Botryotinia fuckeliana B05.10] gi|150851197|gb|EDN26390.1| BC1G_06398 [Botryotinia fuckeliana B05.10]
  misc_feature (2)..(353): NCBI GI: 171689210 Blast Desc: protein product [Podospora anserina] gi|170944567|emb|CAP70678.1| protein product [Podospora anserina]
  misc_feature (1)..(353): NCBI GI: 259489666 Blast Desc: TPA: transcription factor TFIIH complex subunit (Eurofung) [Aspergillus nidulans FGSC A4]
  misc_feature (1)..(354): NCBI GI: 212529242 Blast Desc: transcription factor TFIIH subunit Tfb4, [Penicillium marneffei ATCC 18224] gi|210074176|gb|EEA28263.1| transcription factor TFIIH subunit Tfb4, [Penicillium marneffei ATCC 18224]
  misc_feature (1)..(354): NCBI GI: 242764012 Blast Desc: transcription factor TFIIH subunit Tfb4, [Talaromyces stipitatus ATCC 10500] gi|218723884|gb|EED23301.1| transcription factor TFIIH subunit Tfb4, [Talaromyces stipitatus ATCC 10500]
  misc_feature (1)..(370): NCBI GI: 255953875 Blast Desc: Pc21g06450 [Penicillium chrysogenum Wisconsin 54-1255] gi|211589401|emb|CAP95542.1| Pc21g06450 [Penicillium chrysogenum Wisconsin 54-1255]
  misc_feature: Useful for introducing or modulating the production of volatile compounds
MNRIDASEHYDESGFASQTPSLLTIIIDTNPRTWALLHDLLPISKAIANILVFVNAHLAFGNENQVAVLAAHTNRAVWLYPTSNNPERPDSNGDVHMSGVDSSATRGGHQLGTSANKYPQFAQIETSILTSLKTLIDATSPSDLTPTTLISGALTMALSYIHKTSLSFSPPKTSTDPANPTTAPSTRPAAPNLHARILVLSVSSSAASQYIPTMNAVFAASHSGIPIDVLSLHSTPTFLQQASFITQGTYLSCSENLRGLLSYLMFGFLPDNSARQSLVTPTQAIIDFKAACFCHRRTVDRGFVCSICLSIFCEIPENAECLTCGTKLALGNYGGKPAVVPRRKKKKKKAVNGTGREESGSGSVAGTPVPPG

SEQ ID NO: 27257 - DNA, 4173 bp, Muscodor strobelii
  misc_feature: SGI EST ID NO. CUFF.64363.0
  misc_feature: Variant of the nucleotide sequence at SEQ ID NO 27255
catcgtgaatactaccgtcgtagcatatcgttccaaaggagacttagtcttgcacccaggcataacttattcttggcgcgctgccgaagacaattctctttctaaccggaaattctcggcggctttgttgcgctatagtgctgatccaggcgccaggcggcagacggcttcgcaggctggcagggaagagggaggcatgaatggaggcattcacttttcgatgatgtgaaaatcgtcgatttcttccaataacgcccactctctcttccttccttcaacatccaggccagcctctgaaggctttaaactgccgtcgtcatttctgaaaccagaatcatagacctgccagcggcagcatcttgtcaagatgaatcgcatcgatgcgtcggagcactacgacgagagcggcttcgccagccagacgccctcgctcctgaccatcatcatcgacaccaatccacgcacctgggccctacttcacgacctgttacccatatctaaggccatagccaatattctagtcttcgtcaacgcccacctagccttcggtaacgagaaccaagtcgccgtcctcgctgcacacaccaaccgagctgtctggttataccctacatccaacaaccccgagcgtccggacagcaatggcgatgtccacatgtccggagtcgacagcagtgccactagaggcggccaccaactcggcacatcggcaaataaatacccccagttcgcccagatcgagacctccatcctcacctccctcaagacgctcatcgacgccacctctccatccgacctcactcccacaaccctcatctcaggcgccttgaccatggcactatcctacatccacaagacctcgctctccttctccccgccaaagacgtcaaccgacccagcaaatcccacaacagccccctcgacgagacccgccgctcccaacctccacgcccgaatcctcgtcctctccgtatcgtcctctgccgcatcgcagtacatacccacaatgaacgccgtattcgccgcctcacacagcggaatacccatcgacgtcctctccctccactccaccccgacattcctccaacaagcatcattcataacccaaggaacatacctctcctgctccgagaatctgaggggcctcctctcatacctcatgttcggatttctccccgacaactctgcgcgacagtctctcgtcacgcccacacaagccataatcgacttcaaggctgcgtgtttctgtcatcggcggacagtggataggggattcgtctgctcgatctgtctgtcgattttctgcgaaatacccgagaacgccgagtgcctgacgtgtgggacgaaactggcgctaggcaactatggcggtaaaccggccgtggtcccgaggaggaaaaagaagaagaagaaggctgttaatggcacgggcagggaggagagtggcagtgggagtgtggctggaacgccggtgccgcctggctagaagtatggcgttacggcccggtaggacggtcgtgcttgacatactacggtcttttgtgtacgagtggtgacgggctgtgtttattaggacatctggcattgcgggcactcatgaacagtgcctacgctgaataacgactatagagaatcatcatgatgattgaattctttcaatttattaccttgacgactggaccatatgtgcggaggagtgagtaactgaaggtctttcttcatgtcaagtatgccagcgcgtgacgcgggggaagtggtcatcggtcggcatctcgtagggtcatatccatctggccagccgcaaggcaatacagctacagagttcgaagcagcaatacgatatcctctacttttgcacacagtagctccaagggacaccatatctcaaatctaatacaccaaattttatctagtccgtatcgtacatattgtcatcgggaaatctcattttttttcatagtatcttacagccacgtatcctttcatcccatctcaaacgtatatttacatggtatcggcgtatttctgcagagaagacatggtctttgtggcctgccccggtatgccccgtacctgcagacacgttgtgggcggtgaagcataaaatccgaagactagagccctcatacaccctcaacgcgatccaacacagcaacaccctcaacatggccagtctgtgggaagaaatcaaaacccctaagactctcaatcacatacctcgtcttcccccctctcccattcccactgctctcccccaccccagtatgtccacggaccagcatcccgacatctcgggcctgggtatgtacattacaactcacatacacaatccgcctgggtccaaaatccagcaactgtcccagaaaattcgtatcgcagcctttcctcggcgggtcgaggatcacgaccgtttcatcggatgcataggtcacggatttgaatagttccccggcgtccgcggcgatgaaattcgcttggttggctgccattccgttgagtgaggcgtttttccgtgcgtggaggatggaggcgggtgagatgtcgattcccgttgaaccttggaagagggatgagagggttattgtgaagaggcctgagcccgagtaggcgtctattaggtttttgattttgggcgctgaagaagatgatgaggaggatgaggatggggagggagacgggggcatgacgtgggaccggatataggctgtgaatggtgagagaatggagttgttgttttggaagaaagatcctgctgggttggtaaactggtatgagtcgatgtaatctgtgctcgtccccttgttgtctgttacgcaagtcttgtaatctgtgtaagtctctgtttctgattttattgcgttgtccggaatttgtaattcttcgctcgaggagtccttggagacgcggagcgtgctttcgcgcaggaggatggtggctccgcgtttgtagtcgccgaactccacggacattctctcgcgttcggacttcatacccatgcgaacagcatcggtgccgatggggcagtcttcgatgtctatcgttgagcgcttgcccttaggcatgaatccgatggctggacgctcggtgaagcgagcgtcaagattcttcctgctccacccctgaggtccgtcgaagtggggtgtgagtttggtacgatagccgtattgtaaaggactaccgatggtgtcttggatcgcggggatgagctcaggcggaaggtcagagaagttcttgaatgccttttccactatgcgcttcttgagacggagctgctctgcgtaatcgagcatctggaattgacagcctgcgcatgaggcgaaatacttgcattttatgcggctatcatcgcgcttttcagatggcgtaacgacagagatgaaatctgcagctgtgtagccttcttcttcgagatgacggtagaccttgacattcacaacatcgccggggaccgcgaagggaacaacatagatctgcgaggaaccctcctgcaatgctagagcgtcgcccgtagatgagagctcgacgaccttgacctcaatttctaagcctagctctagcaatgtctgctcggtcacagattctgcgtcagccttcgtctcatccagtgagatcttaagattttgtatatcaatgccaagaaccccctcgtaagagccactgttcatatcgcgctctctcttcttcttcttggctttcttctgcactcgcttctgagacagatgtgacttggtcccgggatgtggcctcttctcacgaggcgtaaactcatgagtttcattttgctctttgctctggtcctccatgtcgtcccaagatgcacgccgtgcagatttgctagccagccccggccaacctaaacgatgcaggtttttcttctgtggattgggctttgacccgaaggacttctcaaaagcactccacggatcgaaatcagagctcgctgagatagtctttgctgatatctcgttgatttccgaagctggtattctttctcctcgcttgccggttttatgatatttgttgataatccctccacgctggagctgtgatacactgcgtgcaggttggcgatattgtagagcgagaagcgtacgagacttgattaagatctcaatgtttggtgttttgacagttcgccatctagcaagtgcagtgaaaaccatggttttcttt

SEQ ID NO: 27258 - DNA, 816 bp, Muscodor strobelii
  misc_feature: SGI cDNA ID NO. 569336
  misc_feature: Encodes the peptide sequence at SEQ ID NO 27259
atgagaggcgcatctgcagcaatcacggccctgcccgcgctcctcggcacggtgagggcgtccctgtctatctttcccagcaccgtcacttctggcacacccggaagctgctctgcgggtggcggcgtcctcgtcagcttcacggatgcgagcaccatgcgcgtcgtgctccccaacctgaatctctacgtggacacaccaagccatggatttccgcccagctactccatcatggactgcatctcgacgatcgggttcaacgagggggacttctacgggggcgtgatccccggcgccgacggcagcgatcagcatcgcttcgcattcacaagtgtcacttggtctacccctaatctgacgcttgaggcgggtgataatttcaacgatctagaggccaagattgatgcagatcttgagatcaacaatcagaccactaattcgaatctccccatcggtactaacaagtattctaagaatcttgtcaatgtcaaggtagatcccgcagtgggagtcaacgagtcgtacagtggcccattcaaatacaccactaagatcgcgaatccggtgttcacatcatgccttcaaggccgaacggccgccgctctagacctcaatatgcagatcttcgccgagactgttgacggtggtgttagctcaggtgggtggaccgtcgatttcggtgtcacgtttgagaagtgtaaatacaccggagacaattggggctcgacgataatcaaggactggcaagtctgttcatataatgacaagaactcaaccgccacgcgcaagcgatcggagatgcggtcgttgttttaa

SEQ ID NO: 27259 - protein, 271 aa, Muscodor strobelii
  misc_feature: SGI Peptide ID NO. 569336
MRGASAAITALPALLGTVRASLSIFPSTVTSGTPGSCSAGGGVLVSFTDASTMRVVLPNLNLYVDTPSHGFPPSYSIMDCISTIGFNEGDFYGGVIPGADGSDQHRFAFTSVTWSTPNLTLEAGDNFNDLEAKIDADLEINNQTTNSNLPIGTNKYSKNLVNVKVDPAVGVNESYSGPFKYTTKIANPVFTSCLQGRTAAALDLNMQIFAETVDGGVSSGGWTVDFGVTFEKCKYTGDNWGSTIIKDWQVCSYNDKNSTATRKRSEMRSLF

SEQ ID NO: 27260 - DNA, 1984 bp, Muscodor strobelii
  misc_feature: SGI EST ID NO. CUFF.64369.0
  misc_feature: Variant of the nucleotide sequence at SEQ ID NO 27258
gttggtgcatcaatgccggggattaagaaaggagcagggatttctactaccataacgagactagcttattctggtcttgcagtaggtatgtacgtcattacgatctagtgggcgcaagctcacctccaacactctgctccaatgccaagctgaaacaaccaaacatgctgtcggttggtactctgttgggacatgacagattgcctagaacaatgctcccattcctctattttgtttagacttctcatatcactatccgctcttgatactgatcctggcagacgagcagcttctaaaatacccaggacatctgttggtcacctattggtgttgatattcggaaatatgttcaacgtccacttccttgacactattcatagaaggaggcgtgggtagttcatacaccgagcatagaccgtgcttcacagagcgacttccggggatgcctcgcttgaagcgcagcatcgctcaacggcagccagggcccgggttaagcatccgctacgcgtatcggggatgtcccgcaacgtcgcatctagcaattaatagcaataacccggatctgcaactacctggcttcatttgtcaattggacccccttgtccacgaatcctttgcgcgctgaacacgaggtgatatgatgggactccaattgaaaggagcatgcatgctcaattgcctataaacgtgcagaggccacgttcattttttcgtttgctgcgatcgctgccactcttcagtctggactcctcagcgcgaaatccgagcgctgcgacatcaccctctgtcgcggtcgctagtccagtacaagaaaaatgagaggcgcatctgcagcaatcacggccctgcccgcgctcctcggcacggtgagggcgtccctgtctatctttcccagcaccgtcacttctggcacacccggaagctgctctgcgggtggcggcgtcctcgtcagcttcacggatgcgagcaccatgcgcgtcgtgctccccaacctgaatctctacgtggacacaccaagccatggatttccgcccagctactccatcatggactgcatctcgacgatcgggttcaacgagggggacttctacgggggcgtgatccccggcgccgacggcagcgatcagcatcgcttcgcattcacaagtgtcacttggtctacccctaatctgacgcttgaggcgggtgataatttcaacgatctagaggccaagattgatgcagatcttgagatcaacaatcagaccactaattcgaatctccccatcggtactaacaagtattctaagaatcttgtcaatgtcaaggtagatcccgcagtgggagtcaacgagtcgtacagtggcccattcaaatacaccactaagatcgcgaatccggtgttcacatcatgccttcaaggccgaacggccgccgctctagacctcaatatgcagatcttcgccgagactgttgacggtggtgttagctcaggtacgtgccactcaggctcccccgcgccaagaggccagcatctcgttcgtctacttgacaattatgaagagagagagagagaaatagaaggagaaaagactaacaacgttgcaggtgggtggaccgtcgatttcggtgtcacgtttgagaagtgtaaatacaccggagacaattggggctcgacgataatcaaggactggcaagtctgttcatataatgacaagaactcaaccgccacgcgcaagcgatcggagatgcggtcgttgttttaaggcctcttcgtataaaggaagagaggttgtctattgcaatatacatgaattcaagtccattgccgcattgcaaaaaccaccgtacacctgataaaagcagaatgttggtctctgtaccgcatagcatttctgtcgcaagattgttgagagaattcgtattccacatccggtagactggcggctattttacacatcaagaacacctgaaatgcctttctcgcagtgaagatagattgcaa

SEQ ID NO: 27261 - DNA, 2118 bp, Muscodor strobelii
  misc_feature: SGI cDNA ID NO. 569337
  misc_feature: Encodes the peptide sequence at SEQ ID NO 27262
atggacgaacaaccaatacgactcgagtctaagctctcaggagacctcgcaaagctaaacaatgttgatcagacacagctcattttagctcagctcatggagggtggtcaggaagacaacgctacttgccaggccctcgatcgactgaccaagctcctcaatgaagatgccgcctctactaccaaaaccaagtcaatttgcgatgtcatagacgatgtgtgcatggacaccattcttggctatcttgacatgagacaggctgatgcagttcgtggccatgccatactgactacttccgcctacctcaaagccgccggggacaagggtaccgctgcgttacgcaagttcttttttgatcgtgtcgagagaggaacctacgatgattatatcgtggctttttgcgttgcagctgcgttgttccccattgcgccagacaccactgccgagatgtttcttagcgaaggattcttgtcgaccttggatccgttaatgcgacgaaaatggaagagtcggaaagtcgagacggcatgcttggaaatgctcaacgccgcatcttccaactcacaatgccgtgcagctatcaccaagtactgcgcggagtggctggaagaggttgtccaccagaaccccgaggacattgccgaggccgttcattcagcagatcccggagttcaagtcacctccggctccatcgccatgagaagacattccgaagctgtccaacacttggccgccgtcattctggctaagctgactgctgtaccgtcgactccccagacgctccaggatactcacaacagagtgcaaccggtgacgacgagcatcgaggatctctcaaaacgatttacgaccatgttgctaactgacgacccggaggagaaggagggaaaacagcattcgatcgaaggtttggcctatgcgacgatccaaccgaccgtcaaggaagaggtatcacaaaacgcaaaactactgaaaagtctagtcaaagttctcgatgaagccccagcgaaatcttcaaccacctacggcgccttgagtatttttatgaatcttgttcgctatcaacctgtacagtccgaggaggaaaagaaaatgaatcaactcaaagcctacgccaatgcggctggcaagttggcaccacctaacgtcttaaacgataacgaccacgtcgccaagcggtgcaaaaacgtcttcgaagcaggtatcgtgcccgtcctagtcactcacagccgccacggctcaaccgcctcactctccatcataatatccatcctcttctccctctccgtcaccccagccctccgcggccaactcgcccaacaaggcgcagtaaacctcctaatcgccacctggtcctctctcccaccctcggaagccctcgcaaagcgcacagcagcacaaggcctagcccgtattctcatctccacaaatcccacgcacgtattcggcgggacacgtgcccttcccctagctacctcaatccgccctctcatctcgatccttccccaggacccagcagcagatcgaaacgacttactaccaaccttcgaatccctaatggcccttacgaacctcgcatcaacagacgacgacacccgcgcgacgataataaggaccagctgggacgccatcgaagaacagctgctctcatcaaataacctcgtcgcgaaagccgctacggagttgatatgcaacctagtacaatgcgtcgagggcgtagctctctacgctgaagactcgtcaaaagcggcgaatcgtctacatatcctcctcgcgctcacagacgcagaagatgagggcacacgatctgctgctgggggggcgctcgcttcgctcgctgggtatgaagagattgtcaaggcaatattgaagagagataggggcatggagaatatccttgcgttgtgtggagaggagaatgaggatctgagacataggggtgtttttgtgattatgggttgtatttctcgtgaagggacgacgggtaaggaagctaggaaggctataagggagaaagatggtgtggaggtattgaaagagtgtgcgaagatgagtaggaggagtgaggttgttgaggttactgtccaggcgcttaagatactgcttgaggacgattga

SEQ ID NO: 27262 - protein, 705 aa, Muscodor strobelii
  misc_feature: SGI Peptide ID NO. 569337
  misc_feature (23)..(702): NCBI GI: 46138693 Blast Desc: FG10861.1 [Gibberella zeae PH-1]
  misc_feature (23)..(703): NCBI GI: 39943730 Blast Desc: MGG_03876 [Magnaporthe grisea 70-15] gi|145014572|gb|EDJ99140.1| MGG_03876 [Magnaporthe grisea 70-15]
  misc_feature (19)..(702): NCBI GI: 171689208 Blast Desc: protein product [Podospora anserina] gi|2808541|emb|CAA76144.1| CRO1 protein [Podospora anserina] gi|170944566|emb|CAP70677.1| protein product [Podospora anserina]
  misc_feature (23)..(704): NCBI GI: 261357024 Blast Desc: CRO1 protein [Verticillium albo-atrum VaMs.102]
  misc_feature (19)..(702): NCBI GI: 164424601 Blast Desc: NCU06821 [Neurospora crassa OR74A] gi|18375983|emb|CAB91722.2| cro1 protein [Neurospora crassa] gi|157070582|gb|EAA34426.2| NCU06821 [Neurospora crassa OR74A]
  misc_feature (23)..(704): NCBI GI: 154310837 Blast Desc: BC1G_06397 [Botryotinia fuckeliana B05.10] gi|150851196|gb|EDN26389.1| BC1G_06397 [Botryotinia fuckeliana B05.10]
  misc_feature (23)..(705): NCBI GI: 156034246 Blast Desc: SS1G_13426 [Sclerotinia sclerotiorum 1980] gi|154698829|gb|EDN98567.1| SS1G_13426 [Sclerotinia sclerotiorum 1980]
  misc_feature (27)..(702): NCBI GI: 116204611 Blast Desc: CHGG_10189 [Chaetomium globosum CBS 148.51] gi|88176317|gb|EAQ83785.1| CHGG_10189 [Chaetomium globosum CBS 148.51]
  misc_feature (26)..(702): NCBI GI: 119174358 Blast Desc: CIMG_09161 [Coccidioides immitis RS]
  misc_feature (26)..(702): NCBI GI: 240106794 Blast Desc: CPC735_015800 [Coccidioides posadasii C735 delta SOWgp]
MDEQPIRLESKLSGDLAKLNNVDQTQLILAQLMEGGQEDNATCQALDRLTKLLNEDAASTTKTKSICDVIDDVCMDTILGYLDMRQADAVRGHAILTTSAYLKAAGDKGTAALRKFFFDRVERGTYDDYIVAFCVAAALFPIAPDTTAEMFLSEGFLSTLDPLMRRKWKSRKVETACLEMLNAASSNSQCRAAITKYCAEWLEEVVHQNPEDIAEAVHSADPGVQVTSGSIAMRRHSEAVQHLAAVILAKLTAVPSTPQTLQDTHNRVQPVTTSIEDLSKRFTTMLLTDDPEEKEGKQHSIEGLAYATIQPTVKEEVSQNAKLLKSLVKVLDEAPAKSSTTYGALSIFMNLVRYQPVQSEEEKKMNQLKAYANAAGKLAPPNVLNDNDHVAKRCKNVFEAGIVPVLVTHSRHGSTASLSIIISILFSLSVTPALRGQLAQQGAVNLLIATWSSLPPSEALAKRTAAQGLARILISTNPTHVFGGTRALPLATSIRPLISILPQDPAADRNDLLPTFESLMALTNLASTDDDTRATIIRTSWDAIEEQLLSSNNLVAKAATELICNLVQCVEGVALYAEDSSKAANRLHILLALTDAEDEGTRSAAGGALASLAGYEEIVKAILKRDRGMENILALCGEENEDLRHRGVFVIMGCISREGTTGKEARKAIREKDGVEVLKECAKMSRRSEVVEVTVQALKILLEDD

SEQ ID NO: 27263 - DNA, 4533 bp, Muscodor strobelii
  misc_feature: SGI EST ID NO. CUFF.64391.0
  misc_feature: Variant of the nucleotide sequence at SEQ ID NO 27261
tagtaatgcataagacgttcctcttattcactgattcttactcaaccacaaaccctacatcaatcttatgccaatagccatctctcactgtctcaacatccaccatatgcgcgccttactaccattgtaattacccctatagtccaagcataagaaatttgtcccagccgtggtattcatatagcatctcgtatgttctggcctgttaccggaggtagtcaattgcggggcaacccttggcggggcaaagtcatacatagcacttgagcttatccttgcacatcataagctgttgtagccttcgactttgttttacttgctcgacttctcttaaaagagcaagatcatattttcatagccagcatggacgaacaaccaatacgactcgagtctaagctctcaggagacctcgcaaagctaaacaatgttgatcagacacagctcattttagctcagctcatggagggtggtcaggaagacaacgctacttgccaggccctcgatcgactgaccaagctcctcaatgaagatgccgcctctactaccaaaaccaagtcaatttgcgatgtcatagacgatgtgtgcatggacaccattcttggctatcttgacatgagacaggctgatgcagttcgtggccatgccatactgactacttccgcctacctcaaagccgccggggacaagggtaccgctgcgttacgcaagttcttttttgatcgtgtcgagagaggaacctacgatgattatatcgtggctttttgcgttgcagctgcgttgttccccattgcgccagacaccactgccgagatgtttcttagcgaaggattcttgtcgaccttggatccgttaatgcgacgaaaatggaagagtcggaaagtcgagacggcatgcttggaaatgctcaacgccgcatcttccaactcacaatgccgtgcagctatcaccaagtactgcgcggagtggctggaagaggttgtccaccagaaccccgaggacattgccgaggccgttcattcagcagatcccggagttcaagtcacctccggctccatcgccatgagaagacattccgaagctgtccaacacttggccgccgtcattctggctaagctgactgctgtaccgtcgactccccagacgctccaggatactcacaacagagtgcaaccggtgacgacgagcatcgaggatctctcaaaacgatttacgaccatgttgctaactgacgacccggaggagaaggagggaaaacagcattcgatcgaaggtttggcctatgcgacgatccaaccgaccgtcaaggaagaggtatcacaaaacgcaaaactactgaaaagtctagtcaaagttctcgatgaagccccagcgaaatcttcaaccacctacggcgccttgagtatttttatgaatcttgttcgctatcaacctgtacagtccgaggaggaaaagaaaatgaatcaactcaaagcctacgccaatgcggctggcaagttggcaccacctaacgtcttaaacgataacgaccacgtcgccaagcggtgcaaaaacgtcttcgaagcaggtatcgtgcccgtcctagtcactcacagccgccacggctcaaccgcctcactctccatcataatatccatcctcttctccctctccgtcaccccagccctccgcggccaactcgcccaacaaggcgcagtaaacctcctaatcgccacctggtcctctctcccaccctcggaagccctcgcaaagcgcacagcagcacaaggcctagcccgtattctcatctccacaaatcccacgcacgtattcggcgggacacgtgcccttcccctagctacctcaatccgccctctcatctcgatccttccccaggacccagcagcagatcgaaacgacttactaccaaccttcgaatccctaatggcccttacgaacctcgcatcaacagacgacgacacccgcgcgacgataataaggaccagctgggacgccatcgaagaacagctgctctcatcaaataacctcgtcgcgaaagccgctacggagttgatatgcaacctagtacaatgcgtcgagggcgtagctctctacgctgaagactcgtcaaaagcggcgaatcgtctacatatcctcctcgcgctcacagacgcagaagatgagggcacacgatctgctgctgggggggcgctcgcttcgctcgctgggtatgaagagattgtcaaggcaatattgaagagagataggggcatggagaatatccttgcgttgtgtggagaggagaatgaggatctgagacataggggtgtttttgtgattatgggttgtatttctcgtgaagggacgacgggtaaggaagctaggaaggctataagggagaaagatggtgtggaggtattgaaagagtgtgcgaagatgagtaggaggagtgaggttgttgaggttactgtccaggcgcttaagatactgcttgaggacgattgattggtaggggatgaagaaattagtccatgtgcaattttattgtggccattgtactttattcaggacctaggaccttgaacttcacaaaaaaagagaattattgatgagacactcttatctacctactataagaagtgggcataaaagttcagcaatgcctcaattgcgcggtgcaaaacgtgtgatatttaggattcttgaagatcaggtacatgtatcattcctgcatagctgtgcggcatactcagtcatcgagtttgagtactatcccaggtagatggcaacaacgtgcgatacattactaggagacaaattgcgtttcaaccatttgacgattattgttgaagtgcaacttcacagctggagttcaacatgatttttgattcccctcgtcgtctgcttgcatcgtctcgaccgttaagctcgctactctaagtaccatttctaactaatctcatgaacctcccggaccacccagcaaagcaaatctcctgacgataccgggaccatattcttgatactacgagacagttagtgcgcattcccaaaccagatctagagtgtgcttagcaagtactcacctccgccttagtgtggcaataagacttaaattcaggcgtctgaccaagtagactgcctccaaaccacggaccatgtctctgcctcttgtgagaaatgacttgaacctcgagaccgccgctcttggcaccaccacttcggacctcgctagcctttatgcgcgcatctactaggtgcttgatgtcgcgttgtaaccttcggccgaaatccttgtatagcgtgctaccaccagatagtacgatgttcttgtaaaggccacgtcggacatcgataggactggactgaatgacgccgtcgacgactacggggagaggtgtcaggaagtccgaggagtagatctcggggttgaagaagatctcaggtgccaagaagcgctcgtagccgacatcgacggagacttggcggccaccgggctgggagacgacgtgcttggcgaagcggctacggtcgcgatcgaagcgagagaactccttgacgatatcggggcaaacatagcagtattcctccttgatctcctgggcggtcttcaaagagctgtctggctcgcctcggtcacggagcagggactggacgaagtaggtgagatctcgaccggcgataggtatggatttgatggaggagccgatgacatagccctcggcgacggggatgacgtgggtaacaccatcgccagagtcgatgacagtacccgtcagagaccggtcagtgactttcgtagaggtccaagacgcagcgagcgcgagcacagcctggacagcgatgtatagaccggcgcagttgaaggactcgaagaagatctcggcggtgttttcgcggttctcgggagggttcaagggctaggtagtgtcagcacagatttcaacatgatggcgcatgcgaggaatctcacgggctcggtgaggaggaaatggtggtcttcgggctcgacgcgcagatatttgaagatggagttggaccagaatctttccatatggtcctacgcagccaattggtcagtattgcatcgtcgcagcaacagctatcaaggaccagcatacccaattctcgatctggccgtgtcggatggggtagtgtagaccgtagccttatctgaagtcaattgatgtctctggttcatcgaacgagtgtcttggcgaacataccgggaccattggcagcagcgacagcttcatcaccaatgaagaaatccaggtcttcggtacctcgcttgttggagaggtggccggttggaccagcgccgcctgtcaagaaggagggcttgttggcgacggcagggcggccagagcctgtgccaccgctaccagcagctggacccttggtggctatggcggtggggaagacgaaggagggcgaatcgttaccggcgaaacctatagagcggcgcaaagaagcgggcggtcagtctcgaaccgggtcgatgatacgaaggcaatggggcggtgtatataacggtggcgccgaagcgggatgcta

SEQ ID NO: 27264 - DNA, 1320 bp, Muscodor strobelii
  misc_feature: SGI cDNA ID NO. 569338
  misc_feature: Encodes the peptide sequence at SEQ ID NO 27265
atggccaaccagacgccggccgttgtcatggacaacggtacgggcttctcgaagcttggtttcgccggtaacgattcgccctccttcgtcttccccaccgccatagccaccaagggtccagctgctggtagcggtggcacaggctctggccgccctgccgtcgccaacaagccctccttcttgacaggcggcgctggtccaaccggccacctctccaacaagcgaggtaccgaagacctggatttcttcattggtgatgaagctgtcgctgctgccaatggtcccggctacggtctacactaccccatccgacacggccagatcgagaattgggaccatatggaaagattctggtccaactccatcttcaaatatctgcgcgtcgagcccgaagaccaccatttcctcctcaccgagccccccttgaaccctcccgagaaccgcgaaaacaccgccgagatcttcttcgagtccttcaactgcgccggtctatacatcgctgtccaggctgtgctcgcgctcgctgcgtcttggacctctacgaaagtcactgaccggtctctgacgggtactgtcatcgactctggcgatggtgttacccacgtcatccccgtcgccgagggctatgtcatcggctcctccatcaaatccatacctatcgccggtcgagatctcacctacttcgtccagtccctgctccgtgaccgaggcgagccagacagctctttgaagaccgcccaggagatcaaggaggaatactgctatgtttgccccgatatcgtcaaggagttctctcgcttcgatcgcgaccgtagccgcttcgccaagcacgtcgtctcccagcccggtggccgccaagtctccgtcgatgtcggctacgagcgcttcttggcacctgagatcttcttcaaccccgagatctactcctcggacttcctgacacctctccccgtagtcgtcgacggcgtcattcagtccagtcctatcgatgtccgacgtggcctttacaagaacatcgtactatctggtggtagcacgctatacaaggatttcggccgaaggttacaacgcgacatcaagcacctagtagatgcgcgcataaaggctagcgaggtccgaagtggtggtgccaagagcggcggtctcgaggttcaagtcatttctcacaagaggcagagacatggtccgtggtttggaggcagtctacttggtcagacgcctgaatttaagtcttattgccacactaaggcggagtatcaagaatatggtcccggtatcgtcaggagatttgctttgctgggtggtccgggaggttcatga

SEQ ID NO: 27265 - protein, 439 aa, Muscodor strobelii
  misc_feature: SGI Peptide ID NO. 569338
  misc_feature (2)..(432): Pfam Id: PF00022 Pfam Desc: Actin
  misc_feature (1)..(439): NCBI GI: 164428163 Blast Desc: NCU01756 [Neurospora crassa OR74A] gi|14286112|sp|P78712.2|ARP3_NEUCR RecName: Full=Actin-related protein 3; AltName: Full=Actin-like protein 3 actin-related 3
  misc_feature (1)..(439): NCBI GI: 1718497 Blast Desc: actin-related protein 3 [Neurospora crassa]
  misc_feature (1)..(439): NCBI GI: 46138683 Blast Desc: ARP3_NEUCR Actin-like protein 3 [Gibberella zeae PH-1]
  misc_feature (1)..(439): NCBI GI: 256728915 Blast Desc: Actin-related protein, ARP3 class [Nectria haematococca mpVI 77-13-4]
  misc_feature (1)..(439): NCBI GI: 261357027 Blast Desc: actin-2 [Verticillium albo-atrum VaMs.102]
  misc_feature (1)..(439): NCBI GI: 116204605 Blast Desc: conserved [Chaetomium globosum CBS 148.51] gi|88176314|gb|EAQ83782.1| conserved [Chaetomium globosum CBS 148.51]
  misc_feature (1)..(439): NCBI GI: 154310843 Blast Desc: conserved [Botryotinia fuckeliana B05.10] gi|150851199|gb|EDN26392.1| conserved [Botryotinia fuckeliana B05.10]
  misc_feature (1)..(439): NCBI GI: 238841220 Blast Desc: actin [Microsporum canis CBS 113480]
  misc_feature (12)..(439): NCBI GI: 171689222 Blast Desc: protein product [Podospora anserina] gi|170944573|emb|CAP70684.1| protein product [Podospora anserina]
  misc_feature (1)..(423): NCBI GI: 145606953 Blast Desc: conserved [Magnaporthe grisea 70-15] gi|145014575|gb|EDJ99143.1| conserved [Magnaporthe grisea 70-15]
MANQTPAVVMDNGTGFSKLGFAGNDSPSFVFPTAIATKGPAAGSGGTGSGRPAVANKPSFLTGGAGPTGHLSNKRGTEDLDFFIGDEAVAAANGPGYGLHYPIRHGQIENWDHMERFWSNSIFKYLRVEPEDHHFLLTEPPLNPPENRENTAEIFFESFNCAGLYIAVQAVLALAASWTSTKVTDRSLTGTVIDSGDGVTHVIPVAEGYVIGSSIKSIPIAGRDLTYFVQSLLRDRGEPDSSLKTAQEIKEEYCYVCPDIVKEFSRFDRDRSRFAKHVVSQPGGRQVSVDVGYERFLAPEIFFNPEIYSSDFLTPLPVVVDGVIQSSPIDVRRGLYKNIVLSGGSTLYKDFGRRLQRDIKHLVDARIKASEVRSGGAKSGGLEVQVISHKRQRHGPWFGGSLLGQTPEFKSYCHTKAEYQEYGPGIVRRFALLGGPGGS

SEQ ID NO: 27266 - DNA, 5076 bp, Muscodor strobelii
  misc_feature: SGI EST ID NO. CUFF.64392.1
  misc_feature: Variant of the nucleotide sequence at SEQ ID NO 27264
aattgatgtaaaagtaggctgaagctaccaaatgcgttttgacgtgggaaaactgtgccttggtggtggctacttgatcggatgatgtagcggatcaacccgtcttggtcacggacatcttcaacgttttccacacagaggctgactctcaactcgtctataatttcgatgactatattagaatatattcaatataatctaaagccatggtcgacaattgtcagttatgggtagttagagagcgatcattcacatcagtcatagaaatggcttgagatgacgaatcagagcagtcgagatagctcttagtatgcctagagaaatgcctgagtggttggatgtttaaaagtcacatttagaaaatgagcgcaagtaatgccaggctttgaattagtagtcgttgtatagcccaagaagaatattgtgaggtacggcggtcatattgtaaggcacgggcaggtctagtgtgagttgagaggtgagaggtgaaagcgtgaggtgagtaccccgccgacccacatcccacacagtcggctgccttgcggcgtcatccccccaaagctccaaccgcccactgcagactatcaccaacctcaacatcaccagcagcactggcgcaacggtcgcctcctcgtccgcctctcggatctccttctctgctgctgtagacactccatacttgctgcagcttctccactctccttcatcatggccaaccagacgccggccgttgtcatggacaacggtacgggcttctcgaagcttggtttcgccggtaacgattcgccctccttcgtcttccccaccgccatagccaccaagggtccagctgctggtagcggtggcacaggctctggccgccctgccgtcgccaacaagccctccttcttgacaggcggcgctggtccaaccggccacctctccaacaagcgaggtaccgaagacctggatttcttcattggtgatgaagctgtcgctgctgccaatggtcccggctacggtctacactaccccatccgacacggccagatcgagaattgggaccatatggaaagattctggtccaactccatcttcaaatatctgcgcgtcgagcccgaagaccaccatttcctcctcaccgagccccccttgaaccctcccgagaaccgcgaaaacaccgccgagatcttcttcgagtccttcaactgcgccggtctatacatcgctgtccaggctgtgctcgcgctcgctgcgtcttggacctctacgaaagtcactgaccggtctctgacgggtactgtcatcgactctggcgatggtgttacccacgtcatccccgtcgccgagggctatgtcatcggctcctccatcaaatccatacctatcgccggtcgagatctcacctacttcgtccagtccctgctccgtgaccgaggcgagccagacagctctttgaagaccgcccaggagatcaaggaggaatactgctatgtttgccccgatatcgtcaaggagttctctcgcttcgatcgcgaccgtagccgcttcgccaagcacgtcgtctcccagcccggtggccgccaagtctccgtcgatgtcggctacgagcgcttcttggcacctgagatcttcttcaaccccgagatctactcctcggacttcctgacacctctccccgtagtcgtcgacggcgtcattcagtccagtcctatcgatgtccgacgtggcctttacaagaacatcgtactatctggtggtagcacgctatacaaggatttcggccgaaggttacaacgcgacatcaagcacctagtagatgcgcgcataaaggctagcgaggtccgaagtggtggtgccaagagcggcggtctcgaggttcaagtcatttctcacaagaggcagagacatggtccgtggtttggaggcagtctacttggtcagacgcctgaatttaagtcttattgccacactaaggcggagtatcaagaatatggtcccggtatcgtcaggagatttgctttgctgggtggtccgggaggttcatgagattagttagaaatggtacttagagtagcgagcttaacggtcgagacgatgcaagcagacgacgaggggaatcaaaaatcatgttgaactccagctgtgaagttgcacttcaacaataatcgtcaaatggttgaaacgcaatttgtctcctagtaatgtatcgcacgttgttgccatctacctgggatagtactcaaactcgatgactgagtatgccgcacagctatgcaggaatgatacatgtacctgatcttcaagaatcctaaatatcacacgttttgcaccgcgcaattgaggcattgctgaacttttatgcccacttcttatagtaggtagataagagtgtctcatcaataattctctttttttgtgaagttcaaggtcctaggtcctgaataaagtacaatggccacaataaaattgcacatggactaatttcttcatcccctaccaatcaatcgtcctcaagcagtatcttaagcgcctggacagtaacctcaacaacctcactcctcctactcatcttcgcacactctttcaatacctccacaccatctttctcccttatagccttcctagcttccttacccgtcgtcccttcacgagaaatacaacccataatcacaaaaacacccctatgtctcagatcctcattctcctctccacacaacgcaaggatattctccatgcccctatctctcttcaatattgccttgacaatctcttcatacccagcgagcgaagcgagcgcccccccagcagcagatcgtgtgccctcatcttctgcgtctgtgagcgcgaggaggatatgtagacgattcgccgcttttgacgagtcttcagcgtagagagctacgccctcgacgcattgtactaggttgcatatcaactccgtagcggctttcgcgacgaggttatttgatgagagcagctgttcttcgatggcgtcccagctggtccttattatcgtcgcgcgggtgtcgtcgtctgttgatgcgaggttcgtaagggccattagggattcgaaggttggtagtaagtcgtttcgatctgctgctgggtcctggggaaggatcgagatgagagggcggattgaggtagctaggggaagggcacgtgtcccgccgaatacgtgcgtgggatttgtggagatgagaatacgggctaggccttgtgctgctgtgcgctttgcgagggcttccgagggtgggagagaggaccaggtggcgattaggaggtttactgcgccttgttgggcgagttggccgcggagggctggggtgacggagagggagaagaggatggatattatgatggagagtgaggcggttgagccgtggcggctgtgagtgactaggacgggcacgatacctgcttcgaagacgtttttgcaccgcttggcgacgtggtcgttatcgtttaagacgttaggtggtgccaacttgccagccgcattggcgtaggctttgagttgattcattttcttttcctcctcggactgtacaggttgatagcgaacaagattcataaaaatactcaaggcgccgtaggtggttgaagatttcgctggggcttcatcgagaactttgactagacttttcagtagttttgcgttttgtgatacctcttccttgacggtcggttggatcgtcgcataggccaaaccttcgatcgaatgctgttttccctccttctcctccgggtcgtcagttagcaacatggtcgtaaatcgttttgagagatcctcgatgctcgtcgtcaccggttgcactctgttgtgagtatcctggagcgtctggggagtcgacggtacagcctgggaaccgcagggtcagccctgtgtttcgctgctctcactgcgcctgatcacctccagtggaggtgttcgtaagcgggtgttttgaactcggggaatttgagagtgcctacagtcagcttagccagaatgacggcggccaagtgttggacagcttcggaatgtcttctcatggcgatggagccggaggtgacttgaactccgggatctgctgaatgaacggcctcggcaatgtcctcggggttctggtggacaacctcttccagccactccgcgcagtacttggtgatagctgcacggcattgtgagttggaagatgcggcgttgagcatttccaagcatgccgtctcgactttccgactcttccattttcgtcgcattaacggatccaaggtcgacaagaatccttcgctaagaaacatctcggcagtggtgtctggcgcaatggggaacaacgcagctgcaacgcaaaaagccacgatataatcatcgtaggttcctctctcgacacgatcaaaaaagaacttgcgtaacgcagcggtacccttgtccccggcggctttgaggtaggcggaagtagtcagtatggcatggccacgaactgcatcagcctgtctcatgtcaagatagccaagaatggtgtccatgcacacatcgtctatgacatcgcaaattgacttggttttggtagtagaggcggcatcttcattgaggagcttggtcagtcgatcgagggcctggcaagtagcgttgtcttcctgaccaccctccatgagctgagctaaaatgagctgtgtctgatcaacattgtttagctttgcgaggtctcctgagagcttagactcgagtcgtattggttgttcgtccatgctggctatgaaaatatgatcttgctcttttaagagaagtcgagcaagtaaaacaaagtcgaaggctacaacagcttatgatgtgcaaggataagctcaagtgctatgtatgactttgccccgccaagggttgccccgcaattgactacctccggtaacaggccagaacatacgagatgctatatgaataccacggctgggacaaatttcttatgcttggactataggggtaattacaatggtagtaaggcgcgcatatggtggatgttgagacagtgagagatggctattggcataagattgatgtagggtttgtggttgagtaagaatcagtgaataagaggaacgtcttatgcattacta

SEQ ID NO: 27267 - DNA, 408 bp, Muscodor strobelii
  misc_feature: SGI cDNA ID NO. 569339
  misc_feature: Encodes the peptide sequence at SEQ ID NO 27268
atggggcgacccgtctccgccatcttcatccacgccggcgccggctaccattctacagcaaatgagcgtgttcacctcgaagcctgcgcttatgcggcacgtgctagcatcaagctgatgaggaagggcggctcggcagtcgaggccgtcgagcttgccatcaagactctcgaagacaacgagatcacaaatgcgggcttcgggagcaatctcaccatcgagggcactgtagaatgtgatgccaccgtcgtcgatcactatgggcgcagtggcgcttgcggcgcggttccaagtaggctctggtgtccaagacgtcccgagatcgtttcaaacgatggcaagaagatctcaatcgtgctggagagatacgaggccgcccgacaacacccccgactcaagaaagactag

SEQ ID NO: 27268 - protein, 135 aa, Muscodor strobelii
  misc_feature: SGI Peptide ID NO. 569339
  misc_feature (4)..(96): Pfam Id: PF01112 Pfam Desc: Asparaginase
  misc_feature (3)..(99): NCBI GI: 171689224 Blast Desc: protein product [Podospora anserina] gi|170944574|emb|CAP70685.1| protein product [Podospora anserina]
  misc_feature (5)..(96): NCBI GI: 154310841 Blast Desc: BC1G_06399 [Botryotinia fuckeliana B05.10] gi|150851198|gb|EDN26391.1| BC1G_06399 [Botryotinia fuckeliana B05.10]
  misc_feature (5)..(96): NCBI GI: 156034242 Blast Desc: SS1G_13424 [Sclerotinia sclerotiorum 1980] gi|154698827|gb|EDN98565.1| SS1G_13424 [Sclerotinia sclerotiorum 1980]
  misc_feature (3)..(96): NCBI GI: 85083759 Blast Desc: NCU01757 [Neurospora crassa OR74A] gi|7800880|emb|CAB91238.1| related to asparaginase [Neurospora crassa] gi|28918267|gb|EAA27944.1| [Neurospora crassa OR74A]
  misc_feature (1)..(96): NCBI GI: 238496127 Blast Desc: asparaginase family protein [Aspergillus flavus NRRL3357] gi|220694179|gb|EED50523.1| asparaginase family protein [Aspergillus flavus NRRL3357]
  misc_feature (1)..(96): NCBI GI: 169775243 Blast Desc: [Aspergillus oryzae RIB40] gi|83769952|dbj|BAE60087.1| protein product [Aspergillus oryzae]
  misc_feature (3)..(96): NCBI GI: 116204607 Blast Desc: CHGG_10187 [Chaetomium globosum CBS 148.51] gi|88176315|gb|EAQ83783.1| CHGG_10187 [Chaetomium globosum CBS 148.51]
  misc_feature (5)..(100): NCBI GI: 70997493 Blast Desc: asparaginase family protein [Aspergillus fumigatus Af293] gi|66851129|gb|EAL91455.1| asparaginase family protein [Aspergillus fumigatus Af293] gi|159126778|gb|EDP51894.1| family
  misc_feature (5)..(98): NCBI GI: 256729097 Blast Desc: NECHADRAFT_40402 [Nectria haematococca mpVI 77-13-4]
  misc_feature (5)..(96): NCBI GI: 145254852 Blast Desc: An18g03190 [Aspergillus niger] gi|134084363|emb|CAK48703.1| protein product [Aspergillus niger]
  misc_feature (8)..(97): SWISSPROT Homolog: EC 3.4.19.5 Beta-aspartyl-peptidase
MGRPVSAIFIHAGAGYHSTANERVHLEACAYAARASIKLMRKGGSAVEAVELAIKTLEDNEITNAGFGSNLTIEGTVECDATVVDHYGRSGACGAVPSRLWCPRRPEIVSNDGKKISIVLERYEAARQHPRLKKD

SEQ ID NO: 27269 - DNA, 988 bp, Muscodor strobelii
  misc_feature: SGI EST ID NO. CUFF.64395.0
  misc_feature: Variant of the nucleotide sequence at SEQ ID NO 27267
gtgcattcctgctcgtagagcgcttgggtgataagaagaagcaacgacagcgggaagggacagggcagcagacgcaagtacgggacggcagtagcgactacggtgaagcactagcggcaaagccagtacttgacgtcttcgtattcgtccgatcaatgagtccaggttctcatctctcctatgcacaatagtcttatcgcgggtgatcgatggcaccatggggcgacccgtctccgccatcttcatccacgccggcgccggctaccattctacagcaaatgagcgtgttcacctcgaagcctgcgcttatgcggcacgtgctagcatcaagctgatgaggaagggcggctcggcagtcgaggccgtcgagcttgccatcaagactctcgaagacaacgagatcacaaatgcgggcttcgggagcaatctcaccatcgagggcactgtagaatgtgatgccaccgtcgtcgatcactatgggcgcagtggcgcttgcggcgcggttccaaatattaagaacccaatatgcctcgcaaaatggattcttacatgcagtctcaatcccatgactctacgtcgtatccctccaaacctactcgtcggcgaaggagcgagagattttgccgttgacacacatcttactagcctgacacccaatgaggctctggtgtccaagacgtcccgagatcgtttcaaacgatggcaagaagatctcaatcgtgctggagagatacgaggccgcccgacaacacccccgactcaagaaagactagaccaagatcgatcgaccgctcaagaaggacacccgtctttgcgagaccacgcaaacgccatattgacaggtacctggaatgagggacagcctgactctcccgccaccggctcatgctggcaaactcccaaatccgcttcaccagctacaccctctactccgacaagagccacggtcgagcgcaatccactcagcttccttggctcggcgctttcc

SEQ ID NO: 27270 - DNA, 2982 bp, Muscodor strobelii
  misc_feature: SGI cDNA ID NO. 569340
  misc_feature: Reduced expression when VOC is produced
  misc_feature: Encodes the peptide sequence at SEQ ID NO 27271
atgagtcctgccgcccgctcggaaaccctcgttctctccaacggcggagccatgacgcacaaccatgccgacggaggcttgggcaaggggccgcgtgcgacgaatggcgccgcccgtggctcgggcaagccgcccttccgccatatcgacgacatcgtctccgtcaccgtcagcatcgacccccacacgcccctgcgcagactgctcgacatgggcgacacctccatgcgccaggccctcaccttcaaccagttcggccgccccgacatggccctgcaggagtacatcaaggccttcaccatcgccgtcgacaaggtccccaagcacaaggactacccctcgctcaaggccgatcgcggcgacttgaacaggctgtaccaggccctcaaggtcaagatcaccgacagcggcgccgccttcgacaaggtcaaggagcagatcaaggaggacaatctgaggagcggtgtccttcccaccagaccgcactccgagcagctcctctccagcttgccgagtgccccttcggccgcgcccaaagatcgctctgcccgttcttctatgaatgggctacccacggctcccagctccctgcccggcagtgaatctgtcccagctcggagggcgaagcccgctgtccacccgaagccggaagccctgcacggaaatgctatcaggcaatcctcagagcaggcccgaccagacctcgccgctcgcttcgcaaagcttcgcacgaacaatgcgccctcccagatttccatcgacagctccgtgccggctatgcccaagatgccagatgccatctacagccctgccaggggcaccatgacccccgaggttgccaatctcccctccagtataccgcgcggcatgcttagccggaccaattctattgcatctgcccccaccgggacgtctcggacgtcgatggatagcactttcaggtccttcggcagagagcagtttgccgccgcgcatacttacggccaagcgcaagaagctgctcctggcacaaaagttcggattcctcgcggagacacgatcacggtgaacgaactcgtgcgctgcatgggctacggcgatgccaacgtcaaaatcctcctgatcgatgtgcgagaccgcgaagcatttcaagagggtcatatcatgtcacataaaaccatctgcatcgaacccagcattctcgagcgtgaggacatatctgccgacgaaatactagatagtatggtactgtcaccagatcaagagagagacgccattgaaaaccgcaatagatttgatctcgttgtgttctacgaccagagttctcaatctattcctacgaggagccgagccacagatgccgaagcgattgttttgtataatcttcaacaggccttgtcaaactacaacgacttgactctgaagaatatccccaaactattggtcgggggtttagatgcatgggttgataccgtgggtgctcaatcgcttgagaagtcggtccccaacattggtagtgcgcggtccgccataactcgcaagagaatggggactcgccgcctaaagccagaggagagaaaggaagtcgaagagatgatcgcgagagatcagacaggtgtagattatgctacaagcgtcgaggccgtgatgcggcgattcccaagtataaaagctggacctgaatctatggtatccagcgggcaggaagagtcttcaggactctcagatataagcggcgacaccttcttaaaggatatagccactaagccacccgtacgtcccaagccctcggtggctcggacgaggtatagcggtctagagtcgagggaagaagcgcccgctggtatagctatgcaggctaccgtcggtggaagaatgacgggtcttgtgaaccctgggaactggtgctattccaatgcgtccctgcaagcgctccttgcctccacaggattcgcggacgaactgatcgaccccaactggccagctagatatcgacctaatgtacctcacaatcacccatctcggaatcaactcatgtgtaagatcttgggcaacctcttccagtggctaaggaaaagggagtttgctcaacttaaaaccaccacactcatgcactatcttcgaagcattcacgagggctacgcgccggccaataggagtaatctcgtgagatttggggataataaccaacacgactcagacgagttcgccacctttatcatgggccagcttgcagccgaaacccgcgtcgctgtaccaaacaagcagaatatccagatcgatgatccagactccctgcaaggagcagtgctacaatcgtgggtggtcggggctgacccgagcttcatccacaaatattggcatttggtagaggtatcagaactggcctgcgactcttgtggagacgagactcatgtcgcgaattctgccaacagcttagtgctccatgttcctcgagagcataacggcggcactatggaacgtggtcttgatgagtactttacaccagtgcctgtagattcgtcatgtgacaactgtaaagaatcgggcaagatgttgcagagacgcatcacgcggttaccgcccctactccgtgtcaccataggcagattcgcgttggacagcggtagaatgtcgaagaacctaaaccacttccagattcccgagacgctagatcttgaaaaatacgccagcgacagagcggacagacggcagatcggcgcccagatcgagggtgaggccggcgagggctttgatgtagatgcggtttatgatctgtatgctgtggttctgcactcgggaccaacggcgaacagtgggcattatatcgcgtatatcaatctgggacaggatgattggtggaattgtaatgatacgagtgtcacgaagatggatagctttaggagatttgcgcagagcatgtatacgggtgagggtaggcttacgcctgtgcagacgtattatcgaaggagggattatacttatcggccgcctcaacggtaa

SEQ ID NO: 27271 - protein, 993 aa, Muscodor strobelii
  misc_feature: SGI Peptide ID NO. 569340
  misc_feature (617)..(968): Pfam Id: PF00443 Pfam Desc: Ubiquitin carboxyl-terminal hydrolase
  misc_feature (617)..(958): Pfam Id: PF00443 Pfam Desc: Ubiquitin carboxyl-terminal hydrolase
  misc_feature (2)..(957): NCBI GI: 256733614 Blast Desc: NECHADRAFT_67504 [Nectria haematococca mpVI 77-13-4]
  misc_feature (12)..(957): NCBI GI: 46128333 Blast Desc: FG08544.1 [Gibberella zeae PH-1]
  misc_feature (42)..(857): NCBI GI: 145602386 Blast Desc: MGG_04957 [Magnaporthe grisea 70-15] gi|145010808|gb|EDJ95464.1| MGG_04957 [Magnaporthe grisea 70-15]
  misc_feature (41)..(957): NCBI GI: 85086117 Blast Desc: NCU04014 [Neurospora crassa OR74A] gi|28918723|gb|EAA28393.1| [Neurospora crassa OR74A] gi|29150127|emb|CAD79687.1| related to ubiquitin hydrolase
  misc_feature (45)..(957): NCBI GI: 171682486 Blast Desc: protein product [Podospora anserina] gi|170941202|emb|CAP66852.1| protein product [Podospora anserina]
  misc_feature (15)..(984): NCBI GI: 116202671 Blast Desc: CHGG_09220 [Chaetomium globosum CBS 148.51] gi|88177738|gb|EAQ85206.1| CHGG_09220 [Chaetomium globosum CBS 148.51]
  misc_feature (23)..(984): NCBI GI: 261359414 Blast Desc: ubiquitin carboxyl-terminal hydrolase [Verticillium albo-atrum VaMs.102]
  misc_feature (1)..(743): NCBI GI: 154315627 Blast Desc: BC1G_04386 [Botryotinia fuckeliana B05.10] gi|150847326|gb|EDN22519.1| BC1G_04386 [Botryotinia fuckeliana B05.10]
  misc_feature (65)..(958): NCBI GI: 189201425 Blast Desc: ubiquitin carboxyl-terminal hydrolase 2 [Pyrenophora tritici-repentis Pt-1C-BFP] gi|187984148|gb|EDU49636.1| ubiquitin carboxyl-terminal hydrolase 2 [Pyrenophora tritici-repentis
  misc_feature (3)..(947): NCBI GI: 242764330 Blast Desc: ubiquitin C-terminal hydrolase, [Talaromyces stipitatus ATCC 10500] gi|218723945|gb|EED23362.1| ubiquitin C-terminal hydrolase, [Talaromyces stipitatus ATCC 10500]
  misc_feature (328)..(957): SWISSPROT Homolog: EC 3.1.2.15 Ubiquitin thiolesterase
  misc_feature: Useful for introducing or modulating the production of volatile compounds
MSPAARSETLVLSNGGAMTHNHADGGLGKGPRATNGAARGSGKPPFRHIDDIVSVTVSIDPHTPLRRLLDMGDTSMRQALTFNQFGRPDMALQEYIKAFTIAVDKVPKHKDYPSLKADRGDLNRLYQALKVKITDSGAAFDKVKEQIKEDNLRSGVLPTRPHSEQLLSSLPSAPSAAPKDRSARSSMNGLPTAPSSLPGSESVPARRAKPAVHPKPEALHGNAIRQSSEQARPDLAARFAKLRTNNAPSQISIDSSVPAMPKMPDAIYSPARGTMTPEVANLPSSIPRGMLSRTNSIASAPTGTSRTSMDSTFRSFGREQFAAAHTYGQAQEAAPGTKVRIPRGDTITVNELVRCMGYGDANVKILLIDVRDREAFQEGHIMSHKTICIEPSILEREDISADEILDSMVLSPDQERDAIENRNRFDLVVFYDQSSQSIPTRSRATDAEAIVLYNLQQALSNYNDLTLKNIPKLLVGGLDAWVDTVGAQSLEKSVPNIGSARSAITRKRMGTRRLKPEERKEVEEMIARDQTGVDYATSVEAVMRRFPSIKAGPESMVSSGQEESSGLSDISGDTFLKDIATKPPVRPKPSVARTRYSGLESREEAPAGIAMQATVGGRMTGLVNPGNWCYSNASLQALLASTGFADELIDPNWPARYRPNVPHNHPSRNQLMCKILGNLFQWLRKREFAQLKTTTLMHYLRSIHEGYAPANRSNLVRFGDNNQHDSDEFATFIMGQLAAETRVAVPNKQNIQIDDPDSLQGAVLQSWVVGADPSFIHKYWHLVEVSELACDSCGDETHVANSANSLVLHVPREHNGGTMERGLDEYFTPVPVDSSCDNCKESGKMLQRRITRLPPLLRVTIGRFALDSGRMSKNLNHFQIPETLDLEKYASDRADRRQIGAQIEGEAGEGFDVDAVYDLYAVVLHSGPTANSGHYIAYINLGQDDWWNCNDTSVTKMDSFRRFAQSMYTGEGRLTPVQTYYRRRDYTYRPPQR

SEQ ID NO: 27272 - DNA, 3852 bp, Muscodor strobelii
  misc_feature: SGI EST ID NO. CUFF.64373.0
  misc_feature: Variant of the nucleotide sequence at SEQ ID NO 27270
caacaatctcgatccagaggtgatcaggtgaaaagccacttgacaataagtgtacacgagtctacaaaaatgctgcgtgcaataattacgaaatggcacacggctatatcaaagccacgaattagttgaggtgtttgtggtgtagcggtcgtattctactaggcacgtcatcttccagctaccgtacacacaagtaccaggtagacagtcaacgcagaccctccaccaaacccatccgagtcgagtctggacggacaactacaactcacgagacaacgagaacatgatcgcatgtgtatggcgttttgaatttccttcctaaatatctagatctcttacttgaaatatccatcgtcgtcttgcaccgctgcgccttgctcttcgtatatctcttcatatatcccttgggagcatttgacgtcgcttgcccattgacacattgtcgcactcggcctttgtccacgacgctctctctttcaccaccgaatccgttcgcgtcgcaacccccctcgatgagaccgtgaacagtcgctgcagggcgtcattgttgaaagaatgccaccccatgtccttggccgtcctcggaacaatacctacacataagagtcttactcacgaatccgaaccacgcccgcgcctcgaccgagctctccctctgctcgccctttcccccaacgatacttcaagaagacgctgagcgcggaggaatgctgaactgaacgcccgttgcccgttgcgcgtcactgtagctcgctatgagtcctgccgcccgctcggaaaccctcgttctctccaacggcggagccatgacgcacaaccatgccgacggaggcttgggcaaggggccgcgtgcgacgaatggcgccgcccgtggctcgggcaagccgcccttccgccatatcgacgacatcgtctccgtcaccgtcagcatcgacccccacacgcccctgcgcagactgctcgacatgggcgacacctccatgcgccaggccctcaccttcaaccagttcggccgccccgacatggccctgcaggagtacatcaaggccttcaccatcgccgtcgacaaggtccccaagcacaaggactacccctcgctcaaggccgatcgcggcgacttgaacaggctgtaccaggccctcaaggtcaagatcaccgacagcggcgccgccttcgacaaggtcaaggagcagatcaaggaggacaatctgaggagcggtgtccttcccaccagaccgcactccgagcagctcctctccagcttgccgagtgccccttcggccgcgcccaaagatcgctctgcccgttcttctatgaatgggctacccacggctcccagctccctgcccggcagtgaatctgtcccagctcggagggcgaagcccgctgtccacccgaagccggaagccctgcacggaaatgctatcaggcaatcctcagagcaggcccgaccagacctcgccgctcgcttcgcaaagcttcgcacgaacaatgcgccctcccagatttccatcgacagctccgtgccggctatgcccaagatgccagatgccatctacagccctgccaggggcaccatgacccccgaggttgccaatctcccctccagtataccgcgcggcatgcttagccggaccaattctattgcatctgcccccaccgggacgtctcggacgtcgatggatagcactttcaggtccttcggcagagagcagtttgccgccgcgcatacttacggccaagcgcaagaagctgctcctggcacaaaagttcggattcctcgcggagacacgatcacggtgaacgaactcgtgcgctgcatgggctacggcgatgccaacgtcaaaatcctcctgatcgatgtgcgagaccgcgaagcatttcaagagggtcatatcatgtcacataaaaccatctgcatcgaacccagcattctcgagcgtgaggacatatctgccgacgaaatactagatagtatggtactgtcaccagatcaagagagagacgccattgaaaaccgcaatagatttgatctcgttgtgttctacgaccagagttctcaatctattcctacgaggagccgagccacagatgccgaagcgattgttttgtataatcttcaacaggccttgtcaaactacaacgacttgactctgaagaatatccccaaactattggtcgggggtttagatgcatgggttgataccgtgggtgctcaatcgcttgagaagtcggtccccaacattggtagtgcgcggtccgccataactcgcaagagaatggggactcgccgcctaaagccagaggagagaaaggaagtcgaagagatgatcgcgagagatcagacaggtgtagattatgctacaagcgtcgaggccgtgatgcggcgattcccaagtataaaagctggacctgaatctatggtatccagcgggcaggaagagtcttcaggactctcagatataagcggcgacaccttcttaaaggatatagccactaagccacccgtacgtcccaagccctcggtggctcggacgaggtatagcggtctagagtcgagggaagaagcgcccgctggtatagctatgcaggctaccgtcggtggaagaatgacgggtcttgtgaaccctgggaactggtgctattccaatgcgtccctgcaagcgctccttgcctccacaggattcgcggacgaactgatcgaccccaactggccagctagatatcgacctaatgtacctcacaatcacccatctcggaatcaactcatgtgtaagatcttgggcaacctcttccagtggctaaggaaaagggagtttgctcaacttaaaaccaccacactcatgcactatcttcgaagcattcacgagggctacgcgccggccaataggagtaatctcgtgagatttggggataataaccaacacgactcagacgagttcgccacctttatcatgggccagcttgcagccgaaacccgcgtcgctgtaccaaacaagcagaatatccagatcgatgatccagactccctgcaaggagcagtgctacaatcgtgggtggtcggggctgacccgagcttcatccacaaatattggcatttggtagaggtatcagaactggcctgcgactcttgtggagacgagactcatgtcgcgaattctgccaacagcttagtgctccatgttcctcgagagcataacggcggcactatggaacgtggtcttgatgagtactttacaccagtgcctgtagattcgtcatgtgacaactgtaaagaatcgggcaagatgttgcagagacgcatcacgcggttaccgcccctactccgtgtcaccataggcagattcgcgttggacagcggtagaatgtcgaagaacctaaaccacttccagattcccgagacgctagatcttgaaaaatacgccagcgacagagcggacagacggcagatcggcgcccagatcgagggtgaggccggcgagggctttgatgtagatgcggtttatgatctgtatgctgtggttctgcactcgggaccaacggcgaacagtgggcattatatcgcgtatatcaatctgggacaggatgattggtggaattgtaatgatacgagtgtcacgaagatggatagctttaggagatttgcgcagagcatgtatacgggtgagggtaggcttacgcctgtgcagacgtattatcgaaggagggattatacttatcggccgcctcaacggtaacgggtgtgcttgaaatgccaattagcgagatagaaagagaggaaggtgtttagaagatggaccggatggcatggagatgggggttagatagaggaggggtgaatatatggatatg

SEQ ID NO: 27273 - DNA, 2214 bp, Muscodor strobelii
  misc_feature: SGI cDNA ID NO. 569341
  misc_feature: Reduced expression when VOC is produced
  misc_feature: Encodes the peptide sequence at SEQ ID NO 27274
atgatgggaagctggtggtcgtccggggccaacaacgccctggacgagcagatcgacaaggccacgggcagcagcctcgaagacatcgcgctcaacctcgagatctcggatgtgatccggtccaagacggtgcagccgcgcgaggcgatgcggtcgctgaaacgccgcatcggcaacaagaaccccaacatccagctgtcggccctccacctgaccgacacctgcgtcaagaacggcggcgcccacttcctcgagcagatcgcctcccgcgagttcatggacaacctcgtgtcgctgctgcacgccgtcgggcccgccgccgtcaacgccgacgtccgctccaagatcctcgagctcgtccagtcctgggccgccgccgtccagggcggctacgaggccaggtacaagtacatcgacgacacctaccagaccctgcagagggagggctaccacttcccgccccgcgtcaccctcgccagcagcatgctcgacagcagcgccccccccgagtggaccgactccgaagtctgcatgcgctgccgcaccccgttcaccttcaccaaccgcaagcatcactgccgcaactgcggaaactgtttcgaccagcaatgctccaccaagacgctgcccttaccgcacctcggcatcatgcaggccgtccgcgtcgacgacggctgctatgcgagactgaccgacaagtccagcaaaggcggccccacagccccagatccctcgcaggcaacctccttcccctacaagaatcgcagcacatcggcctccatgcaacctcgggccgccagggtcgacgacgccttcgacgaagacctcaagaaggcactggccatgagtctggaggaggtccagagccactcgcgaggctacgtgcctcccaccgacaacaagcccgctgctgcgcacaccaacggcaacaaagtcccgacgtctgcaccagatgccgaggaagaagacgaggatctgaaggcggctatagcggcgtcactcgccgatatggaagagcaaaagcaacgccatgccgctgctctcaagcaacagacaagtggcaacgaacccatgcccgcgcccaacttggctttgcccaggaacgactacgagctgagcccggtcgaagccgagaatatcaacctgttttccaccttagtagatagactccaggcccagccccccggcaccatactgcgagagccgcgaatacaggagctgtatgattccatcggcacactgcggcctaaactggcgcgtacctacggagagacaatgagcaagcacgatacgttattagacttacactccaaattatctaccgtcgtacgatactatgatcggatgttggaagatcgcctttccaaggcttatagtcagcataatcttggcggttacgctcttccagcttcaagacaaccttccaatccctatcccaacatcggttcggcggcaggcatggcatcgacgggggccgaaagctactataccggtgaacagcctcccacttttagtccgcccgcgatgagccatggatatccaccacaaccatcgcaaccccagtttccaggctatgagaaacgtggatcgatcacgatgcctccagggagccaataccctccacaacccatggcaagaaacgatagctaccaaacgcaagtgtcgccacagcaggcgcagcatcctaacccacagcccagctatccttccaccgagcatgcggcgcccgcccccgccagccatccgtcacaaccttctgctcaacctccacataacaccgctcacgagccttcagccgcaccagcgatggatcaaaacgcagcatactattataatcaatctctcccggcagatggacacgcgccgcccatgccaccagatgcaggggctgcatacccgaacttgaatcagccaccaaatttcaacagacaatccgttccgccgacgcctgcttcggtcgcgtcacagccagtgcagccgccgccacagagccaacagtatcagcaagcgcctcaggcggcaggtcaaccgtactggcatgcccagcagcctccaccgcagcagcaacaagcaccgcagccacacgtcggcccaccagggtccatgtatcagacaggcggtggatatccgggattcaaccaagagtcattcccatctgcaccgcagcatgcacctcagcagccagttgtagaagaaagtctgattgatctatga

SEQ ID NO: 27274 - protein, 737 aa, Muscodor strobelii
  misc_feature: SGI Peptide ID NO. 569341
  misc_feature (169)..(232): Pfam Id: PF01363 Pfam Desc: FYVE zinc finger
  misc_feature (8)..(149): Pfam Id: PF00790 Pfam Desc: VHS domain
  misc_feature (2)..(737): NCBI GI: 46128335 Blast Desc: FG08545.1 [Gibberella zeae PH-1]
  misc_feature (2)..(737): NCBI GI: 150416265 Blast Desc: VPS27_NEUCR RecName: Full=Vacuolar protein sorting-associated protein 27 gi|29150128|emb|CAD79688.1| related to vacuolar protein sorting-associated protein [Neurospora
  misc_feature (2)..(737): NCBI GI: 39940564 Blast Desc: MGG_04958 [Magnaporthe grisea 70-15] gi|150416263|sp|A4QTV1.1|VPS27_MAGGR RecName: Full=Vacuolar protein sorting-associated protein 27 gi|145010807|gb|EDJ95463.1|
  misc_feature (1)..(737): NCBI GI: 171682484 Blast Desc: protein product [Podospora anserina] gi|170941201|emb|CAP66851.1| protein product [Podospora anserina]
  misc_feature (1)..(737): NCBI GI: 261359413 Blast Desc: vacuolar protein sorting-associated protein [Verticillium albo-atrum VaMs.102]
  misc_feature (2)..(735): NCBI GI: 226292060 Blast Desc: vacuolar protein sorting-associated protein [Paracoccidioides brasiliensis Pb18]
  misc_feature (2)..(737): NCBI GI: 212529150 Blast Desc: vacuolar sorting-associated protein (Vps27), [Penicillium marneffei ATCC 18224] gi|210074130|gb|EEA28217.1| vacuolar sorting-associated protein (Vps27), [Penicillium ATCC
  misc_feature (2)..(737): NCBI GI: 261205452 Blast Desc: vacuolar protein sorting-associated protein 27 [Ajellomyces dermatitidis SLH14081] gi|239592522|gb|EEQ75103.1| vacuolar protein sorting-associated protein 27 [Ajellomyces
  misc_feature (2)..(737): NCBI GI: 225557400 Blast Desc: vacuolar sorting-associated protein [Ajellomyces capsulatus G186AR]
  misc_feature (2)..(737): NCBI GI: 226282773 Blast Desc: vacuolar protein sorting-associated protein [Paracoccidioides brasiliensis Pb01]
  misc_feature: Useful for introducing or modulating the production of volatile compounds
MMGSWWSSGANNALDEQIDKATGSSLEDIALNLEISDVIRSKTVQPREAMRSLKRRIGNKNPNIQLSALHLTDTCVKNGGAHFLEQIASREFMDNLVSLLHAVGPAAVNADVRSKILELVQSWAAAVQGGYEARYKYIDDTYQTLQREGYHFPPRVTLASSMLDSSAPPEWTDSEVCMRCRTPFTFTNRKHHCRNCGNCFDQQCSTKTLPLPHLGIMQAVRVDDGCYARLTDKSSKGGPTAPDPSQATSFPYKNRSTSASMQPRAARVDDAFDEDLKKALAMSLEEVQSHSRGYVPPTDNKPAAAHTNGNKVPTSAPDAEEEDEDLKAAIAASLADMEEQKQRHAAALKQQTSGNEPMPAPNLALPRNDYELSPVEAENINLFSTLVDRLQAQPPGTILREPRIQELYDSIGTLRPKLARTYGETMSKHDTLLDLHSKLSTVVRYYDRMLEDRLSKAYSQHNLGGYALPASRQPSNPYPNIGSAAGMASTGAESYYTGEQPPTFSPPAMSHGYPPQPSQPQFPGYEKRGSITMPPGSQYPPQPMARNDSYQTQVSPQQAQHPNPQPSYPSTEHAAPAPASHPSQPSAQPPHNTAHEPSAAPAMDQNAAYYYNQSLPADGHAPPMPPDAGAAYPNLNQPPNFNRQSVPPTPASVASQPVQPPPQSQQYQQAPQAAGQPYWHAQQPPPQQQQAPQPHVGPPGSMYQTGGGYPGFNQESFPSAPQHAPQQPVVEESLIDL

SEQ ID NO: 27275 - DNA, 2757 bp, Muscodor strobelii
  misc_feature: SGI EST ID NO. CUFF.64401.2
  misc_feature: Variant of the nucleotide sequence at SEQ ID NO 27273
tcgcatttggatgtttcaacttcaaacagacggcgacataccttactaaacagtatctcccagtacaatacagcatttacctattcgttctcctatttctctccatatcgtgcccgcgcatgtgaacccagctcgacgcttcccgccctcgccctgcacccgctgctctccgacactctcctcccgcctcgctgtgctgagtgtctaggttcaagatgatgggaagctggtggtcgtccggggccaacaacgccctggacgagcagatcgacaaggccacgggcagcagcctcgaagacatcgcgctcaacctcgagatctcggatgtgatccggtccaagacggtgcagccgcgcgaggcgatgcggtcgctgaaacgccgcatcggcaacaagaaccccaacatccagctgtcggccctccacctgaccgacacctgcgtcaagaacggcggcgcccacttcctcgagcagatcgcctcccgcgagttcatggacaacctcgtgtcgctgctgcacgccgtcgggcccgccgccgtcaacgccgacgtccgctccaagatcctcgagctcgtccagtcctgggccgccgccgtccagggcggctacgaggccaggtacaagtacatcgacgacacctaccagaccctgcagagggagggctaccacttcccgccccgcgtcaccctcgccagcagcatgctcgacagcagcgccccccccgagtggaccgactccgaagtctgcatgcgctgccgcaccccgttcaccttcaccaaccgcaagcatcactgccgcaactgcggaaactgtttcgaccagcaatgctccaccaagacgctgcccttaccgcacctcggcatcatgcaggccgtccgcgtcgacgacggctgctatgcgagactgaccgacaagtccagcaaaggcggccccacagccccagatccctcgcaggcaacctccttcccctacaagaatcgcagcacatcggcctccatgcaacctcgggccgccagggtcgacgacgccttcgacgaagacctcaagaaggcactggccatgagtctggaggaggtccagagccactcgcgaggctacgtgcctcccaccgacaacaagcccgctgctgcgcacaccaacggcaacaaagtcccgacgtctgcaccagatgccgaggaagaagacgaggatctgaaggcggctatagcggcgtcactcgccgatatggaagagcaaaagcaacgccatgccgctgctctcaagcaacagacaagtggcaacgaacccatgcccgcgcccaacttggctttgcccaggaacgactacgagctgagcccggtcgaagccgagaatatcaacctgttttccaccttagtagatagactccaggcccagccccccggcaccatactgcgagagccgcgaatacaggagctgtatgattccatcggcacactgcggcctaaactggcgcgtacctacggagagacaatgagcaagcacgatacgttattagacttacactccaaattatctaccgtcgtacgatactatgatcggatgttggaagatcgcctttccaaggcttatagtcagcataatcttggcggttacgctcttccagcttcaagacaaccttccaatccctatcccaacatcggttcggcggcaggcatggcatcgacgggggccgaaagctactataccggtgaacagcctcccacttttagtccgcccgcgatgagccatggatatccaccacaaccatcgcaaccccagtttccaggctatgagaaacgtggatcgatcacgatgcctccagggagccaataccctccacaacccatggcaagaaacgatagctaccaaacgcaagtgtcgccacagcaggcgcagcatcctaacccacagcccagctatccttccaccgagcatgcggcgcccgcccccgccagccatccgtcacaaccttctgctcaacctccacataacaccgctcacgagccttcagccgcaccagcgatggatcaaaacgcagcatactattataatcaatctctcccggcagatggacacgcgccgcccatgccaccagatgcaggggctgcatacccgaacttgaatcagccaccaaatttcaacagacaatccgttccgccgacgcctgcttcggtcgcgtcacagccagtgcagccgccgccacagagccaacagtatcagcaagcgcctcaggcggcaggtcaaccgtactggcatgcccagcagcctccaccgcagcagcaacaagcaccgcagccacacgtcggcccaccagggtccatgtatcagacaggcggtggatatccgggattcaaccaagagtcattcccatctgcaccgcagcatgcacctcagcagccagttgtagaagaaagtctgattgatctatgagctactctgagagtggacgtacattaaatggttgaaacacaccaaactttgtctgaagcgccaagcactttggcgcaatgctactcttggatggtgagagtaggggaaatcaacaacgtatcctgtgctgtgaaggtgtttaagagcatgcattaggagtttagggcgtctttgcgaatcattcaaaagcaaggccgttcgcttaatgtgggtaggaatatctgtatgttctaggtatgagatagtggtcaatgaagcgattgaagtccaaactcaaagaatatccaaagggtaagaagtaggtttattccactcgattgccagttag

SEQ ID NO: 27276 - DNA, 2433 bp, Muscodor strobelii
  misc_feature: SGI cDNA ID NO. 569342
  misc_feature: Encodes the peptide sequence at SEQ ID NO 27277
atgtcacgacaccaagcatatcgaaactacgactacgagaacgacctcgacgagttcgagggcggagacttcgacgacgaggaagatgagctcagccctgaagatcgcgctcagatgaccgccagcacaagccaagtgcgcgcccagctcggtgcccagtcctccaagatctcaacacagcagatagaagaggctctgtggcattattattacgacattgaaaagtccgtcacctacttagtcaccaaatatatcgccgcgaaacccgcgaaaccccaaaagaccaagattgcaggtgggtttgactctttctttaccgtctccgtcgacacccccgtcagcccagagcaaccaggagagtccgcagcatttcgccttcagattggtcactcaggttggttgcaagccttcagagtcgagaatctcaggtcgccgacgctgaacatccacgcaggctcgatggcgcatcaacactcttctctttccgacttcttccacgacacgccgtggcttaacgtcccggatgaccgtcgtactgtcttcatcgagcctgtccgtcctcctggtggtcttttgggaggttctaaactccaagccctcgctgctgcccgcaagaagaaggccgaggagcagaaattggagaaccagaattctgcgcctgtagctccacaattggtgccagaaacagcaaaagtgcctgagaagcgaatcggccccctatctcagaggctgaatgctgtccgcctcggtgactcgacctcccgcgctgctggtcagacacctccagatgccatggagctggacggtgccccatcagatctctcaccgcctgccgatgagacgaatagagtccagaaagacgaagaatacgtgtctcctgcaccatcagcctttgctcaaactcttttcggaagctcttcgcatgaatctatagctcagcccccacgacgttttccaatgccatggatgatgtatacaactccgcaagccctaactaatgccttttcagaaccaagtccagacgacaaggttctcgctgcacaagcaaaagcaagcaataagaaactggcagtcagctctacaaagaagtctaaagatgacgatgccgctgccgccgtaaagagcctgaagattgacgacacaccattaccgaagagcaagaacttagatgtcatcagtgaattcgagagggccaagagcaagaagagcgcaagtttcgttgtagtcggtcatgttgatgccggcaagagtacactaatgggtcgtctactactagaccttggcgttgtagatcagcggacaatacagaaatatcgcaaagaggccgagagtattgggaaatcatcatttgctcttgcctgggtactagatcaacgttccgaagagcggtccaggggagtcacgatcgacatcgccaccaataaatttgagacggactcaacatcattcaccattttagacgcccccggccatcgagacttcataccaaacatgattgccggagctagtcaagcagactttgccattcttgtcgttgatgcctcgacaggcgccttcgaagccggcctcaaagggcagaccaaagagcattctctgctcctgagaagtatgggcgtatcacgtatcatagtcgctgtcaacaaactcgacaccgtatcctggtcagaagagagattcgaagagatctcaaaccaagtctcggggttcctctccgctactgggttccagcttaagaacgtcaccttcgtacctgtctcaggccttaacggggataacctcgtgaacaaatcgcaagatgcagacgcgagctggtacacgggaaacacattaatcgccgaattagaaaactcagaacccatggcaagagcactaaccaaacccctccgcatgaccatatcagaagtcttccgcacaacaaacagtcccatcacgatatcaggccgcatagacgccggctcgttacaagccggcgatgcactactcgtgcagcccagtggggaaaaggcatacgtcaaatccctagaactcgaccaagaaccaagagactgggcggtagcaggacaaaacatcgtcattcatctatctaacatcgacccgatacatgtccgcgtcggtgatataatctgcgatacgaaacaaccgatagcgtgtatagacgagtttacgattaaggtcctggcgtttgatgtccttatgcccatgcaggttgatgtgcatcgcgggaggttacatgccgcgggccagatcaaggagattagtgcgctgcttgataaagttaagggcactgttttgaaaagacggccgaagatcgttaagccggctagtgttgcgcgggttgtggttaagatggggagtaaagtgccgcttgaggttggccagagggttgtgcttagatccgggggtgacacggttgctgctgggttattggagtga

SEQ ID NO: 27277 - protein, 810 aa, Muscodor strobelii
  misc_feature: SGI Peptide ID NO. 569342
  misc_feature (642)..(709): Pfam Id: PF03144 Pfam Desc: Elongation factor Tu domain 2
  misc_feature (401)..(620): Pfam Id: PF00009 Pfam Desc: Elongation factor Tu GTP binding domain
  misc_feature (645)..(709): Pfam Id: PF03144 Pfam Desc: Elongation factor Tu domain 2
  misc_feature (190)..(810): NCBI GI: 164426667 Blast Desc: NCU03981 [Neurospora crassa OR74A] gi|157071428|gb|EAA27330.2| NCU03981 [Neurospora crassa OR74A]
  misc_feature (31)..(810): NCBI GI: 156060253 Blast Desc: SS1G_02265 [Sclerotinia sclerotiorum 1980] gi|154699673|gb|EDN99411.1| SS1G_02265 [Sclerotinia sclerotiorum 1980]
  misc_feature (31)..(810): NCBI GI: 261205442 Blast Desc: elongation factor Tu GTP binding domain-containing protein [Ajellomyces dermatitidis SLH14081] gi|239592517|gb|EEQ75098.1| elongation factor Tu GTP binding
  misc_feature (1)..(810): NCBI GI: 154315631 Blast Desc: BC1G_04388 [Botryotinia fuckeliana B05.10] gi|150847328|gb|EDN22521.1| BC1G_04388 [Botryotinia fuckeliana B05.10]
  misc_feature (31)..(810): NCBI GI: 239611330 Blast Desc: elongation factor Tu GTP binding domain-containing protein [Ajellomyces dermatitidis ER-3]
  misc_feature (31)..(810): NCBI GI: 212529174 Blast Desc: translation elongation factor EF-1 subunit, [Penicillium marneffei ATCC 18224] gi|210074142|gb|EEA28229.1| translation elongation factor EF-1 subunit, [Penicillium ATCC
  misc_feature (33)..(810): NCBI GI: 119480125 Blast Desc: elongation factor Tu GTP binding domain protein [Neosartorya fischeri NRRL 181] gi|119408245|gb|EAW18194.1| elongation factor Tu GTP binding domain protein [Neosartorya NRRL
  misc_feature (33)..(810): NCBI GI: 242764270 Blast Desc: translation elongation factor EF-1 subunit, [Talaromyces stipitatus ATCC 10500] gi|218723932|gb|EED23349.1| translation elongation factor EF-1 subunit, [Talaromyces ATCC
  misc_feature (33)..(810): NCBI GI: 146322799 Blast Desc: translation elongation factor EF-1 subunit [Aspergillus fumigatus Af293] gi|129556808|gb|EBA27318.1| translation elongation factor EF-1 subunit, [Aspergillus Af293]
  misc_feature (1)..(810): NCBI GI: 121710234 Blast Desc: elongation factor Tu GTP binding domain protein [Aspergillus clavatus NRRL 1] gi|119400883|gb|EAW11307.1| elongation factor Tu GTP binding domain protein [Aspergillus NRRL
MSRHQAYRNYDYENDLDEFEGGDFDDEEDELSPEDRAQMTASTSQVRAQLGAQSSKISTQQIEEALWHYYYDIEKSVTYLVTKYIAAKPAKPQKTKIAGGFDSFFTVSVDTPVSPEQPGESAAFRLQIGHSGWLQAFRVENLRSPTLNIHAGSMAHQHSSLSDFFHDTPWLNVPDDRRTVFIEPVRPPGGLLGGSKLQALAAARKKKAEEQKLENQNSAPVAPQLVPETAKVPEKRIGPLSQRLNAVRLGDSTSRAAGQTPPDAMELDGAPSDLSPPADETNRVQKDEEYVSPAPSAFAQTLFGSSSHESIAQPPRRFPMPWMMYTTPQALTNAFSEPSPDDKVLAAQAKASNKKLAVSSTKKSKDDDAAAAVKSLKIDDTPLPKSKNLDVISEFERAKSKKSASFVVVGHVDAGKSTLMGRLLLDLGVVDQRTIQKYRKEAESIGKSSFALAWVLDQRSEERSRGVTIDIATNKFETDSTSFTILDAPGHRDFIPNMIAGASQADFAILVVDASTGAFEAGLKGQTKEHSLLLRSMGVSRIIVAVNKLDTVSWSEERFEEISNQVSGFLSATGFQLKNVTFVPVSGLNGDNLVNKSQDADASWYTGNTLIAELENSEPMARALTKPLRMTISEVFRTTNSPITISGRIDAGSLQAGDALLVQPSGEKAYVKSLELDQEPRDWAVAGQNIVIHLSNIDPIHVRVGDIICDTKQPIACIDEFTIKVLAFDVLMPMQVDVHRGRLHAAGQIKEISALLDKVKGTVLKRRPKIVKPASVARVVVKMGSKVPLEVGQRVVLRSGGDTVAAGLLE

SEQ ID NO: 27278 - DNA, 4202 bp, Muscodor strobelii
  misc_feature: SGI EST ID NO. CUFF.64452.1
  misc_feature: Variant of the nucleotide sequence at SEQ ID NO 27276
ctttgagctgattctcagggtcggacaataagatgtagatatccattcaatttgtgtgggaaggtacaagttactatgacgagctgccggggatagctctgaagacccctgttaatagagctaaggttctcctgaataacactcgtcatatcctccattttgcccctcctattgatccatgcgatcataatgcccctcctccattcacaaagacacggccactcatacgggacttttccagataaactgcccaaatcgtaatctctatattttggagactttgtctcgtattctcttctcttatcacttggacttgaacttgagcttaagcttgtacattttactttcaagtaatagatagctaccttatttcctgcatctgcattgcaaagtttccctccaatctccaaatcatccgacacgccttatcgcccaccatgtcacgacaccaagcatatcgaaactacgactacgagaacgacctcgacgagttcgagggcggagacttcgacgacgaggaagatgagctcagccctgaagatcgcgctcagatgaccgccagcacaagccaagtgcgcgcccagctcggtgcccagtcctccaagatctcaacacagcagatagaagaggctctgtggcattattattacgacattgaaaagtccgtcacctacttagtcaccaaatatatcgccgcgaaacccgcgaaaccccaaaagaccaagattgcagaaccaagtccagacgacaaggttctcgctgcacaagcaaaagcaagcaataagaaactggcagtcagctctacaaagaagtctaaagatgacgatgccgctgccgccgtaaagagcctgaagattgacgacacaccattaccgaagagcaagaacttagatgtcatcagtgaattcgagagggccaagagcaagaagagcgcaagtttcgttgtagtcggtcatgttgatgccggcaagagtacactaatgggtcgtctactactagaccttggcgttgtagatcagcggacaatacagaaatatcgcaaagaggccgagagtattgggaaatcatcatttgctcttgcctgggtactagatcaacgttccgaagagcggtccaggggagtcacgatcgacatcgccaccaataaatttgagacggactcaacatcattcaccattttagacgcccccggccatcgagacttcataccaaacatgattgccggagctagtcaagcagactttgccattcttgtcgttgatgcctcgacaggcgccttcgaagccggcctcaaagggcagaccaaagagcattctctgctcctgagaagtatgggcgtatcacgtatcatagtcgctgtcaacaaactcgacaccgtatcctggtcagaagagagattcgaagagatctcaaaccaagtctcggggttcctctccgctactgggttccagcttaagaacgtcaccttcgtacctgtctcaggccttaacggggataacctcgtgaacaaatcgcaagatgcagacgcgagctggtacacgggaaacacattaatcgccgaattagaaaactcagaacccatggcaagagcactaaccaaacccctccgcatgaccatatcagaagtcttccgcacaacaaacagtcccatcacgatatcaggccgcatagacgccggctcgttacaagccggcgatgcactactcgtgcagcccagtggggaaaaggcatacgtcaaatccctagaactcgaccaagaaccaagagactgggcggtagcaggacaaaacatcgtcattcatctatctaacatcgacccgatacatgtccgcgtcggtgatataatctgcgatacgaaacaaccgatagcgtgtatagacgagtttacgattaaggtcctggcgtttgatgtccttatgcccatgcaggttgatgtgcatcgcgggaggttacatgccgcgggccagatcaaggagattagtgcgctgcttgataaagttaagggcactgttttgaaaagacggccgaagatcgttaagccggctagtgttgcgcgggttgtggttaagatggggagtaaagtgccgcttgaggttggccagagggttgtgcttagatccgggggtgacacggttgctgctgggttattggagtgatgattggtgttgtggttgcgaggatggtgaagagagagagagcgtggtattagtagagagatgaggtatagagacgctttatatactgcgtgtctagccaatgggcgatatagtctatgccggtactcgtcctgcaactcgtcctggaagaaaaatacgcgaactcgagtatgatgtgaagtaatgcatgtttgttgcagtatctccacattgaagtagatcatcatcatggtaacgccaaaacgttatcccatattgacctcggatgctaaaatcttctgcgctcactcatttatatggaacattagtggttaattggctatcattggccaatatccaaatttctttcgctatatcaagtctccgccttgctgagccgagtcgaccgcctcctgcctgtgtttagttctgattctggtatcagcgactctttcttcggctttcctcttgttttggcaggtttcccctccggcgctgtggagtcctcgttcttcgtccttcctctcggcttttcaggtatcttctcaggagttagggaatcttcctgctttacaactttcggcttagtcgtcctagccttcttcttcggtccttcctctccatcaccatcccaaaacctgctcttctcttctgttttcacatccggatcttcttcttcgatccccttcaccgtagccccagtcttcttttgcctgctcggcacaacgcagcttgtccttcccccaacagtcaagaatttgattttctccccattcggcaagacggtgccgatgtcctttttgcccttactccacctccaattaaacaaccaatcctcaggaaattggtcagagtcccccaaaactccaaccgcagtgtcacaaacatagcaaaccgccttatataacgtagcgatctcgtcgtcggaaaacgagtcgctgtactgctccgggtgaagacgagcttgatacataatctcatcacccacccaattgcctatcccgctaatcatgctctggtctagcagcagagctttgacagggacatgacgagcgcgcattttggtccggaaatactcttccgtaaagcgatctttgtcctgaacaggatccggaccgttttccttcagtggagtgttctgtcttatctcgtccgccggacagtcaacaagtcgtatccttccaaaacgtctagcgtcagtgaaggccacggcaacaggactctccccctcggtctcgaggtggaatttccagtatctcggaggccaagtctcctcttctcctgcgtggcgctccgcgtatctggtgtaggccgtttgctcgcctcgaatgtggatccaacctgtcatgccaaagtgcatgactggatgaggcggcgatgagagagtgagccagaagtatttcccttgggaacctgcgctagtcaccattttaccggtgagtgcggatttgaacgctggacctgaagtcccgactttgccaaagacattgacatcgtccaaggcgtttactttcgagatggtcttgcctacgaggtgctgccgcagaaagtgcgttatgcgggcgactggtaggtgtcagatagggttgttatgagtgttgtaagggaccgtgtgagtgctatgacgggttgtgaagtagatttgggaatacattaccttctgcgatctccggcatcttgaatatttggttatacacgacaccacttgggaacaacagtcgtatcatgaatgattgtgatacatccacagtgaaaacggtagatttgtgcgctcatcgatgctggaccgctacgcatacatgtatacatcgacgtgcgtgcgtgcaaatccgtcgatcaaaaatgtagcttgaaccaaggcaaaggcgtcttcatatcagcaacctcaatgttcacatggctaatccgtacaaggctggagcaacattcaattgagctacccctgagacgtgtgaggctgagacgaggttggttggttgtcaccgacaaccataataagccttggcgcgcgtcgtgatcaccctgtccatcgcgtctacaaagctgacggtgcccaggccgttaaac

SEQ ID NO: 27279 - DNA, 1209 bp, Muscodor strobelii
  misc_feature: SGI cDNA ID NO. 569343
  misc_feature: Encodes the peptide sequence at SEQ ID NO 27280
atgccggagatcgcagaagtcgcccgcataacgcactttctgcggcagcacctcgtaggcaagaccatctcgaaagtaaacgccttggacgatgtcaatgtctttggcaaagtcgggacttcaggtccagcgttcaaatccgcactcaccggtaaaatggtgactagcgcaggttcccaagggaaatacttctggctcactctctcatcgccgcctcatccagtcatgcactttggcatgacaggttggatccacattcgaggcgagcaaacggcctacaccagatacgcggagcgccacgcaggagaagaggagacttggcctccgagatactggaaattccacctcgagaccgagggggagagtcctgttgccgtggccttcactgacgctagacgttttggaaggatacgacttgttgactgtccggcggacgagataagacagaacactccactgaaggaaaacggtccggatcctgttcaggacaaagatcgctttacggaagagtatttccggaccaaaatgcgcgctcgtcatgtccctgtcaaagctctgctgctagaccagagcatgattagcgggataggcaattgggtgggtgatgagattatgtatcaagctcgtcttcacccggagcagtacagcgactcgttttccgacgacgagatcgctacgttatataaggcggtttgctatgtttgtgacactgcggttggagttttgggggactctgaccaatttcctgaggattggttgtttaattggaggtggagtaagggcaaaaaggacatcggcaccgtcttgccgaatggggagaaaatcaaattcttgactgttgggggaaggacaagctgcgttgtgccgagcaggcaaaagaagactggggctacggtgaaggggatcgaagaagaagatccggatgtgaaaacagaagagaagagcaggttttgggatggtgatggagaggaaggaccgaagaagaaggctaggacgactaagccgaaagttgtaaagcaggaagattccctaactcctgagaagatacctgaaaagccgagaggaaggacgaagaacgaggactccacagcgccggaggggaaacctgccaaaacaagaggaaagccgaagaaagagtcgctgataccagaatcagaactaaacacaggcaggaggcggtcgactcggctcagcaaggcggagacttga

SEQ ID NO: 27280 - protein, 402 aa, Muscodor strobelii
  misc_feature: SGI Peptide ID NO. 569343
  misc_feature (2)..(138): Pfam Id: PF01149 Pfam Desc: Formamidopyrimidine-DNA glycosylase N-terminal domain
  misc_feature (157)..(250): Pfam Id: PF06831 Pfam Desc: Formamidopyrimidine-DNA glycosylase H2TH domain
  misc_feature (1)..(399): NCBI GI: 46128147 Blast Desc: FG08451.1 [Gibberella zeae PH-1]
  misc_feature (1)..(399): NCBI GI: 256733968 Blast Desc: [Nectria haematococca mpVI 77-13-4]
  misc_feature (1)..(397): NCBI GI: 164428247 Blast Desc: NCU05984 [Neurospora crassa OR74A] gi|157072070|gb|EAA29401.2| NCU05984 [Neurospora crassa OR74A]
  misc_feature (1)..(399): NCBI GI: 115391091 Blast Desc: conserved [Aspergillus terreus NIH2624] gi|114193974|gb|EAU35674.1| conserved [Aspergillus terreus NIH2624]
  misc_feature (1)..(399): NCBI GI: 119500164 Blast Desc: Formamidopyrimidine-DNA glycosylase, [Neosartorya fischeri NRRL 181] gi|119415004|gb|EAW24942.1| Formamidopyrimidine-DNA glycosylase, [Neosartorya fischeri NRRL
  misc_feature (1)..(306): NCBI GI: 145229675 Blast Desc: An01g07220 [Aspergillus niger] gi|134055255|emb|CAK43841.1| protein product [Aspergillus niger]
  misc_feature (1)..(397): NCBI GI: 70993580 Blast Desc: formamidopyrimidine-DNA glycosylase [Aspergillus fumigatus Af293] gi|66849271|gb|EAL89599.1| formamidopyrimidine-DNA glycosylase, [Aspergillus fumigatus
  misc_feature (1)..(397): NCBI GI: 159125439 Blast Desc: Formamidopyrimidine-DNA glycosylase, [Aspergillus fumigatus A1163]
  misc_feature (1)..(399): NCBI GI: 255947552 Blast Desc: Pc22g05070 [Penicillium chrysogenum Wisconsin 54-1255] gi|211591560|emb|CAP97795.1| Pc22g05070 [Penicillium chrysogenum Wisconsin 54-1255]
  misc_feature (1)..(399): NCBI GI: 189189872 Blast Desc: formamidopyrimidine-DNA glycosylase [Pyrenophora tritici-repentis Pt-1C-BFP] gi|187972881|gb|EDU40380.1| formamidopyrimidine-DNA glycosylase [Pyrenophora tritici-repentis
  misc_feature (1)..(293): SWISSPROT Homolog: EC 4.2.99.18 DNA-(apurinic or apyrimidinic site) lyase
  misc_feature (1)..(293): SWISSPROT Homolog: EC 3.2.2.23 DNA-formamidopyrimidine glycosylase
MPEIAEVARITHFLRQHLVGKTISKVNALDDVNVFGKVGTSGPAFKSALTGKMVTSAGSQGKYFWLTLSSPPHPVMHFGMTGWIHIRGEQTAYTRYAERHAGEEETWPPRYWKFHLETEGESPVAVAFTDARRFGRIRLVDCPADEIRQNTPLKENGPDPVQDKDRFTEEYFRTKMRARHVPVKALLLDQSMISGIGNWVGDEIMYQARLHPEQYSDSFSDDEIATLYKAVCYVCDTAVGVLGDSDQFPEDWLFNWRWSKGKKDIGTVLPNGEKIKFLTVGGRTSCVVPSRQKKTGATVKGIEEEDPDVKTEEKSRFWDGDGEEGPKKKARTTKPKVVKQEDSLTPEKIPEKPRGRTKNEDSTAPEGKPAKTRGKPKKESLIPESELNTGRRRSTRLSKAET

SEQ ID NO: 27281 - DNA, 4364 bp, Muscodor strobelii
  misc_feature: SGI EST ID NO. CUFF.64453.2
  misc_feature: Variant of the nucleotide sequence at SEQ ID NO 27279
ctgggcaccgtcagctttgtagacgcgatggacagggtgatcacgacgcgcgccaaggcttattatggttgtcggtgacaaccaaccaacctcgtctcagcctcacacgtctcaggggtagctcaattgaatgttgctccagccttgtacggattagccatgtgaacattgaggttgctgatatgaagacgcctttgccttggttcaagctacatttttgatcgacggatttgcacgcacgcacgtcgatgtatacatgtatgcgtagcggtccagcatcgatgagcgcacaaatctaccgttttcactgtggatgtatcacaatcattcatgatacgactgttgttcccaagtggtgtcgtgtataaccaaatattcaagatgccggagatcgcagaagtcgcccgcataacgcactttctgcggcagcacctcgtaggcaagaccatctcgaaagtaaacgccttggacgatgtcaatgtctttggcaaagtcgggacttcaggtccagcgttcaaatccgcactcaccggtaaaatggtgactagcgcaggttcccaagggaaatacttctggctcactctctcatcgccgcctcatccagtcatgcactttggcatgacaggttggatccacattcgaggcgagcaaacggcctacaccagatacgcggagcgccacgcaggagaagaggagacttggcctccgagatactggaaattccacctcgagaccgagggggagagtcctgttgccgtggccttcactgacgctagacgttttggaaggatacgacttgttgactgtccggcggacgagataagacagaacactccactgaaggaaaacggtccggatcctgttcaggacaaagatcgctttacggaagagtatttccggaccaaaatgcgcgctcgtcatgtccctgtcaaagctctgctgctagaccagagcatgattagcgggataggcaattgggtgggtgatgagattatgtatcaagctcgtcttcacccggagcagtacagcgactcgttttccgacgacgagatcgctacgttatataaggcggtttgctatgtttgtgacactgcggttggagttttgggggactctgaccaatttcctgaggattggttgtttaattggaggtggagtaagggcaaaaaggacatcggcaccgtcttgccgaatggggagaaaatcaaattcttgactgttgggggaaggacaagctgcgttgtgccgagcaggcaaaagaagactggggctacggtgaaggggatcgaagaagaagatccggatgtgaaaacagaagagaagagcaggttttgggatggtgatggagaggaaggaccgaagaagaaggctaggacgactaagccgaaagttgtaaagcaggaagattccctaactcctgagaagatacctgaaaagccgagaggaaggacgaagaacgaggactccacagcgccggaggggaaacctgccaaaacaagaggaaagccgaagaaagagtcgctgataccagaatcagaactaaacacaggcaggaggcggtcgactcggctcagcaaggcggagacttgatatagcgaaagaaatttggatattggccaatgatagccaattaaccactaatgttccatataaatgagtgagcgcagaagattttagcatccgaggtcaatatgggataacgttttggcgttaccatgatgatgatctacttcaatgtggagatactgcaacaaacatgcattacttcacatcatactcgagttcgcgtatttttcttccaggacgagttgcaggacgagtaccggcatagactatatcgcccattggctagacacgcagtatataaagcgtctctatacctcatctctctactaataccacgctctctctctcttcaccatcctcgcaaccacaacaccaatcatcactccaataacccagcagcaaccgtgtcacccccggatctaagcacaaccctctggccaacctcaagcggcactttactccccatcttaaccacaacccgcgcaacactagccggcttaacgatcttcggccgtcttttcaaaacagtgcccttaactttatcaagcagcgcactaatctccttgatctggcccgcggcatgtaacctcccgcgatgcacatcaacctgcatgggcataaggacatcaaacgccaggaccttaatcgtaaactcgtctatacacgctatcggttgtttcgtatcgcagattatatcaccgacgcggacatgtatcgggtcgatgttagatagatgaatgacgatgttttgtcctgctaccgcccagtctcttggttcttggtcgagttctagggatttgacgtatgccttttccccactgggctgcacgagtagtgcatcgccggcttgtaacgagccggcgtctatgcggcctgatatcgtgatgggactgtttgttgtgcggaagacttctgatatggtcatgcggaggggtttggttagtgctcttgccatgggttctgagttttctaattcggcgattaatgtgtttcccgtgtaccagctcgcgtctgcatcttgcgatttgttcacgaggttatccccgttaaggcctgagacaggtacgaaggtgacgttcttaagctggaacccagtagcggagaggaaccccgagacttggtttgagatctcttcgaatctctcttctgaccaggatacggtgtcgagtttgttgacagcgactatgatacgtgatacgcccatacttctcaggagcagagaatgctctttggtctgccctttgaggccggcttcgaaggcgcctgtcgaggcatcaacgacaagaatggcaaagtctgcttgactagctccggcaatcatgtttggtatgaagtctcgatggccgggggcgtctaaaatggtgaatgatgttgagtccgtctcaaatttattggtggcgatgtcgatcgtgactcccctggaccgctcttcggaacgttgatctagtacccaggcaagagcaaatgatgatttcccaatactctcggcctctttgcgatatttctgtattgtccgctgatctacaacgccaaggtctagtagtagacgacccattagtgtactcttgccggcatcaacatgacctaaggctgttagattgatctgtattcataatcataaaataaactactcaccgactacaacgaaacttgcgctcttcttgctcttggccctctcgaattcactgatgacatctaagttcttgctcttcggtaatggtgtgtcgtcaatcttcaggctctttacggcggcagcggcatcgtcatctttagacttctttgtagagctgactgccagtttcttattgcttgctagttccgaatgtattagtatttctaagtctatgccttcttcgccggcagcgaaccttttgcttgtgcagcgagaaccttgtcgtctggacttggttctgaaaaggcattagttagggcttgcggagttgtatacatcatccatggcattggaaaacgtcgtgggggctgagctatagattcatgcgaagagcttccgaaaagagtttgagcaaaggctgatggtgcaggagacacgtattcttcgtctttctggactctattcgtctcatcggcaggcggtgagagatctgatggggcaccgtccagctccatggcatctggaggtgtctgaccagcagcgcgggaggtcgagtcaccgaggcggacagcattcagcctctgagatagggggccgattcgcttctcaggcacttttgctgtttctggcaccaattgtggagctacaggcgcagaattctggttctccaatttctgctcctcggccttcttcttgcgggcagcagcgagggcttggagtttagaacctcccaaaagaccaccaggaggacggacaggctcgatgaagacagtacgacggtcatccgggacgttaagccacggcgtgtcgtggaagaagtcggaaagagaagagtgttgatgcgccatcgagcctgcgtggatgttcagcgtcggcgacctgagattctcgactctgaaggcttgcaaccaacctgagtgaccaatctgaaggcgaaatgctgcggactctcctggttgctctgggctgacgggggtgtcgacggagacggtaaagaaagagtcaaacccacctgcaatcttggtcttttggggtttcgcgggtttcgcggcgatatatttggtgactaagtaggtgacggacttttcaatgtcgtaataataatgccacagagcctcttctatctgctgtgttgagatcttggaggactgggcaccgagctgggcgcgcacttggcttgtgctgg

SEQ ID NO: 27282 - DNA, 1302 bp, Muscodor strobelii
  misc_feature: SGI cDNA ID NO. 569344
  misc_feature: Reduced expression when VOC is produced
  misc_feature: Encodes the peptide sequence at SEQ ID NO 27283
atggtgcggaacatcgtcattcttggaggcaactcgcacccgcacttgacgcagaatgtttgcaacatacttggtctgccgactagcaaccggattctcaccaagttctcctgcggcgagagtcgctgtgagatccaggattcggtacgaggcaaagatgtcttcatcatccagtcgggcggtggctcgatcaacgaccacctcatggagctctgcattatgatatctgcctgcaagatgggatcggccaagcgagtcactgccgtgcttcctctattcccttattcacgacagcccgaccttccctacaacaaggccggcgcaccactcgcaaagcccccgtccgaagtccccaagggtagatacacattcgagagcgtccctgcaacccctgcgccgggcattactaaaactccaggcctgagcaaagacaccgacctctcccgcgcaatgagccggacctctctgaacggatcctcctcctccagccaaactaacggcgaccactctgccgtgaacggcataaacggcgacccttgccctccccgtcctggattccaaggcaccaacacagccagcttcacgactcacgacttagagaatcctactctcatcagctcgttcgaggcaaagccgggatacaagcgatgggtagcccaggctggaacattggtggcagatcttctgacctgctctggtgctgaccacgttgtggccttggatctccacgacccccagtatcagggcttcttcgatatacccatggacaatttgtacggtcgtcctctcctgaaacgctacatccagcaaaacatccccgactataaggatgctgtcgtcgtcagtccggatgcaggtggtgcaaagcgggctactgctattgctgatagcttgggtatggagtttgccctcatccacaaggaacgccgcccgacacgaattacggatcgtcagaatgccaccatgatgctggtcggcaacgttgccaatcgagtctgcatcctggtcgatgacctggctgacacagccaacaccatcacccgtgctgccgctttgctgagcaaagaaggcgcacaaaaggtgtatgcactaatcacacatggtgtttttagtggcgatgccatacaacgcatcaactattcggccatcgacaagatcgtggtcaccaattcggttccacaggacgagcaccgccgactatgccccaagctcgaagtgcttgacgtatcccccatcttttctgaagccattcgtcgaattcatcacggtgaatctatcagtgtcttgttccagtatgactga

SEQ ID NO: 27283 - protein, 433 aa, Muscodor strobelii
  misc_feature: SGI Peptide ID NO. 569344
  misc_feature (252)..(387): Pfam Id: PF00156 Pfam Desc: Phosphoribosyl transferase domain
  misc_feature (1)..(433): NCBI GI: 171689402 Blast Desc: protein product [Podospora anserina] gi|170944663|emb|CAP70774.1| protein product [Podospora anserina]
  misc_feature (1)..(433): NCBI GI: 256729108 Blast Desc: [Nectria haematococca mpVI 77-13-4]
  misc_feature (1)..(433): NCBI GI: 116199413 Blast Desc: conserved [Chaetomium globosum CBS 148.51] gi|88179141|gb|EAQ86609.1| conserved [Chaetomium globosum CBS 148.51]
  misc_feature (1)..(432): NCBI GI: 145606080 Blast Desc: MGG_06678 [Magnaporthe grisea 70-15] gi|145013807|gb|EDJ98448.1| MGG_06678 [Magnaporthe grisea 70-15]
  misc_feature (20)..(433): NCBI GI: 156040433 Blast Desc: SS1G_12233 [Sclerotinia sclerotiorum 1980] gi|154696289|gb|EDN96027.1| SS1G_12233 [Sclerotinia sclerotiorum 1980]
  misc_feature (1)..(433): NCBI GI: 46138651 Blast Desc: FG10840.1 [Gibberella zeae PH-1]
  misc_feature (1)..(433): NCBI GI: 85076649 Blast Desc: ribose-phosphate pyrophosphokinase II [Neurospora crassa OR74A] gi|18376139|emb|CAD21204.1| related to ribose-phosphate pyrophosphokinase PRS5 [Neurospora crassa] II
  misc_feature (1)..(433): NCBI GI: 115391477 Blast Desc: ribose-phosphate pyrophosphokinase II [Aspergillus terreus NIH2624] gi|114194167|gb|EAU35867.1| ribose-phosphate pyrophosphokinase II [Aspergillus terreus NIH2624]
  misc_feature (1)..(433): NCBI GI: 242781994 Blast Desc: ribose-phosphate pyrophosphokinase [Talaromyces stipitatus ATCC 10500] gi|218720059|gb|EED19478.1| ribose-phosphate pyrophosphokinase [Talaromyces stipitatus ATCC
  misc_feature (1)..(433): NCBI GI: 238838090 Blast Desc: ribose-phosphate pyrophosphokinase 4 [Microsporum canis CBS 113480]
  misc_feature (2)..(432): SWISSPROT Homolog: EC 2.7.6.1 Ribose-phosphate diphosphokinase
  misc_feature: Useful for introducing or modulating the production of volatile compounds
MVRNIVILGGNSHPHLTQNVCNILGLPTSNRILTKFSCGESRCEIQDSVRGKDVFIIQSGGGSINDHLMELCIMISACKMGSAKRVTAVLPLFPYSRQPDLPYNKAGAPLAKPPSEVPKGRYTFESVPATPAPGITKTPGLSKDTDLSRAMSRTSLNGSSSSSQTNGDHSAVNGINGDPCPPRPGFQGTNTASFTTHDLENPTLISSFEAKPGYKRWVAQAGTLVADLLTCSGADHVVALDLHDPQYQGFFDIPMDNLYGRPLLKRYIQQNIPDYKDAVVVSPDAGGAKRATAIADSLGMEFALIHKERRPTRITDRQNATMMLVGNVANRVCILVDDLADTANTITRAAALLSKEGAQKVYALITHGVFSGDAIQRINYSAIDKIVVTNSVPQDEHRRLCPKLEVLDVSPIFSEAIRRIHHGESISVLFQYD

SEQ ID NO: 27284 - DNA, 2577 bp, Muscodor strobelii
  misc_feature: SGI EST ID NO. CUFF.64385.0
  misc_feature: Variant of the nucleotide sequence at SEQ ID NO 27282
cgaatggtgggtggttttgtctattttttcttctccttcttgacctttcttcgtgttcaacaccaaccaaggttgacatgactcacttttgcgttctcacaatggttctcctctaacaaccaatttctccaagtcctctgcccgcggttcctggaagaatctcacccaggctctctcactcaccgaggatctgacgtaggatttttatccgcccgggatctctaccgcgatcggagcaccaaataaactttctccggcgtctggtctttgagtcgagcgtgagctagaagcaagtagcggattgagcaagcgcttcaattgcacttggttcttcaattggtagagctgttagagtctgacacataggtcgtctcttgctctgaaggctactctgtctaccgtggtggcagcagacactttcatcacctgactccggattccagcacgctcgctaagatggtgcggaacatcgtcattcttggaggcaactcgcacccgcacttgacgcagaatgtttgcaacatacttggtctgccgactagcaaccggattctcaccaagttctcctgcggcgagagtcgctgtgagatccaggattcggtacgaggcaaagatgtcttcatcatccagtcgggcggtggctcgatcaacgaccacctcatggagctctgcattatgatatctgcctgcaagatgggatcggccaagcgagtcactgccgtgcttcctctattcccttattcacgacagcccgaccttccctacaacaaggccggcgcaccactcgcaaagcccccgtccgaagtccccaagggtagatacacattcgagagcgtccctgcaacccctgcgccgggcattactaaaactccaggcctgagcaaagacaccgacctctcccgcgcaatgagccggacctctctgaacggatcctcctcctccagccaaactaacggcgaccactctgccgtgaacggcataaacggcgacccttgccctccccgtcctggattccaaggcaccaacacagccagcttcacgactcacgacttagagaatcctactctcatcagctcgttcgaggcaaagccgggatacaagcgatgggtagcccaggctggaacattggtggcagatcttctgacctgctctggtgctgaccacgttgtggccttggatctccacgacccccagtatcagggcttcttcgatatacccatggacaatttgtacggtcgtcctctcctgaaacgctacatccagcaaaacatccccgactataaggatgctgtcgtcgtcagtccggatgcaggtggtgcaaagcgggctactgctattgctgatagcttgggtatggagtttgccctcatccacaaggaacgccgcccgacacgaattacggatcgtcagaatgccaccatgatgctggtcggcaacgttgccaatcgagtctgcatcctggtcgatgacctggctgacacagccaacaccatcacccgtgctgccgctttgctgagcaaagaaggcgcacaaaaggtgtatgcactaatcacacatggtgtttttagtggcgatgccatacaacgcatcaactattcggccatcgacaagatcgtggtcaccaattcggttccacaggacgagcaccgccgactatgccccaagctcgaagtgcttgacgtatcccccatcttttctgaagccattcgtcgaattcatcacggtgaatctatcagtgtcttgttccagtatgactgaacaatcgcgggcgaatcggtatttgcctctctttcatgaacggacccgcgagtaatgtaaccggaaattgttgccatcgagggccaatcacagcgcgaactatccttattgctatttcatataagcttcccgcctagtggtagttactagcgatgcattgctttcattaggtcttgatttcgacctggtgatagagcacgatacgaaaacagataaaaacaagcggcttctagatgtcggcgcacaggtaagagacttgcattgcgtggtcctcagaaaggatcacgccaggacataatggcgtcaatgaatgcatatggggcgatgcccagcggtgggcattcgcggacacacgacatcgcagcgatcggggttcacgtctcggttgtgtggaggagtggtctgctagaatgcgtacctctgtaaaaatgagatatatgatgtaaatgcacccgacctgccgtgagtctggttcttcgtgacttgatttgattctcacgcgtctacgaccctcctgcattctgagagagatgcgtcgcgagaaagacattgcttcctacatacggacgttattcaagctggagtgaggtgctattatattaagcatgacattgtgatccagacttggggattacgtccgtcgtggaatctcgagctgtcgctcttggtttccgaggtcagtattgtgttgcgggtcggaggcggacatgtgaatatagggctgtatataccattatcccgtgcttctctaaatgccgctacaacgtcatggcaagatactgagtcacgcgacacatactatagagaaggagaaaaaga

SEQ ID NO: 27285 - DNA, 336 bp, Muscodor strobelii
  misc_feature: SGI cDNA ID NO. 569345
  misc_feature: Encodes the peptide sequence at SEQ ID NO 27286
atgctggtcggcaacgttgccaatcgagtctgcatcctggtcgatgacctggctgacacagccaacaccatcacccgtgctgccgctttgctgagcaaagaaggcgcacaaaaggtgtatgcactaatcacacatggtgtttttagtggcgatgccatacaacgcatcaactattcggccatcgacaagatcgtggtcaccaattcggttccacaggacgagcaccgccgactatgccccaagctcgaagtgcttgacgtatcccccatcttttctgaagccattcgtcgaattcatcacggtgaatctatcagtgtcttgttccagtatgactga

SEQ ID NO: 27286 - protein, 111 aa, Muscodor strobelii
  misc_feature: SGI Peptide ID NO. 569345
  misc_feature (2)..(65): Pfam Id: PF00156 Pfam Desc: Phosphoribosyl transferase domain
  misc_feature (1)..(111): NCBI GI: 156040433 Blast Desc: SS1G_12233 [Sclerotinia sclerotiorum 1980] gi|154696289|gb|EDN96027.1| SS1G_12233 [Sclerotinia sclerotiorum 1980]
  misc_feature (1)..(111): NCBI GI: 46138651 Blast Desc: FG10840.1 [Gibberella zeae PH-1]
  misc_feature (1)..(111): NCBI GI: 154320726 Blast Desc: BC1G_01835 [Botryotinia fuckeliana B05.10] gi|150853524|gb|EDN28716.1| BC1G_01835 [Botryotinia fuckeliana B05.10]
  misc_feature (1)..(111): NCBI GI: 116199413 Blast Desc: conserved [Chaetomium globosum CBS 148.51] gi|88179141|gb|EAQ86609.1| conserved [Chaetomium globosum CBS 148.51]
  misc_feature (1)..(110): NCBI GI: 145606080 Blast Desc: MGG_06678 [Magnaporthe grisea 70-15] gi|145013807|gb|EDJ98448.1| MGG_06678 [Magnaporthe grisea 70-15]
  misc_feature (1)..(111): NCBI GI: 261201013 Blast Desc: ribose-phosphate pyrophosphokinase I [Ajellomyces dermatitidis SLH14081] gi|239593979|gb|EEQ76560.1| ribose-phosphate pyrophosphokinase I [Ajellomyces dermatitidis I
  misc_feature (1)..(111): NCBI GI: 258563570 Blast Desc: ribose-phosphate pyrophosphokinase II [Uncinocarpus reesii 1704] gi|237908037|gb|EEP82438.1| ribose-phosphate pyrophosphokinase II [Uncinocarpus reesii 1704]
  misc_feature (1)..(111): NCBI GI: 225560231 Blast Desc: ribose-phosphate pyrophosphokinase II [Ajellomyces capsulatus G186AR]
  misc_feature (1)..(111): NCBI GI: 154276732 Blast Desc: ribose-phosphate pyrophosphokinase I [Ajellomyces capsulatus NAm1] gi|150414284|gb|EDN09649.1| ribose-phosphate pyrophosphokinase I [Ajellomyces capsulatus NAm1]
  misc_feature (1)..(111): NCBI GI: 240278984 Blast Desc: ribose-phosphate pyrophosphokinase II [Ajellomyces capsulatus H143]
  misc_feature (1)..(110): SWISSPROT Homolog: EC 2.7.6.1 Ribose-phosphate diphosphokinase
MLVGNVANRVCILVDDLADTANTITRAAALLSKEGAQKVYALITHGVFSGDAIQRINYSAIDKIVVTNSVPQDEHRRLCPKLEVLDVSPIFSEAIRRIHHGESISVLFQYD

SEQ ID NO: 27287 - DNA, 2577 bp, Muscodor strobelii; identical to SEQ ID NO: 27284
  misc_feature: SGI EST ID NO. CUFF.64385.0
  misc_feature: Variant of the nucleotide sequence at SEQ ID NO 27285

SEQ ID NO: 27288 - DNA, 1428 bp, Muscodor strobelii
  misc_feature: SGI cDNA ID NO. 569346
  misc_feature: Elevated expression when VOC is produced
  misc_feature: Encodes the peptide sequence at SEQ ID NO 27289
atggaagaaccacgaccctttcgtggcatattaattggtgctggactcgtgggcctcactatggcccatgctctctccaaggctggtatcgacttcattttgttggagaaacacgacaacgtaatctctacctttggttcgaccttggccctttggccacagagctttcgcatactagaccaattaggtattttggatactgttcagcccatactggaaaccatacataatgccgtcatcttctcgagtaaaacttctcgtatctggcatacagatgaaacaatgaaagttgtagagaggaatcacggttatggtgttcgtattatgcaccgtcccaaaatgctggagttcctttatgagagcctacccgatgctgcgaaggctaaaatccagcttaagaagagattgacgagtattgagctatccgatgaaaatgtgaaggtattttgtgaagatggcacgtcctatgatgggtcaatcgttatcggtgccgatggagtgcacagccaaacccgtcagttgatgcaagtcataaagactggaaagccgcacgaccttttaacggattacgtcgccccatacaaggcgacatacagggtctacttcggctgctgtcctatacttccgggcttgcaagcgaattttagatatgacggaaacggcgatggtgtttcgacgcaaattgtcaacggcacaagtcaggcttggtttgggctgtacgaagagctgaaatgccccagatctcaacgcaagaaatacggtgaaatcgacaaacaagcgttacttaaaaagtatggcgatctctacttggcgccaggctggagcctcaatgcggtgaataaagctcggattgggccagctaatttgatcgaccttgaggaaggagtattagacgagtggttccatcagcgcatcgtcttagtcggagatgccgtgaggaaatttgaaccccacgcaggccttgggtacaatgctggtataatcgatgccgtagtgcttgtcaacggtttgcgacgtctgctacaaaaaagcgagtcgccaactgcacaagtctttgatgatttgtttcggaggtaccaatccgatagagacacggaaactaagaagatggcgaagatctctatggacgctgctcgaatcttggcgtggccgacgtggaagtacaaggtcctcgcaatatgctttctaccattcagccctctagcgaagctaaatacgaccaaaacgttcggaagcctgattagtggatcgcctgtttttgagtggttagaggagagaccgttgccatcttccacgataccgtggaaagcacacccgctatctcgatcagagaaagcctcctcggaacgacgtttcccgctactcttgtcgagcgcgatcctgggcctgtcttcgcttatgttacttatatgtatgcggtatgattga

SEQ ID NO: 27289 - protein, 475 aa, Muscodor strobelii
  misc_feature: SGI Peptide ID NO. 569346
  misc_feature (10)..(374): Pfam Id: PF01494 Pfam Desc: FAD binding domain
  misc_feature (12)..(68): Pfam Id: PF01494 Pfam Desc: FAD binding domain
  misc_feature (7)..(439): NCBI GI: 212535304 Blast Desc: monooxygenase, [Penicillium marneffei ATCC 18224] gi|210070207|gb|EEA24297.1| monooxygenase, [Penicillium marneffei ATCC 18224]
  misc_feature (7)..(436): NCBI GI: 256734858 Blast Desc: NECHADRAFT_75548 [Nectria haematococca mpVI 77-13-4]
  misc_feature (1)..(444): NCBI GI: 145606496 Blast Desc: MGG_02292 [Magnaporthe grisea 70-15] gi|145014141|gb|EDJ98782.1| MGG_02292 [Magnaporthe grisea 70-15]
  misc_feature (6)..(363): NCBI GI: 145234591 Blast Desc: An03g00370 [Aspergillus niger] gi|134057615|emb|CAK38015.1| protein product [Aspergillus niger]
  misc_feature (19)..(438): NCBI GI: 171693051 Blast Desc: protein product [Podospora anserina] gi|170946474|emb|CAP73275.1| protein product [Podospora anserina]
  misc_feature (7)..(436): NCBI GI: 256728204 Blast Desc: NECHADRAFT_54017 [Nectria haematococca mpVI 77-13-4]
  misc_feature (6)..(445): NCBI GI: 145241766 Blast Desc: An09g02150 [Aspergillus niger] gi|134078069|emb|CAK40152.1| protein product [Aspergillus niger]
  misc_feature (7)..(435): NCBI GI: 46115866 Blast Desc: FG03775.1 [Gibberella zeae PH-1]
  misc_feature (7)..(435): NCBI GI: 189197565 Blast Desc: FAD binding domain containing protein [Pyrenophora tritici-repentis Pt-1C-BFP] gi|187981068|gb|EDU47694.1| FAD binding domain containing protein [Pyrenophora tritici-repentis
  misc_feature (19)..(391): NCBI GI: 256728452 Blast Desc: NECHADRAFT_97875 [Nectria haematococca mpVI 77-13-4]
  misc_feature (10)..(388): SWISSPROT Homolog: EC 1.14.13.24 3-hydroxybenzoate 6-monooxygenase
  misc_feature: Useful for introducing or modulating the production of volatile compounds
MEEPRPFRGILIGAGLVGLTMAHALSKAGIDFILLEKHDNVISTFGSTLALWPQSFRILDQLGILDTVQPILETIHNAVIFSSKTSRIWHTDETMKVVERNHGYGVRIMHRPKMLEFLYESLPDAAKAKIQLKKRLTSIELSDENVKVFCEDGTSYDGSIVIGADGVHSQTRQLMQVIKTGKPHDLLTDYVAPYKATYRVYFGCCPILPGLQANFRYDGNGDGVSTQIVNGTSQAWFGLYEELKCPRSQRKKYGEIDKQALLKKYGDLYLAPGWSLNAVNKARIGPANLIDLEEGVLDEWFHQRIVLVGDAVRKFEPHAGLGYNAGIIDAVVLVNGLRRLLQKSESPTAQVFDDLFRRYQSDRDTETKKMAKISMDAARILAWPTWKYKVLAICFLPFSPLAKLNTTKTFGSLISGSPVFEWLEERPLPSSTIPWKAHPLSRSEKASSERRFPLLLSSAILGLSSLMLLICMRYD

SEQ ID NO: 27290 - DNA, 2518 bp, Muscodor strobelii
  misc_feature: SGI EST ID NO. CUFF.64725.2
  misc_feature: Variant of the nucleotide sequence at SEQ ID NO 27288
cgaacctgcgagacacatgctgatttatctagccgggataacatggagagaccgaatttggcaatggaagaaccacgaccctttcgtggcatattaattggtgctggactcgtgggcctcactatggcccatgctctctccaaggctggtatcgacttcattttgttggagaaacacgacaacgtaatctctacctttggttcgaccttggccctttggccacagagctttcgcatactagaccaattaggtattttggatactgttcagcccatactggaaaccatacataatgccgtcatcttctcgagtaaaacttctcgtatctggcatacagatgaaacaatgaaagttgtagagaggaatcacggttatggtgttcgtattatgcaccgtcccaaaatgctggagttcctttatgagagcctacccgatgctgcgaaggctaaaatccagcttaagaagagattgacgagtattgagctatccgatgaaaatgtgaaggtattttgtgaagatggcacgtcctatgatgggtcaatcgttatcggtgccgatggagtgcacagccaaacccgtcagttgatgcaagtcataaagactggaaagccgcacgaccttttaacggattacgtcgccccatacaaggcgacatacagggtctacttcggctgctgtcctatacttccgggcttgcaagcgaattttagatatgacggaaacggcgatggtgtttcgacgcaaattgtcaacggcacaagtcaggcttggtttgggctgtacgaagagctgaaatgccccagatctcaacgcaagaaatacggtgaaatcgacaaacaagcgttacttaaaaagtatggcgatctctacttggcgccaggctggagcctcaatgcggtgaataaagctcggattgggccagctaatttgatcgaccttgaggaaggagtattagacgagtggttccatcagcgcatcgtcttagtcggagatgccgtgaggaaatttgaaccccacgcaggccttgggtacaatgctggtataatcgatgccgtagtgcttgtcaacggtttgcgacgtctgctacaaaaaagcgagtcgccaactgcacaagtctttgatgatttgtttcggaggtaccaatccgatagagacacggaaactaagaagatggcgaagatctctatggacgctgctcgaatcttggcgtggccgacgtggaagtacaaggtcctcgcaatatgctttctaccattcagccctctagcgaagctaaatacgaccaaaacgttcggaagcctgattagtggatcgcctgtttttgagtggttagaggagagaccgttgccatcttccacgataccgtggaaagcacacccgctatctcgatcagagaaagcctcctcggaacgacgtttcccgctactcttgtcgagcgcgatcctgggcctgtcttcgcttatgttacttatatgtatgcggtatgattgacattaagagagaagagagggcctcgactggtgattcgtagctttcggcgagctggcgcgtatcattctctgacgcatgtcgcttactagatgacaagattgtaccaccgtgtcagtgctcatgactcaagtataatcgatttgacttaagccgtcagtttataactactgacttctccccatgtcgatagaccatttgctccatcacacctgcagatcaagtatctctcagagaacagcttgagttgcaattcatcaaggcacttcgagaatgattaatgatgtcatctttaagtggccgttgactatggggctgtgttgtctccaaatcgtgagggatttggattccttgatattcacgaatcaccgaagcgcttaaacaaaaatgagcgagtgctgtgttagactatttggttagattttatagttccgtatcatatctcattgatagattcttgttaaaagcggcttacggtctttgctcatcaacataggtccctacgaaagtgtttgaacacctaagaaaacgccttattgatttatttttgtacatcgaatagctccctctaaaggaaatatgccagtctttttctcatatcaaagatagcacgaatgataaacgaaccagatatcattcctaccctgccattgctagcaaccgatcccacgtctcaagtatagcaaccccatgaatctgggcatacagcgcgaccaaccaagcaagccatacgactttaagacacacacaacatctcagcgcttctcatctctctcctatccacatttacgccgtcttcctccactggttatacacaccgatcaaactgctcacggtaccagccaagcccacaatcccatcgtccaggttgacccagcccagggcggaagtaggcacggtaagatcgcaaagatcagacagcagctgaagctggcttgtagcgcgctccctatatgtactccagtcagcaaatcattctcacctcttcccaaacttgccctccccccagtctatctgcacccttcccctc

SEQ ID NO: 27291 - DNA, 1626 bp, Muscodor strobelii
  misc_feature: SGI cDNA ID NO. 569347
  misc_feature: Elevated expression when VOC is produced
  misc_feature: Encodes the peptide sequence at SEQ ID NO 27292
atgctttctctctcaagaccagtcgtctcgactatcgtcgctgtcgtgagtaaggtcattaaaatcacacagggaactccaattttgcctcactctctgatcctaggccacctgctcgttcttgctgagttcagtggccttcatcctcccgacgtaaatatccatgtcttccatagctggttatctgagaactataagaaatatttcccagatcacgacggtctgcctcctgttgtttacctggacctttggcctgtcagcgactctctagctatagtgagtgacccgtcggtagcgtcgcaatttactgttaccaacaacctgccaaaagtcaggatggtaaagcaatacatcgaaccattaacctccgctacggatatcttctgcacggaagggcagacatggaaatcgtggcgttctattctcaatcctggctttagtagcaagaatctggcggcaatgacccctgaaatcatcgaagaggtgggcgtcttcgtggctgaactgaagaagatggctgatcgagatgggaattggggcgccgtcttccagttggagcagaaaacgactaatctgacattcgatgtcatatacagagcaatcttggatgtgcggctgcatcaacagtccatggcatttgacagtcctctgaaggtcgccttgctagatcagctacgtctgatgggcatcatgactaatgctgcaagaggcacactcggacgcatgccttggcaaaatgttacgatttcaaagaacaataaggtaatgagcgacatccttcttccccagattcaagccaggctgaagggggctacacatggcaccaagaggactatcgttgatcttgccggtgaatcctttaataaggctaagaacgagcctgaacctgttgacacacaagaggaattcaacgaaactcttcttgcaaatctgaaaatgttcttgtttgccggacatgacacaacatcttcgtctatctgcttcatgttcaaattactgcaagacaatccgcaagcattggagacgcttcgcaaagagcacaatgagattattagtcccgatcccgaggcagccgctcaaactttgtcaacgcatcctcatctcttgtcctcacttccttacaccacgggtgtcattaaggagacgttgcgactatatcccatagccacaacaatacgcgaatgtcctcgggattttcgattggttgatagctcgaacatgcaatacccaatggaaggttttggagcgtggatgtcggccccgaacatccaccgtcatgcacagtattggcccagaccaaacgacttcctccccgagcgcttgaccgtggctgacggtgaccccttgcatccttcacataacacctggataccattctcgatcggacctcgcaactgtattgggatggggctcgctatgatggagcttaagctggtgctggtgttagttgctcggactttagtcatccgagaggcgtggcaagcgtgtgacatcgaacgaggtcccaaagctacgccttcgcatgttgtgaatggacaacggctatatcccgtcggaatcagcactgtccatcccaaggacggtatgcctgtgcaaattcgactattagaaaccgcgcaaggctag

SEQ ID NO: 27292 - protein, 541 aa, Muscodor strobelii
  misc_feature: SGI Peptide ID NO. 569347
  misc_feature (30)..(516): Pfam Id: PF00067 Pfam Desc: Cytochrome P450
  misc_feature (304)..(398): Pfam Id: PF00067 Pfam Desc: Cytochrome P450
  misc_feature (423)..(483): Pfam Id: PF00067 Pfam Desc: Cytochrome P450
  misc_feature (126)..(206): Pfam Id: PF00067 Pfam Desc: Cytochrome P450
  misc_feature (8)..(535): NCBI GI: 261354657 Blast Desc: cytochrome P450 4V3 [Verticillium albo-atrum VaMs.102]
  misc_feature (24)..(535): NCBI GI: 115402821 Blast Desc: conserved [Aspergillus terreus NIH2624] gi|114189333|gb|EAU31033.1| conserved [Aspergillus terreus NIH2624]
  misc_feature (25)..(534): NCBI GI: 154301127 Blast Desc: BC1G_10536 [Botryotinia fuckeliana B05.10] gi|150856284|gb|EDN31476.1| BC1G_10536 [Botryotinia fuckeliana B05.10]
  misc_feature (12)..(535): NCBI GI: 238839665 Blast Desc: VerA [Microsporum canis CBS 113480]
  misc_feature (25)..(535): NCBI GI: 240275889 Blast Desc: sterigmatocystin biosynthesis P450 monooxygenase StcS [Ajellomyces capsulatus H143]
  misc_feature (25)..(530): NCBI GI: 154281857 Blast Desc: [Ajellomyces capsulatus NAm1] gi|150411920|gb|EDN07308.1| [Ajellomyces capsulatus NAm1]
  misc_feature (25)..(538): NCBI GI: 154320460 Blast Desc: BC1G_01702 [Botryotinia fuckeliana B05.10] gi|150853391|gb|EDN28583.1| BC1G_01702 [Botryotinia fuckeliana B05.10]
  misc_feature (29)..(500): NCBI GI: 171677496 Blast Desc: protein product [Podospora anserina] gi|170936816|emb|CAP61474.1| protein product [Podospora anserina]
  misc_feature (29)..(535): NCBI GI: 170940186 Blast Desc: protein product [Podospora anserina]
  misc_feature (24)..(533): NCBI GI: 156042896 Blast Desc: SS1G_11247 [Sclerotinia sclerotiorum 1980] gi|154695632|gb|EDN95370.1| SS1G_11247 [Sclerotinia sclerotiorum 1980]
  misc_feature (54)..(528): SWISSPROT Homolog: EC 1.14.14.1 Unspecific monooxygenase
  misc_feature: Useful for introducing or modulating the production of volatile compounds
MLSLSRPVVSTIVAVVSKVIKITQGTPILPHSLILGHLLVLAEFSGLHPPDVNIHVFHSWLSENYKKYFPDHDGLPPVVYLDLWPVSDSLAIVSDPSVASQFTVTNNLPKVRMVKQYIEPLTSATDIFCTEGQTWKSWRSILNPGFSSKNLAAMTPEIIEEVGVFVAELKKMADRDGNWGAVFQLEQKTTNLTFDVIYRAILDVRLHQQSMAFDSPLKVALLDQLRLMGIMTNAARGTLGRMPWQNVTISKNNKVMSDILLPQIQARLKGATHGTKRTIVDLAGESFNKAKNEPEPVDTQEEFNETLLANLKMFLFAGHDTTSSSICFMFKLLQDNPQALETLRKEHNEIISPDPEAAAQTLSTHPHLLSSLPYTTGVIKETLRLYPIATTIRECPRDFRLVDSSNMQYPMEGFGAWMSAPNIHRHAQYWPRPNDFLPERLTVADGDPLHPSHNTWIPFSIGPRNCIGMGLAMMELKLVLVLVARTLVIREAWQACDIERGPKATPSHVVNGQRLYPVGISTVHPKDGMPVQIRLLETAQG

SEQ ID NO: 27293 - DNA, 4097 bp, Muscodor strobelii
  misc_feature: SGI EST ID NO. CUFF.64887.0
  misc_feature: Variant of the nucleotide sequence at SEQ ID NO 27291
ctttatgccggtgtttgcactcggctctagcgatgcgtgttaactaccaacagcccagagccaatccaccatttgcgcttttagacatgtcattgcctacatcattccaaatcctttatacatacatgatttatgggtttgctgttcgctcccgcaatagccctccatattaagagactaatcggagttacgttgctcgttctgcgccatgctttctctctcaagaccagtcgtctcgactatcgtcgctgtcgtggtgactatagtgattgcgcgtttaatccgtcaaggctacgctcatcggtccagagtaaggtcattaaaatcacacagggaactccaattttgcctcactctctgatcctaggccacctgctcgttcttgctgagttcagtggccttcatcctcccgacgtaaatatccatgtcttccatagctggttatctgagaactataagaaatatttcccagatcacgacggtctgcctcctgttgtttacctggacctttggcctgtcagcgactctctagctatagtgagtgacccgtcggtagcgtcgcaatttactgttaccaacaacctgccaaaagtcaggatggtaaagcaatacatcgaaccattaacctccgctacggatatcttctgcacggaagggcagacatggaaatcgtggcgttctattctcaatcctggctttagtagcaagaatctggcggcaatgacccctgaaatcatcgaagaggtgggcgtcttcgtggctgaactgaagaagatggctgatcgagatgggaattggggcgccgtcttccagttggagcagaaaacgactaatctgacattcgatgtcatatacagagcaatcttggatgtgcggctgcatcaacagtccatggcatttgacagtcctctgaaggtcgccttgctagatcagctacgtctgatgggcatcatgactaatgctgcaagaggcacactcggacgcatgccttggcaaaatgttacgatttcaaagaacaataaggtaatgagcgacatccttcttccccagattcaagccaggctgaagggggctacacatggcaccaagaggactatcgttgatcttgccggtgaatcctttaataaggctaagaacgagcctgaacctgttgacacacaagaggaattcaacgaaactcttcttgcaaatctgaaaatgttcttgtttgccggacatgacacaacatcttcgtctatctgcttcatgttcaaattactgcaagacaatccgcaagcattggagacgcttcgcaaagagcacaatgagattattagtcccgatcccgaggcagccgctcaaactttgtcaacgcatcctcatctcttgtcctcacttccttacaccacgggtgtcattaaggagacgttgcgactatatcccatagccacaacaatacgcgaatgtcctcgggattttcgattggttgatagctcgaacatgcaatacccaatggaaggttttggagcgtggatgtcggccccgaacatccaccgtcatgcacagtattggcccagaccaaacgacttcctccccgagcgcttgaccgtggctgacggtgaccccttgcatccttcacataacacctggataccattctcgatcggacctcgcaactgtattgggatggggctcgctatgatggagcttaagctggtgctggtgttagttgctcggactttagtcatccgagaggcgtggcaagcgtgtgacatcgaacgaggtcccaaagctacgccttcgcatgttgtgaatggacaacggctatatcccgtcggaatcagcactgtccatcccaaggacggtatgcctgtgcaaattcgactattagaaaccgcgcaaggctaggctacgcatgattcagaagattgggaggatacatcatgcgaggtattaatcgcgaatatatgcattttcacttgtgattatcgatcagtcttctagcccagtgtcgattcaaatgcttatgtatatggtgatctgtcagtgtggcgatttcacttcctcccgcttgttggctataactagcaaaaagatacatattactccttttcattcgccatattgcgtgacaagagcaagacggtaggatggtatgcagttcaagagcgcgatcgtggtgtctttccatctgattgttcatgacaagtagtagtcggcccagagacgtatcgggaaacgactcgctctgtaatttcaacgatagttggaaaacgggtggatattggtattcaaattaattactatgaggataatcatacgttcgtaatactatttgttccacgcctgccattacttgctcgcttattattgagagacacgtttctcctcgacctgctggtccggaaggtcgtccaggctttctccttgtttcagtccgagcttacgaacatcccagccatttgcaccaaggtattcgcggaatttctcatcttccaaagtgatagtatcctgattaatctgaggtatcccgaaaaaggcaattgaagcagcaagtaaacacaaactggaagcaacccaaaatgggttttggtagtatgcggtgtcattctttgtggcgcctcccgctgcttgaatatacggaaatacgtaagtgccaacgaaggcaccgatctttccaacagcagcggcaattccgtaatattgccctcgaacaccagtcgcacaggtcttggcagccagaagacctatgttgtttccgggaccaaattcgccaagactgaggaaaataccataaaccacggcgaaagccccgacaagatgaggctgagacaattggccgtagacgcctgccatgatatacccaacgacagattgtaggacaaagccgaggatgagggtgtaacggggcccaattctgtcagagacgggggcaccgaggacggtcccaggaatgtagaataagttgatgacagtgttccagccaaagacggtcgttaatggtgccttgtcgctatcgtagatagcggctagaatcgtgctggagtaaatgccgaaggcgtaggtagagaaatcgtaaatgaaccagatcaagctaaccattagaagacggaaaccatagtacttgataacaagtttgtatggcgtgcggacattcctcattgagttgcgagagaattcctcgggctccttcagcctaagacgaagtacgaagaggatgagcgggaagacgacgccaataccgagactcgttcgccagatagtaccgtagtacttgtttgatgccgcagcggccacgacgtaggggacgaaagctccgatgacgaaaccgaagtcaatcatcgagttggtgaacaggataaaccatcggtttcgtgtaccagcgctgagctcacccgtcgactcggcagcgctgacactgcctgcaggatactcgcctcctatgccaataccgaccttgactcatgtatcagtcggcgaactttcgttctgcggattgaaatatgacttacgaagaatcgccaggctgcgaggatgttgaacatgccaatagcttgacctttatagtaggagccggcggcaagtgcggtgaacacgatgagaatcacggtagataccataagggacccgacgcgcgaccatctgtcggccgtgtaaccgaagactaattgaccaaccacctgtgatgcgcgttgtaagttagtttgaacgctttggatatatgttttgggtgagggtggtggaagcatacagttccggcgaaggcgatcgcgctcacgaccgaggctgcgtttgagtcggagtagacggagccatattggtaagagagcgtcgtaccaacggacccgatcacattgttgacatagccgtcggagaagagaccagcaccgcaggcgagaacaggccagatggactcccagaatggtttctgttgttcgagtggtagagctccctcgggatcgcgttgcgccacggtctctgtgacctgctcctcgggggcagccttcttgcgaccgaacatagtaaaagctatgctaacaataagttagatgatgctgcaattaggtcctaggggtgcagatgaggatggtcgcagacgagcttgaaggagcgcgcct

SEQ ID NO: 27294 - DNA, 1527 bp, Muscodor strobelii
  misc_feature: SGI cDNA ID NO. 569348
  misc_feature: Encodes the peptide sequence at SEQ ID NO 27295
atgttcggtcgcaagaaggctgcccccgaggagcaggtcacagagaccgtggcgcaacgcgatcccgagggagctctaccactcgaacaacagaaaccattctgggagtccatctggcctgttctcgcctgcggtgctggtctcttctccgacggctatgtcaacaatgtgatcgggtccgttggtacgacgctctcttaccaatatggctccgtctactccgactcaaacgcagcctcggtcgtgagcgcgatcgccttcgccggaactgtggttggtcaattagtcttcggttacacggccgacagatggtcgcgcgtcgggtcccttatggtatctaccgtgattctcatcgtgttcaccgcacttgccgccggctcctactataaaggtcaagctattggcatgttcaacatcctcgcagcctggcgattcttcgtcggtattggcataggaggcgagtatcctgcaggcagtgtcagcgctgccgagtcgacgggtgagctcagcgctggtacacgaaaccgatggtttatcctgttcaccaactcgatgattgacttcggtttcgtcatcggagctttcgtcccctacgtcgtggccgctgcggcatcaaacaagtactacggtactatctggcgaacgagtctcggtattggcgtcgtcttcccgctcatcctcttcgtacttcgtcttaggctgaaggagcccgaggaattctctcgcaactcaatgaggaatgtccgcacgccatacaaacttgttatcaagtactatggtttccgtcttctaatggttagcttgatctggttcatttacgatttctctacctacgccttcggcatttactccagcacgattctagccgctatctacgatagcgacaaggcaccattaacgaccgtctttggctggaacactgtcatcaacttattctacattcctgggaccgtcctcggtgcccccgtctctgacagaattgggccccgttacaccctcatcctcggctttgtcctacaatctgtcgttgggtatatcatggcaggcgtctacggccaattgtctcagcctcatcttgtcggggctttcgccgtggtttatggtattttcctcagtcttggcgaatttggtcccggaaacaacataggtcttctggctgccaagacctgtgcgactggtgttcgagggcaatattacggaattgccgctgctgttggaaagatcggtgccttcgttggcacttacgtatttccgtatattcaagcagcgggaggcgccacaaagaatgacaccgcatactaccaaaacccattttgggttgcttccagtttgtgtttacttgctgcttcaattgcctttttcgggatacctcagattaatcaggatactatcactttggaagatgagaaattccgcgaataccttggtgcaaatggctgggatgttcgtaagctcggactgaaacaaggagaaagcctggacgaccttccggaccagcaggtcgaggagaaacgtgtctctcaataa

SEQ ID NO: 27295 - protein, 508 aa, Muscodor strobelii
  misc_feature: SGI Peptide ID NO. 569348
  misc_feature (43)..(414): Pfam Id: PF07690 Pfam Desc: Major Facilitator Superfamily
  misc_feature (39)..(463): Pfam Id: PF00083 Pfam Desc: Sugar (and other) transporter
  misc_feature (39)..(236): Pfam Id: PF00083 Pfam Desc: Sugar (and other) transporter
  misc_feature (317)..(457): Pfam Id: PF00083 Pfam Desc: Sugar (and other) transporter
  misc_feature (2)..(493): NCBI GI: 85097369 Blast Desc: NCU04809 [Neurospora crassa OR74A] gi|28921926|gb|EAA31199.1| NCU04809 [Neurospora crassa OR74A]
  misc_feature (1)..(444): NCBI GI: 116202101 Blast Desc: CHGG_08935 [Chaetomium globosum CBS 148.51] gi|88177453|gb|EAQ84921.1| CHGG_08935 [Chaetomium globosum CBS 148.51]
  misc_feature (1)..(505): NCBI GI: 156060579 Blast Desc: SS1G_02429 [Sclerotinia sclerotiorum 1980] gi|154699836|gb|EDN99574.1| SS1G_02429 [Sclerotinia sclerotiorum 1980]
  misc_feature (2)..(495): NCBI GI: 145611340 Blast Desc: MGG_00464 [Magnaporthe grisea 70-15] gi|145018642|gb|EDK02921.1| MGG_00464 [Magnaporthe grisea 70-15]
  misc_feature (1)..(503): NCBI GI: 256724124 Blast Desc: NECHADRAFT_51418 [Nectria haematococca mpVI 77-13-4]
  misc_feature (1)..(505): NCBI GI: 154311823 Blast Desc: BC1G_05945 [Botryotinia fuckeliana B05.10] gi|150850595|gb|EDN25788.1| BC1G_05945 [Botryotinia fuckeliana B05.10]
  misc_feature (57)..(489): NCBI GI: 171681958 Blast Desc: protein product [Podospora anserina] gi|170940938|emb|CAP66588.1| protein product [Podospora anserina]
  misc_feature (1)..(486): NCBI GI: 146324403 Blast Desc: MFS phospholipid transporter (Git1) [Aspergillus fumigatus Af293] gi|129557229|gb|EAL88628.2| MFS phospholipid transporter (Git1), [Aspergillus fumigatus Af293]
  misc_feature (1)..(486): NCBI GI: 159124226 Blast Desc: MFS phospholipid transporter (Git1), [Aspergillus fumigatus A1163]
  misc_feature (28)..(489): NCBI GI: 261198196 Blast Desc: MFS phospholipid transporter Git1 [Ajellomyces dermatitidis SLH14081] gi|239595463|gb|EEQ78044.1| MFS phospholipid transporter Git1 [Ajellomyces dermatitidis SLH14081]
MFGRKKAAPEEQVTETVAQRDPEGALPLEQQKPFWESIWPVLACGAGLFSDGYVNNVIGSVGTTLSYQYGSVYSDSNAASVVSAIAFAGTVVGQLVFGYTADRWSRVGSLMVSTVILIVFTALAAGSYYKGQAIGMFNILAAWRFFVGIGIGGEYPAGSVSAAESTGELSAGTRNRWFILFTNSMIDFGFVIGAFVPYVVAAAASNKYYGTIWRTSLGIGVVFPLILFVLRLRLKEPEEFSRNSMRNVRTPYKLVIKYYGFRLLMVSLIWFIYDFSTYAFGIYSSTILAAIYDSDKAPLTTVFGWNTVINLFYIPGTVLGAPVSDRIGPRYTLILGFVLQSVVGYIMAGVYGQLSQPHLVGAFAVVYGIFLSLGEFGPGNNIGLLAAKTCATGVRGQYYGIAAAVGKIGAFVGTYVFPYIQAAGGATKNDTAYYQNPFWVASSLCLLAASIAFFGIPQINQDTITLEDEKFREYLGANGWDVRKLGLKQGESLDDLPDQQVEEKRVSQ

SEQ ID NO: 27296 - DNA, 3198 bp, Muscodor strobelii
  misc_feature: SGI EST ID NO. CUFF.64888.1
  misc_feature: Variant of the nucleotide sequence at SEQ ID NO 27294
gcgcgctccttcaagctcgtctgcgaccatcctcatctgcacccctaggacctaattgcagcatcatctaacttattgttagcatagcttttactatgttcggtcgcaagaaggctgcccccgaggagcaggtcacagagaccgtggcgcaacgcgatcccgagggagctctaccactcgaacaacagaaaccattctgggagtccatctggcctgttctcgcctgcggtgctggtctcttctccgacggctatgtcaacaatgtgatcgggtccgttggtacgacgctctcttaccaatatggctccgtctactccgactcaaacgcagcctcggtcgtgagcgcgatcgccttcgccggaactgtggttggtcaattagtcttcggttacacggccgacagatggtcgcgcgtcgggtcccttatggtatctaccgtgattctcatcgtgttcaccgcacttgccgccggctcctactataaaggtcaagctattggcatgttcaacatcctcgcagcctggcgattcttcgtcggtattggcataggaggcgagtatcctgcaggcagtgtcagcgctgccgagtcgacgggtgagctcagcgctggtacacgaaaccgatggtttatcctgttcaccaactcgatgattgacttcggtttcgtcatcggagctttcgtcccctacgtcgtggccgctgcggcatcaaacaagtactacggtactatctggcgaacgagtctcggtattggcgtcgtcttcccgctcatcctcttcgtacttcgtcttaggctgaaggagcccgaggaattctctcgcaactcaatgaggaatgtccgcacgccatacaaacttgttatcaagtactatggtttccgtcttctaatggttagcttgatctggttcatttacgatttctctacctacgccttcggcatttactccagcacgattctagccgctatctacgatagcgacaaggcaccattaacgaccgtctttggctggaacactgtcatcaacttattctacattcctgggaccgtcctcggtgcccccgtctctgacagaattgggccccgttacaccctcatcctcggctttgtcctacaatctgtcgttgggtatatcatggcaggcgtctacggccaattgtctcagcctcatcttgtcggggctttcgccgtggtttatggtattttcctcagtcttggcgaatttggtcccggaaacaacataggtcttctggctgccaagacctgtgcgactggtgttcgagggcaatattacggaattgccgctgctgttggaaagatcggtgccttcgttggcacttacgtatttccgtatattcaagcagcgggaggcgccacaaagaatgacaccgcatactaccaaaacccattttgggttgcttccagtttgtgtttacttgctgcttcaattgcctttttcgggatacctcagattaatcaggatactatcactttggaagatgagaaattccgcgaataccttggtgcaaatggctgggatgttcgtaagctcggactgaaacaaggagaaagcctggacgaccttccggaccagcaggtcgaggagaaacgtgtctctcaataataagcgagcaagtaatggcaggcgtggaacaaatagtattacgaacgtatgattatcctcatagtaattaatttgaataccaatatccacccgttttccaactatcgttgaaattacagagcgagtcgtttcccgatacgtctctgggccgactactacttgtcatgaacaatcagatggaaagacaccacgatcgcgctcttgaactgcataccatcctaccgtcttgctcttgtcacgcaatatggcgaatgaaaaggagtaatatgtatctttttgctagttatagccaacaagcgggaggaagtgaaatcgccacactgacagatcaccatatacataagcatttgaatcgacactgggctagaagactgatcgataatcacaagtgaaaatgcatatattcgcgattaatacctcgcatgatgtatcctcccaatcttctgaatcatgcgtagcctagccttgcgcggtttctaatagtcgaatttgcacaggcataccgtccttgggatggacagtgctgattccgacgggatatagccgttgtccattcacaacatgcgaaggcgtagctttgggacctctgacaaatgaaactcttctatcagcagttgcgtctatatgataagatagacgagttttaaaattgatgcataaatacgtaccgttcgatgtcacacgcttgccacgcctctcggatgactaaagtccgagcaactaacaccagcaccagcttaagctccatcatagcgagccccatcccaatacagttgcgaggtccgatcgagaatggtatccaggtgttatgtgaaggatgcaaggggtcaccgtcagccacggtcaagcgctcggggaggaagtcgtttggtctgggccaatactgtgcatgacggtggatgttcggggccgacatccacgctccaaaaccttccattgggtattgcatgttcgagctatcaaccaatcgaaaatcccgaggacattcgcgtattgttgtggctatgggatatagtcgcaacgtctccttaatgacacccgtggtgtaaggaagtgaggacaagagatgaggatgcgttgacaaagtttgagcggctgcctcgggatcgggactaataatctcattgtgctctttgcgaagcgtctccaatgcttgcggattgtcttgcagtaatttgaacatgaagcagatagacgaagatgttgtgtcatgtccggcaaacaagaacattttcagatttgcaagaagagtttcgttgaattcctcttgtgtgtcaacaggttcaggctcgttcttagccttattaaaggattcaccggcaagatcaacgatagtcctcttggtgccatgtgtagcccccttcagcctggcttgaatctggggaagaaggatgtcgctcattaccttattgttctttgaaatcgtaacattttgccaaggcatgcgtccgagtgtgcctcttgcagcattagtcatgatgcccatcagacgtagctgatctagcaaggcgaccttcagaggactgtcaaatgccatggactgttgatgcagccgcacatccctgcaagaggttag

SEQ ID NO: 27297 - DNA, 774 bp, Muscodor strobelii
  misc_feature: SGI cDNA ID NO. 569349
  misc_feature: Encodes the peptide sequence at SEQ ID NO 27298
atgaagaacgcgctcccgatcatttccggcttagcagcctccgcctcagcaactggggttctgctccccttgtatatatatccttcagacacaatttgggcaccagtctacaacgcggtatccgcagactcttctctcgactggctagtagtagtgaacccagacagcgggcccggcgcgacgggccttccaggcaacgatgaccccagctacattgcaggaacctcaaagttgaacggatacagcaacgtcaagacaattggatacgtacgcaccaactacggacagcaagacgtaaacacactacacacccagcttacacaatgggcgaactgggctacatatacagcatctgatatcgcagtccatggtatcttcttcgatgaggcgcccacggataacttcgactatatgaacgaagcaatcaccttcgcgcgaaatgctttcggcgactcaatcacgacaacttgcaacttcggcaccaaggccgacgtagagttctacagcatctgcgatgtcgttgtagccgccgaatactccggctcccaatacggggacgggtcatcgacgatcagcggaaatattccttcgggctatgctgctcaggctgctatcatcgtccatgactttacagactctgcttcgacgctcgccagcgatatcagtaagatccagagtgcgggcgtgggctggacttatttcacctcttcttcagattacactagcattacggtgacacctgctactgtgggggctgttgctgctgatctgtaa

SEQ ID NO: 27298 - protein, 257 aa, Muscodor strobelii
  misc_feature: SGI Peptide ID NO. 569349
  misc_feature (33)..(252): NCBI GI: 256724145 Blast Desc: NECHADRAFT_86409 [Nectria haematococca mpVI 77-13-4]
  misc_feature (1)..(244): NCBI GI: 242804528 Blast Desc: cell surface spherulin 4-like protein, [Talaromyces stipitatus ATCC 10500] gi|218717738|gb|EED17159.1| cell surface spherulin 4-like protein, [Talaromyces stipitatus ATCC 10500]
  misc_feature (7)..(167): NCBI GI: 67902762 Blast Desc: AN8368.2 [Aspergillus nidulans FGSC A4] gi|40747732|gb|EAA66888.1| AN8368.2 [Aspergillus nidulans FGSC A4] gi|259484297|tpe|CBF80398.1| TPA: spherulin 4-like cell FGSC
  misc_feature (20)..(215): NCBI GI: 255944749 Blast Desc: Pc20g06130 [Penicillium chrysogenum Wisconsin 54-1255] gi|211587877|emb|CAP85942.1| Pc20g06130 [Penicillium chrysogenum Wisconsin 54-1255]
  misc_feature (19)..(242): NCBI GI: 154321866 Blast Desc: [Botryotinia fuckeliana B05.10] gi|150850327|gb|EDN25520.1| [Botryotinia fuckeliana B05.10]
  misc_feature (20)..(223): NCBI GI: 171677792 Blast Desc: protein product [Podospora anserina] gi|170936964|emb|CAP61623.1| protein product [Podospora anserina]
  misc_feature (20)..(224): NCBI GI: 67524989 Blast Desc: AN2952.2 [Aspergillus nidulans FGSC A4] gi|40744347|gb|EAA63523.1| AN2952.2 [Aspergillus nidulans FGSC A4]
  misc_feature (20)..(208): NCBI GI: 115384990 Blast Desc: conserved [Aspergillus terreus NIH2624] gi|114196734|gb|EAU38434.1| conserved [Aspergillus terreus NIH2624]
  misc_feature (14)..(184): NCBI GI: 67902760 Blast Desc: AN8367.2 [Aspergillus nidulans FGSC A4] gi|40747731|gb|EAA66887.1| AN8367.2 [Aspergillus nidulans FGSC A4] gi|259484296|tpe|CBF80396.1| TPA: cell surface protein, FGSC
  misc_feature (11)..(254): NCBI GI: 255932305 Blast Desc: Pc12g08800 [Penicillium chrysogenum Wisconsin 54-1255] gi|211582328|emb|CAP80507.1| Pc12g08800 [Penicillium chrysogenum Wisconsin 54-1255]
MKNALPIISGLAASASATGVLLPLYIYPSDTIWAPVYNAVSADSSLDWLVVVNPDSGPGATGLPGNDDPSYIAGTSKLNGYSNVKTIGYVRTNYGQQDVNTLHTQLTQWANWATYTASDIAVHGIFFDEAPTDNFDYMNEAITFARNAFGDSITTTCNFGTKADVEFYSICDVVVAAEYSGSQYGDGSSTISGNIPSGYAAQAAIIVHDFTDSASTLASDISKIQSAGVGWTYFTSSSDYTSITVTPATVGAVAADL

SEQ ID NO: 27299 - DNA, 1769 bp, Muscodor strobelii
  misc_feature: SGI EST ID NO. CUFF.64410.0
  misc_feature: Variant of the nucleotide sequence at SEQ ID NO 27297
caggataccccatcaccactctcgttcgtgctcgattcctggcgagcttgacttatataaccatttcttcccataaacaggcgacttggtcgatgtggtagcaaccgctagcagagacaaggggtattgaaactcggttgcttccggttcagaggactcaatggcaagatgccatcgcagtctcctcatataccaccgcagcgtcacagcaacggcaagacgaatgccagctgtcaccgaataacccttgttgagtattctccaaatgcatcgtttcaccacatcctcgccaccctttagtagttacgatgtttcatcatggtcattttcagcaggtggtaatttgtcaattgcgccgagcctggggattgtgggttgtattcgatccctatgggggttttggctgtcagtgcattgaaattaagtaacttaactctacgcattcatgccccaggtttacgtacaaatgttcttttgttacgagtacacgtaagagccatgatctgcaattagatgatcgatttgaatgggcgtttcaaacatcgctataagtccgatgccctaagcgaaaggattgttacacaaggccaggatgaagaggaatgtatataaagatgatcgacggccttttatgctgctatgaacggacgaagccttacttaaccagattaactacgggtttttgctaacaacattgcacgttgacgactgtcgataaatcccatcaaaatgaagaacgcgctcccgatcatttccggcttagcagcctccgcctcagcaactggggttctgctccccttgtatatatatccttcagacacaatttgggcaccagtctacaacgcggtatccgcagactcttctctcgactggctagtagtagtgaacccagacagcgggcccggcgcgacgggccttccaggcaacgatgaccccagctacattgcaggaacctcaaagttgaacggatacagcaacgtcaagacaattggatacgtacgcaccaactacggacagcaagacgtaaacacactacacacccagcttacacaatgggcgaactgggctacatatacagcatctgatatcgcagtccatggtatcttcttcgatgaggcgcccacggataacttcgactatatgaacgaagcaatcaccttcgcgcgaaatgctttcggcgactcaatcacgacaacttgcaacttcggcaccaaggccgacgtagagttctacagcatctgcgatgtcgttgtagccgccgaatactccggctcccaatacggggacgggtcatcgacgatcagcggaaatattccttcgggctatgctgctcaggctgctatcatcgtccatgactttacagactctgcttcgacgctcgccagcgatatcagtaagatccagagtgcgggcgtgggctggacttatttcacctcttcttcagattacactagcattacggtgacacctgctactgtgggggctgttgctgctgatctgtaaatacaacttcggagtaaaacttgagtgctgagtttcatgattaaggagctttcgtatacatatttgaatttggctacgcgttcgatctggctctcgacatctaggggatttttgtctgtgtacgatgagaacaattcgttaagcatatgtatataagcattacgtttcgccataagagtattgaatagcgagcgtattacatgctattgacggcagtttccgtcacaaactactaccgagctgacgggcctgagcgtgggataagc

SEQ ID NO: 27300 - DNA, 2007 bp, Muscodor strobelii
  misc_feature: SGI cDNA ID NO. 569350
  misc_feature: Reduced expression when VOC is produced
  misc_feature: Encodes the peptide sequence at SEQ ID NO 27301
atggcgagacgctctcagagctactgggccattgccatcggcatgatcgcctggagtcttcttctcttcagccctctcgccttcgtctccagcgtcaatgctcaggacacagagcaggaatacggtaccgtcatcggtattgatttgggaaccacatactcttgcgtcggtgtgatgcaaaagggcaaagtagaaatcctcgtaaacgaccaaggaaaccgtatcaccccctcatacgtcgccttcaccgaagaagaacggttagtcggagacgccgccaagacacaggctgccaacaacccattcaacaccatcttcgatgtcaagcgatttatcggccgaaaatgggacgagaagtcgctccagagcgacatcaagcacttcccctataaggtcctcgagaaagagggaaagcccgtcgtccaggtcgacgtccagggctcccccaaggtcttcacccctgaggaaatctctgccgttattctcggcaagatgaaggaggtcgccgagtcctacttgggcaagaaggtcacccacgccgtcgtcactgtccctgcctacttcaacgacaaccagagacaggccaccaaggacgctggcatcatcgccggtctgaacgttctgcgcattgtcaacgagcccactgcggctgctattgcctacggtctcgacaagaccgacgccgagcgccacatcattgtctacgatctcggtggtggtaccttcgatgtctcccttctgtccatcgaccagggtgttttcgaggtcttggctaccgctggtgacacccatctcggtggtgaggatttcgaccagagaatcatcaactacttcgccaagtcctacaacaagaagaacagcgtcgatgtcaccaaggacgccaaggccatgggtaagctgaagcgtgaggccgaaaaggccaagcgtactctctcttcccagaagaccacccgcattgagatcgaggccttcttcgagggcaaggacttctccgagactctgtcccgcgccaagttcgaggagctcaacatggatctcttcaagcgcactctcaagcctgtcaagcaggttctcgacgacgccaagatgaacaaggacgagattgatgacatcgttctcgtcggtggttccactcgtatccccaaggtccaggaacttctcgaggagttcttcggtggcaagaaggcttccaagggtattaaccccgatgaggctgttgcgttcggtgctgctgttcaggccggtgttctttccggcgaggagggtactgacgagatcgtccttatggatgtcaacccattgaccctgggtattgagactactggtggtgtcatgaccaagttgatcaaccgtaacactgccattcctactcgcaagagccagatcttctctaccgctgccgataaccagcccgtcgtcttgatccaggtcttcgaaggtgaacgatccatgaccaaggacaacaaccttctcggcaagttcgagctgaccaacattccccccgctcctcgtggtgttccccagatcgaagtctctttcgagctcgacgccaacggtatcctcaaggtttccgcccatgacaagggaactggcaagaccgagaccatcactatcaccaacgataagggccgtctcactcaagaggagatcgagcgcatggttgccgaggctgagaagtacgccgaggaggacaaggccactcgtgagcgcattgaggctcgcaacggtctagagaactacgccttcaacttgaagaaccaggtcaacgacgaggaaggcctcggtggtaagatcgatgaggatgacaaggagaccatccttgaagctgttaaggagacaactgactggctcgaggagaatgccgctaccgctaacaccgaggatttcgaggagcagaaagagaagttgtctggcgttgcctaccccatcacgtcgaagatgtacgcaggagctggtggcgagggtgccgatgatgacttcagccccgacgaccacgacgagttgtaa

SEQ ID NO: 27301 - protein, 668 aa, Muscodor strobelii
  misc_feature: SGI Peptide ID NO. 569350
  misc_feature (44)..(649): Pfam Id: PF00012 Pfam Desc: Hsp70 protein
  misc_feature (1)..(668): NCBI GI: 171682512 Blast Desc: protein product [Podospora anserina] gi|170941215|emb|CAP66865.1| protein product [Podospora anserina]
  misc_feature (1)..(668): NCBI GI: 154315635 Blast Desc: dnaK-type molecular chaperone BiP [Botryotinia fuckeliana B05.10] gi|150847330|gb|EDN22523.1| dnaK-type molecular chaperone BiP [Botryotinia fuckeliana B05.10]
  misc_feature (1)..(668): NCBI GI: 156060255 Blast Desc: SS1G_02266 [Sclerotinia sclerotiorum 1980] gi|154699674|gb|EDN99412.1| SS1G_02266 [Sclerotinia sclerotiorum 1980]
  misc_feature (1)..(668): NCBI GI: 116202643 Blast Desc: CHGG_09206 [Chaetomium globosum CBS 148.51] gi|88177724|gb|EAQ85192.1| CHGG_09206 [Chaetomium globosum CBS 148.51]
  misc_feature (1)..(668): NCBI GI: 85080590 Blast Desc: 78 kDa glucose-regulated protein precursor [Neurospora crassa OR74A] gi|45645170|sp|P78695.3|GRP78_NEUCR RecName: Full=78 kDa glucose-regulated protein homolog; AltName: Full=GRP
  misc_feature (9)..(668): NCBI GI: 39968821 Blast Desc: MGG_02503 [Magnaporthe grisea 70-15] gi|145013881|gb|EDJ98522.1| MGG_02503 [Magnaporthe grisea 70-15] gi|154816272|gb|ABS87375.1| Hsp70 [Magnaporthe oryzae]
  misc_feature (4)..(668): NCBI GI: 261359408 Blast Desc: hsp70-like protein [Verticillium albo-atrum VaMs.102]
  misc_feature (4)..(668): NCBI GI: 46135911 Blast Desc: GR78_NEUCR 78 KDA GLUCOSE-REGULATED PROTEIN HOMOLOG PRECURSOR (GRP 78) (IMMUNOGLOBULIN HEAVY CHAIN BINDING PROTEIN HOMOLOG) (BIP) [Gibberella zeae PH-1]
  misc_feature (1)..(668): NCBI GI: 2505906 Blast Desc: grp78 homologue [Neurospora crassa]
  misc_feature (16)..(668): NCBI GI: 242764265 Blast Desc: Hsp70 chaperone BiP/Kar2, [Talaromyces stipitatus ATCC 10500] gi|218723931|gb|EED23348.1| Hsp70 chaperone BiP/Kar2, [Talaromyces stipitatus ATCC 10500]
  misc_feature (86)..(471): SWISSPROT Homolog: EC 3.6.1.3 Adenosinetriphosphatase
  misc_feature: Useful for introducing or modulating the production of volatile compounds
MARRSQSYWAIAIGMIAWSLLLFSPLAFVSSVNAQDTEQEYGTVIGIDLGTTYSCVGVMQKGKVEILVNDQGNRITPSYVAFTEEERLVGDAAKTQAANNPFNTIFDVKRFIGRKWDEKSLQSDIKHFPYKVLEKEGKPVVQVDVQGSPKVFTPEEISAVILGKMKEVAESYLGKKVTHAVVTVPAYFNDNQRQATKDAGIIAGLNVLRIVNEPTAAAIAYGLDKTDAERHIIVYDLGGGTFDVSLLSIDQGVFEVLATAGDTHLGGEDFDQRIINYFAKSYNKKNSVDVTKDAKAMGKLKREAEKAKRTLSSQKTTRIEIEAFFEGKDFSETLSRAKFEELNMDLFKRTLKPVKQVLDDAKMNKDEIDDIVLVGGSTRIPKVQELLEEFFGGKKASKGINPDEAVAFGAAVQAGVLSGEEGTDEIVLMDVNPLTLGIETTGGVMTKLINRNTAIPTRKSQIFSTAADNQPVVLIQVFEGERSMTKDNNLLGKFELTNIPPAPRGVPQIEVSFELDANGILKVSAHDKGTGKTETITITNDKGRLTQEEIERMVAEAEKYAEEDKATRERIEARNGLENYAFNLKNQVNDEEGLGGKIDEDDKETILEAVKETTDWLEENAATANTEDFEEQKEKLSGVAYPITSKMYAGAGGEGADDDFSPDDHDEL

SEQ ID NO: 27302 - DNA, 2502 bp, Muscodor strobelii
  misc_feature: SGI EST ID NO. CUFF.64466.0
  misc_feature: Variant of the nucleotide sequence at SEQ ID NO 27300
tctggcttcttcggcgctcttagcacatataagaatttctccagccaaattcctgctggcgccttttttctacttctacccattccaaccctcacccacgggcatcaactaaccctccaccacaaccctcctagcctgtggtctaccagcaagtcgtcgccgtcgcggacgtctgttggctctgctttcacttatccgtcttgttttcttatcggctgcttttattgataccccgtctgtttccttgctcgtcccgagcccacacatttcaccatggcgagacgctctcagagctactgggccattgccatcggcatgatcgcctggagtcttcttctcttcagccctctcgccttcgtctccagcgtcaatgctcaggacacagagcaggaatacggtaccgtcatcggtattgatttgggaaccacatactcttgcgtcggtgtgatgcaaaagggcaaagtagaaatcctcgtaaacgaccaaggaaaccgtatcaccccctcatacgtcgccttcaccgaagaagaacggttagtcggagacgccgccaagacacaggctgccaacaacccattcaacaccatcttcgatgtcaagcgatttatcggccgaaaatgggacgagaagtcgctccagagcgacatcaagcacttcccctataaggtcctcgagaaagagggaaagcccgtcgtccaggtcgacgtccagggctcccccaaggtcttcacccctgaggaaatctctgccgttattctcggcaagatgaaggaggtcgccgagtcctacttgggcaagaaggtcacccacgccgtcgtcactgtccctgcctacttcaacgacaaccagagacaggccaccaaggacgctggcatcatcgccggtctgaacgttctgcgcattgtcaacgagcccactgcggctgctattgcctacggtctcgacaagaccgacgccgagcgccacatcattgtctacgatctcggtggtggtaccttcgatgtctcccttctgtccatcgaccagggtgttttcgaggtcttggctaccgctggtgacacccatctcggtggtgaggatttcgaccagagaatcatcaactacttcgccaagtcctacaacaagaagaacagcgtcgatgtcaccaaggacgccaaggccatgggtaagctgaagcgtgaggccgaaaaggccaagcgtactctctcttcccagaagaccacccgcattgagatcgaggccttcttcgagggcaaggacttctccgagactctgtcccgcgccaagttcgaggagctcaacatggatctcttcaagcgcactctcaagcctgtcaagcaggttctcgacgacgccaagatgaacaaggacgagattgatgacatcgttctcgtcggtggttccactcgtatccccaaggtccaggaacttctcgaggagttcttcggtggcaagaaggcttccaagggtattaaccccgatgaggctgttgcgttcggtgctgctgttcaggccggtgttctttccggcgaggagggtactgacgagatcgtccttatggatgtcaacccattgaccctgggtattgagactactggtggtgtcatgaccaagttgatcaaccgtaacactgccattcctactcgcaagagccagatcttctctaccgctgccgataaccagcccgtcgtcttgatccaggtcttcgaaggtgaacgatccatgaccaaggacaacaaccttctcggcaagttcgagctgaccaacattccccccgctcctcgtggtgttccccagatcgaagtctctttcgagctcgacgccaacggtatcctcaaggtttccgcccatgacaagggaactggcaagaccgagaccatcactatcaccaacgataagggccgtctcactcaagaggagatcgagcgcatggttgccgaggctgagaagtacgccgaggaggacaaggccactcgtgagcgcattgaggctcgcaacggtctagagaactacgccttcaacttgaagaaccaggtcaacgacgaggaaggcctcggtggtaagatcgatgaggatgacaaggagaccatccttgaagctgttaaggagacaactgactggctcgaggagaatgccgctaccgctaacaccgaggatttcgaggagcagaaagagaagttgtctggcgttgcctaccccatcacgtcgaagatgtacgcaggagctggtggcgagggtgccgatgatgacttcagccccgacgaccacgacgagttgtaatcgtagatcattattattagacggccttagtgtatttcttctagcataccccggcgcaaaatcaaaagaagttaaagtttatcatcctgccttatgctactgatcgatcttgaatttctagattgcaatctggtgacgtaccgcgcattgttgtatataatcactactacaccatataatactcttgcaacacctatgagattgtcaaagctacgactggct

SEQ ID NO: 27303 - DNA, 525 bp, Muscodor strobelii
  misc_feature: SGI cDNA ID NO. 569351
  misc_feature: Elevated expression when VOC is produced
  misc_feature: Encodes the peptide sequence at SEQ ID NO 27304
atgggagaggccagcaccgttgccttccggcgagatgagcctgacgccttcgccaagtatttcccacttgttgtctcctgtcccaaagagtccttccccgagcacgtctccttcaaggatctcttacccaaagttaaaggaaatacgggtatttcagacatcatcagcgatgctgagagttcacaaactacatctagcagcgaaagtttcatcgctgccggtgacctcatcgaccaacagaagggtcgcatgatcgaaagcattgttttagacttaactcggtcgcttaaacaacgtttcatcggagctcacaaagcagcagcaaaagaggcaagaccggaccaacagcatgagacagcttcgtcatcgacaccactactcaaagacgacacttctcagggcttaaagaacatctatatcggcggcatcgacaggctaaacacagatgcggccgctgctgggaaattttcggaagcgaagaaaatctactcgatcaccaaagagcaccggagccatgtcaagtag

SEQ ID NO: 27304 - protein, 174 aa, Muscodor strobelii
  misc_feature: SGI Peptide ID NO. 569351
  misc_feature: Useful for introducing or modulating the production of volatile compounds
MGEASTVAFRRDEPDAFAKYFPLVVSCPKESFPEHVSFKDLLPKVKGNTGISDIISDAESSQTTSSSESFIAAGDLIDQQKGRMIESIVLDLTRSLKQRFIGAHKAAAKEARPDQQHETASSSTPLLKDDTSQGLKNIYIGGIDRLNTDAAAAGKFSEAKKIYSITKEHRSHVK

SEQ ID NO: 27305 - DNA, 2414 bp, Muscodor strobelii
  misc_feature: SGI EST ID NO. CUFF.64432.0
  misc_feature: Variant of the nucleotide sequence at SEQ ID NO 27303
cacaacttccatgacatcaacgagggatttcgtaaagatatacacggacaacgcaacgtaacgcggttggatggctatttgaacataccgacgacggctaactcaaccagtatgagtgggcacgactcgacctcaactatcgcagataaaagcccacctgccgacgcagcggccacggccccagtcgcattacgcaacagtagcgatgttcctaagccgaaaagggtcgcctgtatgatatgtcagagaagaaagatgcgctgtgatgggattcagcctagttgcagcacatgcacaagactcggccattcatgtgtatacgacgaattgagaagaaagagaggcccgagccgtagttacgtggaggcgctagaagagcggttgaaacaagttgagatattgacgatgggagaggccagcaccgttgccttccggcgagatgagcctgtgattgcaaaagctgcaaatgatgcacccgatcgcacgcttgtctccccgaccatgtcttcccaggaacctctctctaggacgccttcgccaagtatttcccacttgttgtctcctgtcccaaagagtccttccccgagcacgtctccttcaaggatctcttacccaaaggtatcggacagctttgcgatccaatcagatgtatctcagtatgtctataagcatgacagtctccgaacgtcagttaaaggaaatacgggtatttcagacatcatcagcgatgctgagagttcacaaactacatctagcagcgaaagtttcatcgctgccggtgacctcatcgaccaacagaagggtcgcatgatcgaaagcattgttttagacttaactcggtcgcttaaacaacgtttcatcggagctcacaaagcagcagcaaaagaggcaagaccggaccaacagcatgagacagcttcgtcatcgacaccactactcaaagacgacacttctcagggcttaagtaatagtgtcgggaaaagaaaagccagtgaaagtcccgaggacgcaggtgctaacaacagcgatgacgatgctccagacccaaatcatcaaaaatcattagataaagaggggaaaggaaaggaacagcgtttcgcttgcccttattttaagtatcacccagccaagtaccaggcgtgggccatttgtcccggacccgggtggctagatgtacatcgagtcaaagaacatctatatcggcggcatcgacaggctaaacacagatgcggccgctgctgggaaattttcggaagcgaagaaaatctactcgatcaccaaagagcaccggagccatgtcaagtaggccaaaaggttccgctcgaaggctttgatgcaaatcaggaaagacaactcaagtcaaagaagaaaaccggtagtcgcatgactgaacccgagaggtggagatccatcttcaagatactgtttcctcacgtcctagcagatgacatcccttcaccgttttatgaacatgatgaacagtccagaacaaaaacccatgtaaacgaatctttgaatgaatgtgaacaatttattcttcgagaaatgcctcgtcgtttgcgagagtctcttgctcaaagactggacagagatttcctcatcgttgagcatagcctacgaaggcaagccatcgactcttatagctccatcatatcgtcattgtttcaggaattccgtaggtcacatctaggaaatgtcgatccagggaccactgcaacatcagaaccaagtacatctcagagcgcgaccgaaacaaggaacatgtatactcagccctcgtggatcgaatccttgaccgacccaatgagcctgagtattgactttgacttcgatttcccgcttgaggaaagtctgccattttttgaaagcgttcacctaagcgacatcccgccaccgtcgtctcgcaactttgacaagcaacagtcagattcagggtacggatctaacgctttagactatggggatggaaatctcgtcgaataaactagagatcattaggacggggggtaactatagtcctatgatattactccaaataataaaattactgctcccagtctttttctcactcgtataagagtttcttcaacttaggctactccatatcgtccatgcttcgattacattctatttcctctgcatatttctcctgcggtaagtttgcttcgcaatgatagaaatcccagatggctctggcacccttgagattgtcagtatccatgcctcttgcgccgagcaggcatttttcccccggcatctatcgcggtgtacctatagcgacgtgaaacctgcgtgtcagccgaaatttacgatggggactgcgttccaatcttcgcattctcggcactatacactcgcctttttccggcttaaaacaaacgcgctacatataggatggctagggtgcatctatt

SEQ ID NO: 27306 - DNA, 1962 bp, Muscodor strobelii
  misc_feature: SGI cDNA ID NO. 569352
  misc_feature: Reduced expression when VOC is produced
  misc_feature: Encodes the peptide sequence at SEQ ID NO 27307
atgatggacgacgataccaaggatggaatgtcgggggttcggaatccaggaactccctttcttaacaagactaggagtctgtccgacggcaacaattcccaactgtctccttctcctctgatcgtcgaggcctcgagacggacgtccaaagacgacagctcactgggaagagacaggaatcaggatgtccagacgcccgtcacgccacgccgtaacgagtttcccatgtcaggtctatcactacatatgccgccacaggggaacccgccggcgccgtcctcgccctacatgaggcccgcgcctctgtccccgaaactcgaccactcccagatctatgcctccccgaccaacatcctccctcggcgctcacgagggctggacttctcccgcgccgcaacaagcctacatcattccacactggctgaacaatcgtccccagacttgtcgcccacggtatcaggcgccatgggcagccgcgccatgaacataccaggccgagggaacggtgaatttggtgcagaacaatcatcaaattcgttatggtcagtaatgggaaatcaggagcgcatgaacatttctagctccgtgggcagcacaaaccccatagtatccgattcatcctctagttcaggcgacgaagacgtcatggacgaggagatggaggacgccatttacagcacgccgcaggtcgctaagagcaaccagtcgagccagggcatctcggccgttccctggctacccagtgggtcttctgccatcaacagcctttcgagctaccgcacgcgaccacggaagcgatctaagaggaggttgcgcgggttagcatctttagggttcaacgccgcgtccccagccaccctttctagatctcctcccagtaactccctgaaagatactagagatatcccaatgacgcacccacgacgggagagtatcagctgggctgccaatcaattgcacatatccggtagcgatattgacgaccgagccatggacggtgacgctacagcaactactcccagtagggatgggtccagggccgtagtgaagcgagcggtaactcggaggggcaatctatatcctaaaaccaaggggttcgcgcgcattcgtgcacagcttatggaagaaggcgctccgatcgatacggaagttcgccgggaagcagaagtcatacgccaagtgcgggaaagcgacgtcgacctcgaaccccgagtcgctccggcacgaccaactctacctctagacttatccaacatctctacaactccatcgcaatcacccaagctcaccaacactcaggaatccttgtccttggatgacatacccgatgacttgtcagagttcaaacaacaagcagtgaagaattccaagggcaacaagttttgggataccttctccgagaccggaagtatcaatggcacgaagacaacacccccacccgccagtctcatgcccaggggctcatcatcaggtatcagcgaagatattaatatggattcgccttctctctccaccggttccggaaatgcgacgctcttcaatcccggcgcgggattcacgctttcgggacagggcgatagccaaaaagcagatacaccgtcccaaaccgcatccgcaacaccatcccagggattgagcagcgtcccgcctacggcagcggagataactaggaagatcaacaacaaacgtaggagggaagatgatttcgatccacatagctttaaaagacgagctgtgagcccagggatgagtgtgcataattcaccagttatgcagagcccgctgcaacgcgacaatatgccctggggctcgagaccgggtagtaatcatggtggtgataaggccagtggcaccagcagcgagaatgggagtacgggaggtcatagagggagtaaggggagagttggatttcaaggcatggttgatactaatgacagtttgatgcgtatgagcattgagtag

SEQ ID NO: 27307 - protein, 653 aa, Muscodor strobelii
  misc_feature: SGI Peptide ID NO. 569352
  misc_feature (5)..(653): NCBI GI: 256727683 Blast Desc: NECHADRAFT_91265 [Nectria haematococca mpVI 77-13-4]
  misc_feature (1)..(653): NCBI GI: 46135931 Blast Desc: FG09481.1 [Gibberella zeae PH-1]
  misc_feature (7)..(653): NCBI GI: 145602370 Blast Desc: MGG_04971 [Magnaporthe grisea 70-15] gi|145010792|gb|EDJ95448.1| MGG_04971 [Magnaporthe grisea 70-15]
  misc_feature (23)..(653): NCBI GI: 154311871 Blast Desc: BC1G_05969 [Botryotinia fuckeliana B05.10] gi|150850619|gb|EDN25812.1| BC1G_05969 [Botryotinia fuckeliana B05.10]
  misc_feature (5)..(653): NCBI GI: 171681868 Blast Desc: protein product [Podospora anserina] gi|170940893|emb|CAP66543.1| protein product [Podospora anserina]
  misc_feature (23)..(653): NCBI GI: 156060531 Blast Desc: SS1G_02404 [Sclerotinia sclerotiorum 1980] gi|154699812|gb|EDN99550.1| SS1G_02404 [Sclerotinia sclerotiorum 1980]
  misc_feature (21)..(653): NCBI GI: 261359474 Blast Desc: conserved [Verticillium albo-atrum VaMs.102]
  misc_feature (23)..(525): NCBI GI: 116202061 Blast Desc: CHGG_08915 [Chaetomium globosum CBS 148.51] gi|88177433|gb|EAQ84901.1| CHGG_08915 [Chaetomium globosum CBS 148.51]
  misc_feature (99)..(653): NCBI GI: 85097111 Blast Desc: NCU04824 [Neurospora crassa OR74A] gi|28921873|gb|EAA31147.1| [Neurospora crassa OR74A]
  misc_feature (23)..(653): NCBI GI: 169772801 Blast Desc: [Aspergillus oryzae RIB40] gi|83768730|dbj|BAE58867.1| protein product [Aspergillus oryzae]
  misc_feature: Useful for introducing or modulating the production of volatile compounds
MMDDDTKDGMSGVRNPGTPFLNKTRSLSDGNNSQLSPSPLIVEASRRTSKDDSSLGRDRNQDVQTPVTPRRNEFPMSGLSLHMPPQGNPPAPSSPYMRPAPLSPKLDHSQIYASPTNILPRRSRGLDFSRAATSLHHSTLAEQSSPDLSPTVSGAMGSRAMNIPGRGNGEFGAEQSSNSLWSVMGNQERMNISSSVGSTNPIVSDSSSSSGDEDVMDEEMEDAIYSTPQVAKSNQSSQGISAVPWLPSGSSAINSLSSYRTRPRKRSKRRLRGLASLGFNAASPATLSRSPPSNSLKDTRDIPMTHPRRESISWAANQLHISGSDIDDRAMDGDATATTPSRDGSRAVVKRAVTRRGNLYPKTKGFARIRAQLMEEGAPIDTEVRREAEVIRQVRESDVDLEPRVAPARPTLPLDLSNISTTPSQSPKLTNTQESLSLDDIPDDLSEFKQQAVKNSKGNKFWDTFSETGSINGTKTTPPPASLMPRGSSSGISEDINMDSPSLSTGSGNATLFNPGAGFTLSGQGDSQKADTPSQTASATPSQGLSSVPPTAAEITRKINNKRRREDDFDPHSFKRRAVSPGMSVHNSPVMQSPLQRDNMPWGSRPGSNHGGDKASGTSSENGSTGGHRGSKGRVGFQGMVDTNDSLMRMSIE

SEQ ID NO: 27308 - DNA, 2899 bp, Muscodor strobelii
  misc_feature: SGI EST ID NO. CUFF.64444.0
  misc_feature: Variant of the nucleotide sequence at SEQ ID NO 27306
tggagccattcagatagtaggggtgaccaccaaaaagatatcgagccgcgcgctatgtgaaaacgcgtgggccgacgtcacaacccggcaatgtgcactcaacatcgatgtttcgaaacaccatgtaattcactattttcaactcataaattttgtcgccgcgggtatcacattgatacaatccgatgcccaaaactctctacggcactaactgaattcgttctggtaactccccttgaagctttgacggacggactagggacgtaggggagataggcacggtccaggccttagccactgccaccgcccgtttgatcagtcgaatcgataaatcataaagccgacgacctgtatctgacggatagccttttcattcttcctctttcgtgcattgacgcaacgatctcgacagctcatttaatcagatatctatgaaatacagaacgactatgcgcaagcggcaggtctgaatggcgacaccgatcgagaaagatgactttgccatgatggacgacgataccaaggatggaatgtcgggggttcggaatccaggaactccctttcttaacaagactaggagtctgtccgacggcaacaattcccaactgtctccttctcctctgatcgtcgaggcctcgagacggacgtccaaagacgacagctcactgggaagagacaggaatcaggatgtccagacgcccgtcacgccacgccgtaacgagtttcccatgtcaggtctatcactacatatgccgccacaggggaacccgccggcgccgtcctcgccctacatgaggcccgcgcctctgtccccgaaactcgaccactcccagatctatgcctccccgaccaacatcctccctcggcgctcacgagggctggacttctcccgcgccgcaacaagcctacatcattccacactggctgaacaatcgtccccagacttgtcgcccacggtatcaggcgccatgggcagccgcgccatgaacataccaggccgagggaacggtgaatttggtgcagaacaatcatcaaattcgttatggtcagtaatgggaaatcaggagcgcatgaacatttctagctccgtgggcagcacaaaccccatagtatccgattcatcctctagttcaggcgacgaagacgtcatggacgaggagatggaggacgccatttacagcacgccgcaggtcgctaagagcaaccagtcgagccagggcatctcggccgttccctggctacccagtgggtcttctgccatcaacagcctttcgagctaccgcacgcgaccacggaagcgatctaagaggaggttgcgcgggttagcatctttagggttcaacgccgcgtccccagccaccctttctagatctcctcccagtaactccctgaaagatactagagatatcccaatgacgcacccacgacgggagagtatcagctgggctgccaatcaattgcacatatccggtagcgatattgacgaccgagccatggacggtgacgctacagcaactactcccagtagggatgggtccagggccgtagtgaagcgagcggtaactcggaggggcaatctatatcctaaaaccaaggggttcgcgcgcattcgtgcacagcttatggaagaaggcgctccgatcgatacggaagttcgccgggaagcagaagtcatacgccaagtgcgggaaagcgacgtcgacctcgaaccccgagtcgctccggcacgaccaactctacctctagacttatccaacatctctacaactccatcgcaatcacccaagctcaccaacactcaggaatccttgtccttggatgacatacccgatgacttgtcagagttcaaacaacaagcagtgaagaattccaagggcaacaagttttgggataccttctccgagaccggaagtatcaatggcacgaagacaacacccccacccgccagtctcatgcccaggggctcatcatcaggtatcagcgaagatattaatatggattcgccttctctctccaccggttccggaaatgcgacgctcttcaatcccggcgcgggattcacgctttcgggacagggcgatagccaaaaagcagatacaccgtcccaaaccgcatccgcaacaccatcccagggattgagcagcgtcccgcctacggcagcggagataactaggaagatcaacaacaaacgtaggagggaagatgatttcgatccacatagctttaaaagacgagctgtgagcccagggatgagtgtgcataattcaccagttatgcagagcccgctgcaacgcgacaatatgccctggggctcgagaccgggtagtaatcatggtggtgataaggccagtggcaccagcagcgagaatgggagtacgggaggtcatagagggagtaaggggagagttggatttcaaggcatggttgatactaatgacagtttgatgcgtatgagcattgagtagtcggtagttgagcctgacttgagtcaagttggctgccgcgagctgcatggagggagagcattggtgtttgacttcgcttgccgtgtggcgaagagttcgtggaaatcctggcgctctttgtgcatatcctacatggagctgttgtacatgtcatgcatttgctctgctctgcttctaggatggaagcagcttttcggagtactagcataaaggagcgaggggataaagaacttatgagatatgaccatattcggctattgtcgatgctattaatagagtaatacttgattgtactatatttctcgagcttcaactatatttttttggcgatatttcaggaggtttgatactgattcctaggtggaaagatatcaacgtcggaccatagaatgcgctagcccacctaggtacctactcgtttgcctactaaatcc

SEQ ID NO: 27309 - DNA, 1095 bp, Muscodor strobelii
  misc_feature: SGI cDNA ID NO. 569353
  misc_feature: Encodes the peptide sequence at SEQ ID NO 27310
atgccgcggaaagtcatcatcttcacaggtgctcccgaatcgcatactcttaactgggccggtccaggactattgaaccactttctagaaccgcatgccaaatttgcaggacttctgactacaccagtaccatccgaaattgaagagcacagtactttatctccgccggatcaaattgtctggcgatctatacctttgcacagagagcgtctcgaaaccggttactctcagaaccatgcgttgccacaatcttaccaaggcacgccagatttctttacgaccttgtcgcaatcactcgacacgacgtctagtctgtcagatgacgagaccagccaacgatatctagatcaattctatgaccactccttggccatttaccaagacatagcgtcatctcagctgcctgctgcaagcttcagcaccgatggctcgtcacttgataccactagggatattacgactgatgtttctctatccgccgacgagactacactaagtactcgcaatgcaagaggcatcgaggtcagccacctaagcgatctcgaagacataccaaacgcaaggtaccttcaatccatcataccacagacaatgaccgtcaacttgatagttggcattatatcggtagccgagccacggaccgtgaagactcgctgggggtcgacacattcattagtcgaacttcttgtcggagacgacaccaagaccggctttagtttcaccttctggcttgcttcggatgcaaacgaagcgaacactctagtgcggaatctgcgcaggcaggacattgtgctactgcgcaatgtcgcgttgggtgttttcatgaagaaggtgcatggccactctctcagaaagggtcttacaaagattgatctgcttcacaggaggagagtggacaagcttgatcagggcgggcttcatagtatgaaagatgtgtcttcgacgagaagtgcacatccgcagctgatgaagacgagaaaagtgtgggaatggcttatcagctttgttggtgatggtgggacgacattgggtaaacgaaaagctgatggcaaatccattaggagatgggatcaaccaccaatagacacgcaatga

SEQ ID NO: 27310 - protein, 364 aa, Muscodor strobelii
  misc_feature: SGI Peptide ID NO. 569353
  misc_feature (1)..(364): NCBI GI: 39951319 Blast Desc: MGG_01302 [Magnaporthe grisea 70-15] gi|145020884|gb|EDK05013.1| MGG_01302 [Magnaporthe grisea 70-15]
  misc_feature (1)..(362): NCBI GI: 171682152 Blast Desc: protein product [Podospora anserina] gi|170941035|emb|CAP66685.1| protein product [Podospora anserina]
  misc_feature (1)..(364): NCBI GI: 85091230 Blast Desc: NCU05992 [Neurospora crassa OR74A] gi|28920186|gb|EAA29564.1| [Neurospora crassa OR74A]
  misc_feature (1)..(362): NCBI GI: 116202429 Blast Desc: CHGG_09099 [Chaetomium globosum CBS 148.51] gi|88177617|gb|EAQ85085.1| CHGG_09099 [Chaetomium globosum CBS 148.51]
  misc_feature (1)..(364): NCBI GI: 256733523 Blast Desc: NECHADRAFT_36670 [Nectria haematococca mpVI 77-13-4]
  misc_feature (1)..(364): NCBI GI: 154322575 Blast Desc: BC1G_00630 [Botryotinia fuckeliana B05.10] gi|150847964|gb|EDN23157.1| BC1G_00630 [Botryotinia fuckeliana B05.10]
  misc_feature (1)..(364): NCBI GI: 46128745 Blast Desc: FG08750.1 [Gibberella zeae PH-1]
  misc_feature (1)..(337): NCBI GI: 156064943 Blast Desc: SS1G_00481 [Sclerotinia sclerotiorum 1980] gi|154691341|gb|EDN91079.1| SS1G_00481 [Sclerotinia sclerotiorum 1980]
  misc_feature (1)..(364): NCBI GI: 261359494 Blast Desc: conserved [Verticillium albo-atrum VaMs.102]
  misc_feature (1)..(364): NCBI GI: 121708053 Blast Desc: conserved [Aspergillus clavatus NRRL 1] gi|119400162|gb|EAW10588.1| conserved [Aspergillus clavatus NRRL 1]
MPRKVIIFTGAPESHTLNWAGPGLLNHFLEPHAKFAGLLTTPVPSEIEEHSTLSPPDQIVWRSIPLHRERLETGYSQNHALPQSYQGTPDFFTTLSQSLDTTSSLSDDETSQRYLDQFYDHSLAIYQDIASSQLPAASFSTDGSSLDTTRDITTDVSLSADETTLSTRNARGIEVSHLSDLEDIPNARYLQSIIPQTMTVNLIVGIISVAEPRTVKTRWGSTHSLVELLVGDDTKTGFSFTFWLASDANEANTLVRNLRRQDIVLLRNVALGVFMKKVHGHSLRKGLTKIDLLHRRRVDKLDQGGLHSMKDVSSTRSAHPQLMKTRKVWEWLISFVGDGGTTLGKRKADGKSIRRWDQPPIDTQ

SEQ ID NO: 27311 - DNA, 1582 bp, Muscodor strobelii
  misc_feature: SGI EST ID NO. CUFF.64446.0
  misc_feature: Variant of the nucleotide sequence at SEQ ID NO 27309
cttgactaatatattaaattgttcatctacttaattagctacgtatacgtcttcattgctgttcttttcttgcttacgatcatcatgcttgccctttctggaatatctgtatcacgatgccgcggaaagtcatcatcttcacaggtgctcccgaatcgcatactcttaactgggccggtccaggactattgaaccactttctagaaccgcatgccaaatttgcaggacttctgactacaccagtaccatccgaaattgaagagcacagtactttatctccgccggatcaaattgtctggcgatctatacctttgcacagagagcgtctcgaaaccggttactctcagaaccatgcgttgccacaatcttaccaaggcacgccagatttctttacgaccttgtcgcaatcactcgacacgacgtctagtctgtcagatgacgagaccagccaacgatatctagatcaattctatgaccactccttggccatttaccaagacatagcgtcatctcagctgcctgctgcaagcttcagcaccgatggctcgtcacttgataccactagggatattacgactgatgtttctctatccgccgacgagactacactaagtactcgcaatgcaagaggcatcgaggtcagccacctaagcgatctcgaagacataccaaacgcaaggtaccttcaatccatcataccacagacaatgaccgtcaacttgatagttggcattatatcggtagccgagccacggaccgtgaagactcgctgggggtcgacacattcattagtcgaacttcttgtcggagacgacaccaagaccggctttagtttcaccttctggcttgcttcggatgcaaacgaagcgaacactctagtgcggaatctgcgcaggcaggacattgtgctactgcgcaatgtcgcgttgggtgttttcatgaagaaggtgcatggccactctctcagaaagggtcttacaaagattgatctgcttcacaggaggagagtggacaagcttgatcagggcgggcttcatagtatgaaagatgtgtcttcgacgagaagtgcacatccgcagctgatgaagacgagaaaagtgtgggaatggcttatcagctttgttggtgatggtgggacgacattgggtaaacgaaaagctgatggcaaatccattaggagatgggatcaaccaccaatagacacgcaatgacacatgagatacgcgatgagaacgccgagcatcgaaaatgctatagttttcgcatatatcgcctatgcagggattttagaatatgtttgcagaaaaacactatgattgtcaaaaataaaccttaagaatcccaaaagcccacagctcttccttccgtgtagatcgctcattcgtgccgagtaaactagattcaccaacattgacatgctgactataaggcgcaccaaatatagctccgagaatggatcgtagcttcattcatgggttgaacgtttggatacgaaagaggttgatagtccacttagtgatcctgaacagctcagaatgatacgaacatctcatacccgtatcgaggtctcaatcaaaccaac

SEQ ID NO: 27312 - DNA, 2226 bp, Muscodor strobelii
  misc_feature: SGI cDNA ID NO. 569354
  misc_feature: Encodes the peptide sequence at SEQ ID NO 27313
atgtcccaagagacgggactttggagcgtgcgccgacctcgagagaccctgggcagcatcggcctaaattcttccctcccacaacccgcgtcagccatgaagaggtccaactcatccaccggcaatgggggctcgtacggtgtcggcggccacgcccgctcaatgtcgggatctagacactccctcgcattgggtcgtccttctcagcctgtcttcgcgcgctcttcctccggtaccaacctcgccgacttgggcatgtcgtccgtcaagcgcacctccttccagaatccgcccggctctgcgctcaagagctttgcctcgagcaatctacccacgcgcaactccgaaagcaacaccaacgagcgacgaagcagcgtataccgcgcccattcttccaacagcgggcccatgagccatcagagcttcttccagcaagcaccgtcggccgccggcgtcgccaaggatccacgaccgctgaaggacagatcgttccaagcgaaaatcgggcaagagctgctcgagtacctgtcgcaacacaacttcgagatggagatgaagcacacattgtcgcataaggtcatgatctcgcctacgcaaaaggatttcaactacatgttccaatggctatatcatcgaatcgatcccagctaccgctttcaaaagaacatcgatcaagaagtgccgcccatcttaaaacagctgcgctatccttacgagaagagcattacgaaatctgccattgcggccgttggcgggcagaattggagtacattcttggggttgctgcattggatcatgcaattggctcagatgttggatggctatggatcgcatcgctacgacgacgcttgtgcggaggctggcatcgatgttagtggagaccacatcatcttcgatttcctgggtacggcctatagggattggctgaacatggaggaagatgcaacagacgaggatgccgagagaatgcttgcaccacacgtcgagggtatggcgaaagcgttcgaaagatccaattcgaaatacgcgacagagcttgaaatgcttgaggcggagaatgctcgactgttgaaagaaatcgaagaccttgagaaatcaacgccggatcctcaggtgttggacaacaacttcagaatcatggaggaggacaagacgaaattcgaagaatacaattctctggcgcagtcaaggattgacaaatacgaaacgcgcatagaagtcctgcaaaatgagctaaataagctaatggaagagctgaaggaggcagatgaggagcgtcgcaatttacaaaaagcagtggacgaccaagggattagcatgcaggatatcgaccgcatgacctcggagcgtgagagactgcagaagggcatcgaatcggccacgcaacgtctagacgaaggcaagaagcgagtagcagaaaaggagatggaagccagtcgcaagctggacgagctcgagagactcgtcgacaagtacaatactctggcatatcaaatcggtcttatccctgcgacagcggccaacgccaagggacaagagtatgagctcgccgtaacggtaaacgagtctgatttcaccgggtctatcatgaagggatcctactctggcggcgccagcaccgagcggttactagcagacccagtgacgggataccaaccagctcatatcctcaacctggacttgcggggacaagttaagaacagcttcctcgtgttaaagagcgatatttcagagcgaaggtcggaagcagcggacgcgatgatgaaagaccacgacctgctcgacggcattaaagaggccatcgaagacaagcgaaatgaggtcgaggcgctcgagcatagagtcagagctgcagaggaggaatacgataagacaaagcaggtcacgcagacgcagaagatggcttcggatgctcagattgagaagacggagaaccagcttgcgaatctgcgcgccgagctgtcggagagtgtgcagttgatggagcagaaggaggtcaatacgaatattcagtatgaacaactaacaatccaagccaatgccctacgcgaggaactccacactgaagtcgagaggatgttgaacgacgtgattaagttcaaagtacacatccagaagaacctagaagattatgaggagttcgcgagagacgaacttgtcaaggagctaggtggcgaggcgaaggacgatgatgaaaataccccagaggaagacatggaactatag

SEQ ID NO: 27313 - protein, 741 aa, Muscodor strobelii
  misc_feature: SGI Peptide ID NO. 569354
  misc_feature (74)..(289): Pfam Id: PF03801 Pfam Desc: HEC/Ndc80p family
  misc_feature (119)..(265): Pfam Id: PF03801 Pfam Desc: HEC/Ndc80p family
  misc_feature (1)..(731): NCBI GI: 256727735 Blast Desc: NECHADRAFT_33176 [Nectria haematococca mpVI 77-13-4]
  misc_feature (1)..(726): NCBI GI: 261359656 Blast Desc: HEC/Ndc80p family protein [Verticillium albo-atrum VaMs.102]
  misc_feature (1)..(731): NCBI GI: 46134245 Blast Desc: FG09262.1 [Gibberella zeae PH-1] gi|110815872|sp|Q4I0J6.1|NDC80_GIBZE RecName: Full= kinetochore protein NDC80
  misc_feature (1)..(739): NCBI GI: 74623236 Blast Desc: NDC80_NEUCR RecName: Full= kinetochore protein ndc-80 gi|16945423|emb|CAD11783.1| conserved [Neurospora crassa]
  misc_feature (1)..(726): NCBI GI: 39973653 Blast Desc: MGG_01027 [Magnaporthe grisea 70-15] gi|145018017|gb|EDK02296.1| MGG_01027 [Magnaporthe grisea 70-15]
  misc_feature (1)..(739): NCBI GI: 164426599 Blast Desc: NCU03899 [Neurospora crassa OR74A] gi|157071401|gb|EAA28302.2| NCU03899 [Neurospora crassa OR74A]
  misc_feature (71)..(731): NCBI GI: 116202565 Blast Desc: conserved [Chaetomium globosum CBS 148.51] gi|88177685|gb|EAQ85153.1| conserved [Chaetomium globosum CBS 148.51]
  misc_feature (1)..(733): NCBI GI: 154304027 Blast Desc: BC1G_09649 [Botryotinia fuckeliana B05.10] gi|150854284|gb|EDN29476.1| BC1G_09649 [Botryotinia fuckeliana B05.10]
  misc_feature (1)..(733): NCBI GI: 156030681 Blast Desc: SS1G_14436 [Sclerotinia sclerotiorum 1980] gi|154700827|gb|EDO00566.1| SS1G_14436 [Sclerotinia sclerotiorum 1980]
  misc_feature (9)..(731): NCBI GI: 171681978 Blast Desc: protein product [Podospora anserina] gi|170940948|emb|CAP66598.1| protein product [Podospora anserina]
MSQETGLWSVRRPRETLGSIGLNSSLPQPASAMKRSNSSTGNGGSYGVGGHARSMSGSRHSLALGRPSQPVFARSSSGTNLADLGMSSVKRTSFQNPPGSALKSFASSNLPTRNSESNTNERRSSVYRAHSSNSGPMSHQSFFQQAPSAAGVAKDPRPLKDRSFQAKIGQELLEYLSQHNFEMEMKHTLSHKVMISPTQKDFNYMFQWLYHRIDPSYRFQKNIDQEVPPILKQLRYPYEKSITKSAIAAVGGQNWSTFLGLLHWIMQLAQMLDGYGSHRYDDACAEAGIDVSGDHIIFDFLGTAYRDWLNMEEDATDEDAERMLAPHVEGMAKAFERSNSKYATELEMLEAENARLLKEIEDLEKSTPDPQVLDNNFRIMEEDKTKFEEYNSLAQSRIDKYETRIEVLQNELNKLMEELKEADEERRNLQKAVDDQGISMQDIDRMTSERERLQKGIESATQRLDEGKKRVAEKEMEASRKLDELERLVDKYNTLAYQIGLIPATAANAKGQEYELAVTVNESDFTGSIMKGSYSGGASTERLLADPVTGYQPAHILNLDLRGQVKNSFLVLKSDISERRSEAADAMMKDHDLLDGIKEAIEDKRNEVEALEHRVRAAEEEYDKTKQVTQTQKMASDAQIEKTENQLANLRAELSESVQLMEQKEVNTNIQYEQLTIQANALREELHTEVERMLNDVIKFKVHIQKNLEDYEEFARDELVKELGGEAKDDDENTPEEDMEL

SEQ ID NO: 27314 - DNA, 2762 bp, Muscodor strobelii
  misc_feature: SGI EST ID NO. CUFF.64449.0
  misc_feature: Variant of the nucleotide sequence at SEQ ID NO 27312
tgaaatgccaaagtgctgtgctggagtctcatagacaatcaaagtggcttgaatggcacttacccaataaggtcatctagaccccgcgctaaggcggaatgggacttaaaacagagtctaacagcggggatgcggttgttatggtgggggggtcgctaacccaatcacgcagttgaaactaccgggcttttgtttactttggtagattgggtcgacggcctcttggcaccacccgactatcaatatcgcatatcgctagcaaatactcggacatccaacatacacatacgactgctttcgcctgcaatcatcgatctttcgttttgtcttcgtcatcctgccattatgtcccaagagacgggactttggagcgtgcgccgacctcgagagaccctgggcagcatcggcctaaattcttccctcccacaacccgcgtcagccatgaagaggtccaactcatccaccggcaatgggggctcgtacggtgtcggcggccacgcccgctcaatgtcgggatctagacactccctcgcattgggtcgtccttctcagcctgtcttcgcgcgctcttcctccggtaccaacctcgccgacttgggcatgtcgtccgtcaagcgcacctccttccagaatccgcccggctctgcgctcaagagctttgcctcgagcaatctacccacgcgcaactccgaaagcaacaccaacgagcgacgaagcagcgtataccgcgcccattcttccaacagcgggcccatgagccatcagagcttcttccagcaagcaccgtcggccgccggcgtcgccaaggatccacgaccgctgaaggacagatcgttccaagcgaaaatcgggcaagagctgctcgagtacctgtcgcaacacaacttcgagatggagatgaagcacacattgtcgcataaggtcatgatctcgcctacgcaaaaggatttcaactacatgttccaatggctatatcatcgaatcgatcccagctaccgctttcaaaagaacatcgatcaagaagtgccgcccatcttaaaacagctgcgctatccttacgagaagagcattacgaaatctgccattgcggccgttggcgggcagaattggagtacattcttggggttgctgcattggatcatgcaattggctcagatgttggatggctatggatcgcatcgctacgacgacgcttgtgcggaggctggcatcgatgttagtggagaccacatcatcttcgatttcctgggtacggcctatagggattggctgaacatggaggaagatgcaacagacgaggatgccgagagaatgcttgcaccacacgtcgagggtatggcgaaagcgttcgaaagatccaattcgaaatacgcgacagagcttgaaatgcttgaggcggagaatgctcgactgttgaaagaaatcgaagaccttgagaaatcaacgccggatcctcaggtgttggacaacaacttcagaatcatggaggaggacaagacgaaattcgaagaatacaattctctggcgcagtcaaggattgacaaatacgaaacgcgcatagaagtcctgcaaaatgagctaaataagctaatggaagagctgaaggaggcagatgaggagcgtcgcaatttacaaaaagcagtggacgaccaagggattagcatgcaggatatcgaccgcatgacctcggagcgtgagagactgcagaagggcatcgaatcggccacgcaacgtctagacgaaggcaagaagcgagtagcagaaaaggagatggaagccagtcgcaagctggacgagctcgagagactcgtcgacaagtacaatactctggcatatcaaatcggtcttatccctgcgacagcggccaacgccaagggacaagagtatgagctcgccgtaacggtaaacgagtctgatttcaccgggtctatcatgaagggatcctactctggcggcgccagcaccgagcggttactagcagacccagtgacgggataccaaccagctcatatcctcaacctggacttgcggggacaagttaagaacagcttcctcgtgttaaagagcgatatttcagagcgaaggtcggaagcagcggacgcgatgatgaaagaccacgacctgctcgacggcattaaagaggccatcgaagacaagcgaaatgaggtcgaggcgctcgagcatagagtcagagctgcagaggaggaatacgataagacaaagcaggtcacgcagacgcagaagatggcttcggatgctcagattgagaagacggagaaccagcttgcgaatctgcgcgccgagctgtcggagagtgtgcagttgatggagcagaaggaggtcaatacgaatattcagtatgaacaactaacaatccaagccaatgccctacgcgaggaactccacactgaagtcgagaggatgttgaacgacgtgattaagttcaaagtacacatccagaagaacctagaagattatgaggagttcgcgagagacgaacttgtcaaggagctaggtggcgaggcgaaggacgatgatgaaaataccccagaggaagacatggaactatagtgcattgagtgcttaaagtggtgtgagatggagttcggagcgggttatgatgactgtaggattgctttgggtggaaggattgagtgtttgtaattgccctgcgtgttggcttgactatggtttggctcgagatacctacatgaaattgctgtcttcaaatttttgatcccccacgttgtacggattaggcg

SEQ ID NO: 27315 - DNA, 510 bp, Muscodor strobelii
  misc_feature: SGI cDNA ID NO. 569355
  misc_feature: Elevated expression when VOC is produced
  misc_feature: Encodes the peptide sequence at SEQ ID NO 27316
atggcgacctcccccccaatccccaccccagcccaacaaccacaatctacccccgtattcgaatacccacgagtatactccttcccagcattcttcacacggcaagaaaacctcaacacgcggtacgcacaagactgtaaatgggccgccctaatccaatcctactgcgccttccaccgaatcttccgactctccctgggcacttcccacacctccaaccaatcctcccaaccgtcaactatcccctccacctcgcaaacttcgacttcgactaccgcagcggaagacatattccacaaccgtaaactaaaccaagcttatgttgaggatacggcgcagaagggcgctgttcttacgctttatgagattgttaatgcggaggggggacggggtagcgaattccatggacttgacacggagatcttgcagaaagccctacaagtcctcgtcaagcgcggcaaagcccagatcttcggtcaagatgaccaactaggtgtcaagttcttttga

SEQ ID NO: 27316 - protein, 169 aa, Muscodor strobelii
  misc_feature: SGI Peptide ID NO. 569355
  misc_feature (20)..(169): Pfam Id: PF05871 Pfam Desc: ESCRT-II complex subunit
  misc_feature (106)..(169): Pfam Id: PF05871 Pfam Desc: ESCRT-II complex subunit
  misc_feature (20)..(66): Pfam Id: PF05871 Pfam Desc: ESCRT-II complex subunit
  misc_feature (9)..(169): NCBI GI: 154314201 Blast Desc: BC1G_05194 [Botryotinia fuckeliana B05.10] gi|150848839|gb|EDN24032.1| BC1G_05194 [Botryotinia fuckeliana B05.10]
  misc_feature (3)..(169): NCBI GI: 156036034 Blast Desc: SS1G_12703 [Sclerotinia sclerotiorum 1980] gi|154698111|gb|EDN97849.1| SS1G_12703 [Sclerotinia sclerotiorum 1980]
  misc_feature (14)..(169): NCBI GI: 39973645 Blast Desc: MGG_01031 [Magnaporthe grisea 70-15] gi|145018013|gb|EDK02292.1| MGG_01031 [Magnaporthe grisea 70-15]
  misc_feature (9)..(169): NCBI GI: 242768942 Blast Desc: ESCRT-II complex component (Vps25), [Talaromyces stipitatus ATCC 10500] gi|218724865|gb|EED24282.1| ESCRT-II complex component (Vps25), [Talaromyces stipitatus ATCC 10500]
  misc_feature (20)..(169): NCBI GI: 256734052 Blast Desc: NECHADRAFT_67376 [Nectria haematococca mpVI 77-13-4]
  misc_feature (8)..(169): NCBI GI: 225558897 Blast Desc: DUF852 domain-containing protein [Ajellomyces capsulatus G186AR]
  misc_feature (1)..(169): NCBI GI: 240109911 Blast Desc: vacuolar protein-sorting-associated protein, [Coccidioides posadasii C735 delta SOWgp]
  misc_feature (20)..(169): NCBI GI: 212542449 Blast Desc: ESCRT-II complex component (Vps25), [Penicillium marneffei ATCC 18224] gi|210066286|gb|EEA20379.1| ESCRT-II complex component (Vps25), [Penicillium marneffei ATCC 18224]
  misc_feature (16)..(169): NCBI GI: 154275352 Blast Desc: conserved [Ajellomyces capsulatus NAm1] gi|150414967|gb|EDN10329.1| conserved [Ajellomyces capsulatus NAm1]
  misc_feature (20)..(169): NCBI GI: 225679713 Blast Desc: vacuolar protein-sorting-associated protein [Paracoccidioides brasiliensis Pb03]
  misc_feature: Useful for introducing or modulating the production of volatile compounds
MATSPPIPTPAQQPQSTPVFEYPRVYSFPAFFTRQENLNTRYAQDCKWAALIQSYCAFHRIFRLSLGTSHTSNQSSQPSTIPSTSQTSTSTTAAEDIFHNRKLNQAYVEDTAQKGAVLTLYEIVNAEGGRGSEFHGLDTEILQKALQVLVKRGKAQIFGQDDQLGVKFF

SEQ ID NO: 27317 - DNA, 3032 bp, Muscodor strobelii
  misc_feature: SGI EST ID NO. CUFF.64499.0
  misc_feature: Variant of the nucleotide sequence at SEQ ID NO 27315
ctcaacctcaaccttaacccacttctatcccccttcgccaaactcccaaacaaccaaccattcctcaacccctccaaaatggcgacctcccccccaatccccaccccagcccaacaaccacaatctacccccgtattcgaatacccacgagtatactccttcccagcattcttcacacggcaagaaaacctcaacacgcggtacgcacaagactgtaaatgggccgccctaatccaatcctactgcgccttccaccgaatcttccgactctccctgggcacttcccacacctccaaccaatcctcccaaccgtcaactatcccctccacctcgcaaacttcgacttcgactaccgcagcggaagacatattccacaaccgtaaactaaaccgtcgactctcaccctctgacgctagagaggtgcttgaacatatgcggaaggagggaagggctgatgttgtgggaggaggaggaaaggggggcaggaggaggaggggatggtggggatgtttggtatatttattggaggacgccggaggaatgggctagtttgctagaagcttatgttgaggatacggcgcagaagggcgctgttcttacgctttatgagattgttaatgcggaggggggacggggtagcgaattccatggacttgacacggagatcttgcagaaagccctacaagtcctcgtcaagcgcggcaaagcccagatcttcggtcaagatgaccaactaggtgtcaagttcttttgatcgtatctcgtcaaatcgacaagtctatcatgtccatcaacatctcgacaaccatacgacgactcgcctcaaaattatgtacagcaacaggggtgaagggcgtgtgtggtgtgtaacaagtacatgtcctcgcggatattaatccactcgctcaaagatcggcgaaaggtagcaagggaccagcgacaggcccatctagtttataaagaagttcgtaacgagatacttcttatcaaaactgacctcttgcttcatcacaacgtccaacaaccagtccgaggctacaacacggggttccatgttgccctttctcgccatgtcctcaaacctcttccacagcttcttctcctcggggctactcgtgctgagtaagtagactgggtccggaccaccctcatcttcctcgggtctcgttggcttgattgtcgacccgcttcttgggccgtagactaggaacatggcaccgttggcctcagcaatggcctgatagctgtcgaatccgtttttgatcatcgatgtgcagtagatggggacaccccagagaagcctccctttgttattctgtgcacgctggatggaggtctcgagtttgagtccaaagcgcttctcgttgtctctgtctttcaaaatgtagtcatctatgtcgggaacctctttgtggtccagacaatcctcgatccatgtcgaggacagaactacagcacccttggacaggttacgcagaaatttgacggtgcggacaagctgtggtgcgattagatagtcgcagggctggccgtctgcaactacggcaatacccatgtcgcgtagttttttctgatacccagatattagccaaatacaaccataacaagttccgtagtcaggatcagatcttaccctatccgcatcttccttatgcttgtcgtttacccaacgtttgaaccccgtcaatatcaccctcctctctacttccggcagtgacggtctggccctcttcgcgggtctcttttcacccttgtcatcgccggcagctggactagaggcttgccgtcgattcaagtgctctcgttcaatctgatcagcggctcgtttcccaccccaaggctgaccttctttcaggcctctcttcttttctttctcgtacagctggatatctggcgccagattcgacagtctccccagtgccttgtcctttgcgcttcgacctgatgaaggaacagtggacggcgtagcattctccttacccgatcgaacatgtcgtgccggtgttgcgcagtgggtcttgggtggtgcgggaaccccaaagacatccgctgttttctccctgtagtcgtcgtccgtgtccttcataacattgaattccttcctcgcttgtcttccgatgatagctccctgggctggaccatccacaaacgagttttcgtcggcgatctcgagggctttgcgtttacgcactgaactagcggtaggcttcgctgggctaccggggaaataagtatcttgaagccttttctcatcgaagaatgtctgtccgatgatctcgcctaagtttgtgcggggcgggaaatgtatgtatttagcaattgttattgactgtgctgcgcagcgagcgtacgattcctcgatccacagatgattgaccatgtgtacgttccagtccctcgccgcagcgcacttctcgctgttatctcgcgccgtgatgagatgtgtattgtcgttcttcatattcttcgtgaactctgcacccgcggatttgaccaggttctcgagatagatacgggcttcgcctccatagtttgatacgcaaatacgcatgtccctaaatccaggaatgccttcgcgaggctcgggataatgaaggagacggtggaggggattggaccattggttttgctgaatgaggaagaagagccaggacatgttgcctacggtcttatccagttgggaagctaagacgtaatctgcaccatcgcgatatcggcatacgaagtaatcgcaatcacgaggatcgttggtcatttggccacctcctttcacgacaagactctcgatgattctctgcagtcggtccctcatattgagatcggctgagatcatgattttcttttcctggaatacagtgaggcgcaattccgtgccctcaacatcttcactgaggggcgccatatagtctggtcttgctgagaccgcaccctccaagtcgggactgggcgccttgataggctgctctgggggtacgcgcagaatctcgggatctgggagcaggtagggtcgttcactgattctcttgccaagc

SEQ ID NO: 27318 - DNA, 2475 bp, Muscodor strobelii
  misc_feature: SGI cDNA ID NO. 569357
  misc_feature: Encodes the peptide sequence at SEQ ID NO 27319
atgcatttcttcagaaggtcctcgtcgtgggcacctattgcattggctctggctaatgtcatcggtgccgacttcgtccctgtgctatatgccgtgggaggcaatgccacggacgaaggactgacagcatatactggccagtcaattactctagactccacgacttctgtgctcacactggactattcagctgaggtagaggggtttccttacatagaggtcgaagcgcctgggaccgaggtccaggtagcattgaaattcagtgagccgtatggcggtctttcaatgccttatggcgatggaccttatctctttgtagacggattggcggatggcttccgaacagtaacatttaacttcacaacacaagatcgaatcgaagctttcgtagcccagggcggatttagatggcagtctatagttctgttgagtgacggtcctcttacaattactggcgtcggtcttcgaccactagtcgagatcaaggactcgagtgatctcactggaaacttcacgacttcaaacaccctgttcgatcaaatatggagtctcggtgctcgtgttgtgcaagctgcatgttacgaagctggtactctagcgtccacttggcagatcactgaccaaggcgctctcatcccgggacaatacccggcagtctctgccttgggaggtggttggtccgattatacgttgacattttcgactaagatcactcaaggaggcactggatggcgagtagctggtggtattatgggaggctacggcccatatttcgtccttacagcgagcgaagccgacctagggagcgacggtgctttatccctagagcgcaattctttagtcgcgggctatgggttcagcttcgtaaaccagattcttctcccttccgctacaccgacgactatccccgtcgatatgccgattcatttgggtgaatggcacacgatcaccaccgtcatcaactccacaggctatctcgtgtctatagacggcacagaaattgcttttgttgaaagcagcggctatcaaggctacgtcaacggaggatggggctcaaacagtttgacaactggaacttttggattcgggccttggctcaaccaggaagcctatgtcaccaacgtcactgtaactgattccgacgggactatgctttaccaaaacgatatgacatcgaatgataccctgggagaatactcgattgatacaaactcatacaatgtttgcctcgatggtgcaaaacgcgaccgctcagtatggattggagacttcgtacacactgcgcgtatcctcgccaccagcacgggaggttatgatatggtaaagggcatgattgatttcgaatttgccaaccaagtcagcgaaggtgacggagttggtatagtaccaatctcggcatatgctggctccaagccagcatacagaaacaacggtgcagtctggcccggagcactcggcgaggcggactaccaattcctctttttgctattacttggcgattacttcgcccagacttcggacgtggatggcttgaaggcacattggtccgagatagatcgcttagtcacgaagaccgttggcagatggctagatcccgtatcaggtttacttgccaactcagaggcatcatggttcctggcccaaggacaacagaacgcaacagcacctacggctttactcgcagcagcattcacaaagctgtcacaagttgccacagtcattggtgaccctgacaaagctacaacttatgcctcatatgccaccaacttcagcaccgccatcaactcccaagtctggtccgactccctaggaagctactctaattctctcagcgacgtatccacaggctctatcaacgcaatctcattcacgatcatagccggaatcgcggacgtcgaaaaggcgacgaaatccatccaaacactagacaacttcctcgtgaatatcggctacaaagatctcacatcccaagcttcaagcagctcgacacagttgtcgcccaatacccaaggcttccttctcgatgcactcttccttgcgcacctgaatcttggcgtctccgcagacgtagtgctccctgcaatcgacacgatgctgaacaaattctggtccggcatggtaaaccagaatgagtactacaccggcacaagttgggaatatatgcttgccgatggctccccctgggcgtttcccttcgacagtctagggcatccttggggcggtgcgcctacatacgtcctctctaactacatcctcggtgtcagatcagaatggaatcagacgacttcgtcgttccaatgggtgtttgacccagcttgggaaattgctgaaggtttgaacttgacgcaggctagtggtaggatgccgctgtctagtggtggttatatcgaagcgtcgtggtcgctcccaaataccatgagcagccaggtccttgataatgatcagatcacagttttgacgaggccacggtcgtag

SEQ ID NO: 27319 - protein, 824 aa, Muscodor strobelii
  misc_feature: SGI Peptide ID NO. 569357
  misc_feature (27)..(805): NCBI GI: 145246772 Blast Desc: An12g05700 [Aspergillus niger] gi|134080356|emb|CAK46278.1| protein product [Aspergillus niger]
  misc_feature (57)..(719): NCBI GI: 189211929 Blast Desc: conserved [Pyrenophora tritici-repentis Pt-1C-BFP] gi|187979491|gb|EDU46117.1| conserved [Pyrenophora tritici-repentis Pt-1C-BFP]
  misc_feature (34)..(802): NCBI GI: 154295564 Blast Desc: BC1G_13407 [Botryotinia fuckeliana B05.10] gi|150844033|gb|EDN19226.1| BC1G_13407 [Botryotinia fuckeliana B05.10]
  misc_feature (25)..(802): NCBI GI: 46139311 Blast Desc: FG11170.1 [Gibberella zeae PH-1]
  misc_feature (17)..(793): NCBI GI: 145608960 Blast Desc: MGG_12880 [Magnaporthe grisea 70-15] gi|145016378|gb|EDK00868.1| MGG_12880 [Magnaporthe grisea 70-15]
  misc_feature (57)..(800): NCBI GI: 262094927 Blast Desc: glycoside hydrolase, [Phytophthora infestans T30-4]
  misc_feature (340)..(756): NCBI GI: 169767744 Blast Desc: [Aspergillus oryzae RIB40] gi|83766198|dbj|BAE56341.1| protein product [Aspergillus oryzae]
  misc_feature (25)..(721): NCBI GI: 262103406 Blast Desc: glycoside hydrolase, [Phytophthora infestans T30-4]
  misc_feature (44)..(802): NCBI GI: 115397351 Blast Desc: conserved [Aspergillus terreus NIH2624] gi|114192458|gb|EAU34158.1| conserved [Aspergillus terreus NIH2624]
  misc_feature (44)..(802): NCBI GI: 159128247 Blast Desc: alpha-L-rhamnosidase C, [Aspergillus fumigatus A1163]
MHFFRRSSSWAPIALALANVIGADFVPVLYAVGGNATDEGLTAYTGQSITLDSTTSVLTLDYSAEVEGFPYIEVEAPGTEVQVALKFSEPYGGLSMPYGDGPYLFVDGLADGFRTVTFNFTTQDRIEAFVAQGGFRWQSIVLLSDGPLTITGVGLRPLVEIKDSSDLTGNFTTSNTLFDQIWSLGARVVQAACYEAGTLASTWQITDQGALIPGQYPAVSALGGGWSDYTLTFSTKITQGGTGWRVAGGIMGGYGPYFVLTASEADLGSDGALSLERNSLVAGYGFSFVNQILLPSATPTTIPVDMPIHLGEWHTITTVINSTGYLVSIDGTEIAFVESSGYQGYVNGGWGSNSLTTGTFGFGPWLNQEAYVTNVTVTDSDGTMLYQNDMTSNDTLGEYSIDTNSYNVCLDGAKRDRSVWIGDFVHTARILATSTGGYDMVKGMIDFEFANQVSEGDGVGIVPISAYAGSKPAYRNNGAVWPGALGEADYQFLFLLLLGDYFAQTSDVDGLKAHWSEIDRLVTKTVGRWLDPVSGLLANSEASWFLAQGQQNATAPTALLAAAFTKLSQVATVIGDPDKATTYASYATNFSTAINSQVWSDSLGSYSNSLSDVSTGSINAISFTIIAGIADVEKATKSIQTLDNFLVNIGYKDLTSQASSSSTQLSPNTQGFLLDALFLAHLNLGVSADVVLPAIDTMLNKFWSGMVNQNEYYTGTSWEYMLADGSPWAFPFDSLGHPWGGAPTYVLSNYILGVRSEWNQTTSSFQWVFDPAWEIAEGLNLTQASGRMPLSSGGYIEASWSLPNTMSSQVLDNDQITVLTRPRS

SEQ ID NO: 27320 - DNA, 4127 bp, Muscodor strobelii
  misc_feature: SGI EST ID NO. CUFF.64460.0
  misc_feature: Variant of the nucleotide sequence at SEQ ID NO 27318
ccgagtccgggacttgctgagccgatctcctcctcaaaatgacgatttatcgttacttcagtctgtggtttgcggggaaggggaggtgcttaccagaaagagtaggtcctcgatctcactcagcgtcacgtagaccttgtaaggcacgtgcaaacctggacaacgagcaacaaagctgagttttgtatgtgcgatgatgtggctgtcaaggaccaacatcccttgacttactcaccttgataagctaactgggtaccatcgtaccactaccacagcgacgacaggacccgagttcttcggtgttaagttaccaaatatctaggacttttgacaacgagaatctcattcgatttgttggattgcggaatttgcccataatggacctaattactatcattacgtcgcatgcacatcgcctgacagccgtttgccgcagaccttcaggcatggagcgcattagcttatgacgatcccttccagctacccgttcctccgcaaaaccatttcggttcctactcgaccgagatgtcaggactatcaaaggaagagctagaaggcaaaaagaacatagatgagtttgtcatatcgcaatacgtatgattaggagtctaggaattaatcccagggtctgacacttttcaccaagacccgtcatgcatttcttcagaaggtcctcgtcgtgggcacctattgcattggctctggctaatgtcatcggtgccgacttcgtccctgtgctatatgccgtgggaggcaatgccacggacgaaggactgacagcatatactggccagtcaattactctagactccacgacttctgtgctcacactggactattcagctgaggtagaggggtttccttacatagaggtcgaagcgcctgggaccgaggtccaggtagcattgaaattcagtgagccgtatggcggtctttcaatgccttatggcgatggaccttatctctttgtagacggattggcggatggcttccgaacagtaacatttaacttcacaacacaagatcgaatcgaagctttcgtagcccagggcggatttagatggcagtctatagttctgttgagtgacggtcctcttacaattactggcgtcggtcttcgaccactagtcgagatcaaggactcgagtgatctcactggaaacttcacgacttcaaacaccctgttcgatcaaatatggagtctcggtgctcgtgttgtgcaagctgcatgttacgaagctggtactctagcgtccacttggcagatcactgaccaaggcgctctcatcccgggacaatacccggcagtctctgccttgggaggtggttggtccgattatacgttgacattttcgactaagatcactcaaggaggcactggatggcgagtagctggtggtattatgggaggctacggcccatatttcgtccttacagcgagcgaagccgacctagggagcgacggtgctttatccctagagcgcaattctttagtcgcgggctatgggttcagcttcgtaaaccagattcttctcccttccgctacaccgacgactatccccgtcgatatgccgattcatttgggtgaatggcacacgatcaccaccgtcatcaactccacaggctatctcgtgtctatagacggcacagaaattgcttttgttgaaagcagcggctatcaaggctacgtcaacggaggatggggctcaaacagtttgacaactggaacttttggattcgggccttggctcaaccaggaagcctatgtcaccaacgtcactgtaactgattccgacgggactatgctttaccaaaacgatatgacatcgaatgataccctgggagaatactcgattgatacaaactcatacaatgtttgcctcgatggtgcaaaacgcgaccgctcagtatggattggagacttcgtacacactgcgcgtatcctcgccaccagcacgggaggttatgatatggtaaagggcatgattgatttcgaatttgccaaccaagtcagcgaaggtgacggagttggtatagtaccaatctcggcatatgctggctccaagccagcatacagaaacaacggtgcagtctggcccggagcactcggcgaggcggactaccaattcctctttttgctattacttggcgattacttcgcccagacttcggacgtggatggcttgaaggcacattggtccgagatagatcgcttagtcacgaagaccgttggcagatggctagatcccgtatcaggtttacttgccaactcagaggcatcatggttcctggcccaaggacaacagaacgcaacagcacctacggctttactcgcagcagcattcacaaagctgtcacaagttgccacagtcattggtgaccctgacaaagctacaacttatgcctcatatgccaccaacttcagcaccgccatcaactcccaagtctggtccgactccctaggaagctactctaattctctcagcgacgtatccacaggctctatcaacgcaatctcattcacgatcatagccggaatcgcggacgtcgaaaaggcgacgaaatccatccaaacactagacaacttcctcgtgaatatcggctacaaagatctcacatcccaagcttcaagcagctcgacacagttgtcgcccaatacccaaggcttccttctcgatgcactcttccttgcgcacctgaatcttggcgtctccgcagacgtagtgctccctgcaatcgacacgatgctgaacaaattctggtccggcatggtaaaccagaatgagtactacaccggcacaagttgggaatatatgcttgccgatggctccccctgggcgtttcccttcgacagtctagggcatccttggggcggtgcgcctacatacgtcctctctaactacatcctcggtgtcagatcagaatggaatcagacgacttcgtcgttccaatgggtgtttgacccagcttgggaaattgctgaaggtttgaacttgacgcaggctagtggtaggatgccgctgtctagtggtggttatatcgaagcgtcgtggtcgctcccaaataccatgagcagccaggtccttgataatgatcagatcacagttttgacgaggccacggtcgtagaagcatttattcactgcaatactgagtgttgggcgatatgtaaatagaacatgattgaagaagaaaaaataattatctactaaacctatcccaactcctcttcaagtgcatgcatgtttgcacaggtgtcacatcatgttcatacttgtgactttggccccgaatcatttaaataggtgtacacagctgccattttgcacgtacaggtcgtagttgggcaatattccggctgaaactgaagtatgtagagttcaataattgcaatattcacgaaacctcgagcgatcggtctcttctggaccagctaatcgagccatgcctctgctgtaaattacctacatgtaggtaagccgctgtcatcagcgtcggttagctgcattgatgatgactgcccagtattccgcggtcttggttccgcaatttttgacttcgttattttatatatttgcaccatttgtgcagtagactatgctgattccattcctttgtttttaaatttttgccagcactttggatggagatgcatgcgattaagagtcgaggaattgaggaagttttcaactgtgttgctatggtgggtgagatggatggtgttgctgtgaataatccattgcaaccatcagcatcaccaacaccccgtggtctaaccgtgctttcattcactcgccatccgtactttgagacatccacatccttagtgaaggagcgaattgataatacaatttctcaccactacaagtgagcgattaatcaagccaagagattaatgatcattgatcaaaaggtcagggattgtcaacgaggggcgtggtcatctaggtgacgatgatggcacgcaaccatgagagtcttaacgcctttgttgttcctcttgtgagtcattggaggttggagatggatgaagaaagtgcacaatgactcttcaaatagccgcggccgtttaacgttcgtcatacgtgaggaggcatatgtgagtcaactcagtcaatcggaacatca

SEQ ID NO: 27321 - DNA, 1158 bp, Muscodor strobelii
  misc_feature: SGI cDNA ID NO. 569358
  misc_feature: Encodes the peptide sequence at SEQ ID NO 27322
atggcgccaatccgcatagcaataatcggcctctcctcatccgcaaaaaccgggtgggcagcgaacgctcactttccctacctcctttcatccctcggccgctcaaaatacacaatagtagcactttgcaactccagcgtctcctccgcgcaagcagccatcaaagcatacaacctccccgcaagcacaaaagcttgcggagatcctgtcgaattagcgggagatgaggagattgatcttgtcgtctgctgcacgagggtcgatacacattatgagttgaccaggccgagtgtggagagggggaagaatgtgtttgtggagtggccgctgacgcatgagctggggaaaagtgaggaattggcggcgttggtgaaggagagggggtcgaagagtatggttggacatcagggaaggcttgcgcctgttgttgtgaagatgagggagttggttgagagtgggaagtgggggaaggttcttagttctgaggttaggggatttggtgggacgggtgaccgagagactatcggtgaaggcttgaagtattttgcggatcggaagattggcgggaatgtttttatgattgggtttgcgcatttatggaataccgtgcaagacgtcgttggagacgtaacagagttgaaatcacatatacaactccaacgccctactatgaaactccgcgacgcatccgggaagatagtcggaaccacaccaacagatgttcctgatctaatgatcgtcagcgggtccctcaactcctctgcgtacgcgcaaaaaggcgccagcctttcagtgcgctaccgtcgaggccagccgttcaaaggcgagccagcgctaacatggcacatcaacctcgaacgtggagaaatccgtctcatttctccctcagggccatctctgcacgcaaattcttatgatgcacccgtcacgattgatatccatgattttgagactgatgaggttcactcagagaaatgggagtggttgaagtggcaggaagatgagaatttgccgatcgtgggtaggagtgtagcgagtctttatgaggcgttttatgatcatgttgttgaggggaaggagaggacgtatccggattttgaggatgctgttacgagacatcgacagttgaattctttgcttgaggggtgggaagcttga

SEQ ID NO: 27322 - protein, 385 aa, Muscodor strobelii
  misc_feature: SGI Peptide ID NO. 569358
  misc_feature (4)..(135): Pfam Id: PF01408 Pfam Desc: Oxidoreductase family, NAD-binding Rossmann fold
  misc_feature (1)..(385): NCBI GI: 256724661 Blast Desc: NECHADRAFT_48319 [Nectria haematococca mpVI 77-13-4]
  misc_feature (1)..(384): NCBI GI: 46126359 Blast Desc: FG07557.1 [Gibberella zeae PH-1]
  misc_feature (3)..(360): NCBI GI: 169597585 Blast Desc: SNOG_01579 [Phaeosphaeria nodorum SN15] gi|160707553|gb|EAT91228.2| SNOG_01579 [Phaeosphaeria nodorum SN15]
  misc_feature (3)..(382): NCBI GI: 145247706 Blast Desc: An12g10560 [Aspergillus niger] gi|134080845|emb|CAK41403.1| protein product [Aspergillus niger]
  misc_feature (3)..(385): NCBI GI: 242770553 Blast Desc: oxidoreductase, [Talaromyces stipitatus ATCC 10500] gi|218725200|gb|EED24617.1| oxidoreductase, [Talaromyces stipitatus ATCC 10500]
  misc_feature (1)..(380): NCBI GI: 171682900 Blast Desc: protein product [Podospora anserina] gi|170941409|emb|CAP67060.1| protein product [Podospora anserina]
  misc_feature (10)..(385): NCBI GI: 212541777 Blast Desc: oxidoreductase, [Penicillium marneffei ATCC 18224] gi|210065950|gb|EEA20043.1| oxidoreductase, [Penicillium marneffei ATCC 18224]
  misc_feature (3)..(385): NCBI GI: 116203277 Blast Desc: CHGG_09523 [Chaetomium globosum CBS 148.51] gi|88178041|gb|EAQ85509.1| CHGG_09523 [Chaetomium globosum CBS 148.51]
  misc_feature (1)..(380): NCBI GI: 85096898 Blast Desc: NCU07080 [Neurospora crassa OR74A] gi|28921833|gb|EAA31109.1| [Neurospora crassa OR74A]
  misc_feature (4)..(385): NCBI GI: 39976285 Blast Desc: MGG_05931 [Magnaporthe grisea 70-15] gi|145011802|gb|EDJ96458.1| MGG_05931 [Magnaporthe grisea 70-15]
MAPIRIAIIGLSSSAKTGWAANAHFPYLLSSLGRSKYTIVALCNSSVSSAQAAIKAYNLPASTKACGDPVELAGDEEIDLVVCCTRVDTHYELTRPSVERGKNVFVEWPLTHELGKSEELAALVKERGSKSMVGHQGRLAPVVVKMRELVESGKWGKVLSSEVRGFGGTGDRETIGEGLKYFADRKIGGNVFMIGFAHLWNTVQDVVGDVTELKSHIQLQRPTMKLRDASGKIVGTTPTDVPDLMIVSGSLNSSAYAQKGASLSVRYRRGQPFKGEPALTWHINLERGEIRLISPSGPSLHANSYDAPVTIDIHDFETDEVHSEKWEWLKWQEDENLPIVGRSVASLYEAFYDHVVEGKERTYPDFEDAVTRHRQLNSLLEGWEA

SEQ ID NO: 27323 - DNA, 3036 bp, Muscodor strobelii
  misc_feature: SGI EST ID NO. CUFF.64475.2
  misc_feature: Variant of the nucleotide sequence at SEQ ID NO 27321
cttacatttatatactacataggtatctttaagaagaaaaacataaaaaatccccattcgaaattctctatatctatattcaaaacaaccatacaattgagctaacccagatctaatcgcataatcacttaccccctcacgacaatggcgccaatccgcatagcaataatcggcctctcctcatccgcaaaaaccgggtgggcagcgaacgctcactttccctacctcctttcatccctcggccgctcaaaatacacaatagtagcactttgcaactccagcgtctcctccgcgcaagcagccatcaaagcatacaacctccccgcaagcacaaaagcttgcggagatcctgtcgaattagcgggagatgaggagattgatcttgtcgtctgctgcacgagggtcgatacacattatgagttgaccaggccgagtgtggagagggggaagaatgtgtttgtggagtggccgctgacgcatgagctggggaaaagtgaggaattggcggcgttggtgaaggagagggggtcgaagagtatggttggacatcagggaaggcttgcgcctgttgttgtgaagatgagggagttggttgagagtgggaagtgggggaaggttcttagttctgaggttaggggatttggtgggacggtaagctgcaaagggttatttgtgttgcgtctgttgaagtgctttactgtcgcggttatggctgactttgagtgtgacagggtgaccgagagactatcggtgaaggcttgaagtattttgcggatcggaagattggcgggaatgtttttatgattgggtttgcgcatttatggaataccgtgcaagacgtcgttggagacgtaacagagttgaaatcacatatacaactccaacgccctactatgaaactccgcgacgcatccgggaagatagtcggaaccacaccaacagatgttcctgatctaatgatcgtcagcgggtccctcaactcctctgcgtacgcgcaaaaaggcgccagcctttcagtgcgctaccgtcgaggccagccgttcaaaggcgagccagcgctaacatggcacatcaacctcgaacgtggagaaatccgtctcatttctccctcagggccatctctgcacgcaaattcttatgatgcacccgtcacgattgatatccatgattttgagactgatgaggttcactcagagaaatgggagtggttgaagtggcaggaagatgagaatttgccgatcgtgggtaggagtgtagcgagtctttatgaggcgttttatgatcatgttgttgaggggaaggagaggacgtatccggattttgaggatgctgttacgagacatcgacagttgaattctttgcttgaggggtgggaagcttgatagggtgttggttcttctccatgaaagctctcgttgtggttaaagtataggttgacgaaggactggttttgtaacgagaatgtttagttctatatgcagctgaattgaaaagctctcatttgacggttgttattacaagtcggtattgcttgtctacaatcacagccatgatttgttttgcttctcggacgtcgaggttatatggcccatttcctcgcatctgaagattatgcatatttttcctaggtagctttacaagttatattcgaacttagcatatgttgatccgggaaacatgcatatatcgctgcgcaacacttccattgctctctttacatccgtcgaaacttcgtcctcgaaaaacgcatccatattatcagggctgagaactgccggccgacagagtaggaaaaaatcatccgtatcaaaccaaatgcgaaatcctgatcctttcctgaacagtaattcacatgcaaaacatgtgtcggcaaagagtccttgaccgataagatagagtttgccatttggctgttctctaaaaaccaatactcgactatcaaagtcgaagatcggtatgatccaatctcccttctgcgcgtgacataataatacaccgcatagtataccacacgcattgaccacaccacggtatcgctgccacgaataccgtgcaagatttgctgttctgaatcttatttcatccaatccacttcgccgagtatcactcctatctcttgccaaagagggcgactggcaaaaacatcgacgctggggagacgacgtcggatatgaagtgtgaaacagacttatacactcctcgtatctgtgccatgaagtgtctaatgtgaggacgccgtaatcatccttaacgagctgccaacctgtctcagtggttaataagggcagtcgtttggtgctagttgtgaaaagttgcttgacgtcgctccggcgcctctgttcgataatctgcataaacttagggctcttgtagacctcgaaaccacgagcaatagccctcagcaagtcaaaacgaagcatatggggtacggtacttgtgtttgatatcggctccaatagctctatcgcgagatcgtacacatcggacctgtaatcaggccgaattgcgtccctctcccgagtttcagggaatgaccagtccacgattggaagtattgagaatatcatgtctcttggctctgcacacttcatttttgtggtttgctgcaagagttgtagaagtggatcgcacgttttattgtctgtgatcatggcgaatagatgttcatgttgggagtgcccattaacaagtttcatgagcggaaatctttttgctccttcataccccaaaacgagcctgttagctacattggaggcaaggtctagaggcgtggagttcgtcaaaccagttggcaagggttcttcagcggcgttgctctcaagagcaaacacactactaccggccggatccgtctgttgctctctattatgcagcttcaaagaactgagaaccgaatctcccttcatgaccaatattgtcagaccgaacagagttttggctggcacactctcatctgcacacagaatctcgacttcacaagccaaccgcatctccaaaaacgtccaaactctgtgaaaatatgggcgatggagaaac

SEQ ID NO: 27324 - DNA, 1032 bp, Muscodor strobelii
  misc_feature: SGI cDNA ID NO. 569359
  misc_feature: Encodes the peptide sequence at SEQ ID NO 27325
atggatttcataaccggaaaaatcgactctgacaatgggctactggatgtcaccagtattgccaacgactggggccggatcaactctaccgcctacgtagcacccgcacagatgcttctgtaccgcgtatacatcgccagtgctcagctcgcaacctgggtcaacgatacatctggctacgacacgacatggaacgcagcagccgacagcttcaaaaccgcagtacaagataatctctgggattccaatgctggtgctttcagggataacaccgattcgaatttctacgggctttatccgcaagacggcaactcgctagctgtcatgttcggtcttgtcagcggtacttccgatgaagcgcaaggcatatcctcccagcttacgcaaaattggatggacattggagcaaactgtccagaactaccaggcgagatctcaccttacatttcctcgttagagatccaagcccatctactcgccggccaacctcaacgcgctctcgacctcatccggacaagctggggttggtatctgaacaatgaatacggaacacaatctacgatggtcgaaggctaccttatcaacggcacgtttggatatcgctgggaccaaggctacggcggcgacttctcctacacatctcacgcgcacggatggtccaccggtcccgtcacagcgttgacagagaggatcctgggattgtccgtcactggtatggcgggttctgagtggacttttactcccgcgcaaggtgatctgacgagtgttgagggaggatttactactagtttggggcagttccaggcttcttggtctgtagcagatggtggttgtccggtttcttatggtgtgaatactcccgatgggacgcagggatttttgactattcctcagggtagttgtacgactgagcttaaagtcgatggtgagacgcctggtgagggggttgttagtgtcgttactggaccaggtggtggacagtattatagtttgcagttgggtggtgggagccatacactggttgttagctag

SEQ ID NO: 27325 - protein, 343 aa, Muscodor strobelii
  misc_feature: SGI Peptide ID NO. 569359
  misc_feature (1)..(329): NCBI GI: 119496565 Blast Desc: bacterial alpha-L-rhamnosidase domain protein [Neosartorya fischeri NRRL 181] gi|119413218|gb|EAW23159.1| bacterial alpha-L-rhamnosidase domain protein [Neosartorya NRRL
  misc_feature (1)..(331): NCBI GI: 70991026 Blast Desc: alpha-L-rhamnosidase B [Aspergillus fumigatus Af293] gi|66847994|gb|EAL88324.1| alpha-L-rhamnosidase B, [Aspergillus fumigatus Af293] gi|159130836|gb|EDP55949.1| alpha-L-rhamnosidase
  misc_feature (1)..(343): NCBI GI: 156034396 Blast Desc: SS1G_13501 [Sclerotinia sclerotiorum 1980] gi|154698904|gb|EDN98642.1| SS1G_13501 [Sclerotinia sclerotiorum 1980]
  misc_feature (1)..(297): NCBI GI: 212527780 Blast Desc: alpha-L-rhamnosidase B, [Penicillium marneffei ATCC 18224] gi|210073445|gb|EEA27532.1| alpha-L-rhamnosidase B, [Penicillium marneffei ATCC 18224]
  misc_feature (1)..(343): NCBI GI: 238503818 Blast Desc: alpha-L-rhamnosidase B, [Aspergillus flavus NRRL3357] gi|220690612|gb|EED46961.1| alpha-L-rhamnosidase B, [Aspergillus flavus NRRL3357]
  misc_feature (1)..(328): NCBI GI: 242784641 Blast Desc: alpha-L-rhamnosidase B, [Talaromyces stipitatus ATCC 10500] gi|218720575|gb|EED19994.1| alpha-L-rhamnosidase B, [Talaromyces stipitatus ATCC 10500]
  misc_feature (44)..(316): NCBI GI: 145255353 Blast Desc: An18g04800 [Aspergillus niger] gi|134084529|emb|CAK43282.1| protein product [Aspergillus niger]
  misc_feature (1)..(328): NCBI GI: 115389382 Blast Desc: conserved [Aspergillus terreus NIH2624] gi|114194592|gb|EAU36292.1| conserved [Aspergillus terreus NIH2624]
  misc_feature (1)..(311): NCBI GI: 261352769 Blast Desc: bacterial alpha-L-rhamnosidase domain-containing protein [Verticillium albo-atrum VaMs.102]
  misc_feature (48)..(343): NCBI GI: 255935171 Blast Desc: Pc13g01670 [Penicillium chrysogenum Wisconsin 54-1255] gi|211583232|emb|CAP91236.1| Pc13g01670 [Penicillium chrysogenum Wisconsin 54-1255]
MDFITGKIDSDNGLLDVTSIANDWGRINSTAYVAPAQMLLYRVYIASAQLATWVNDTSGYDTTWNAAADSFKTAVQDNLWDSNAGAFRDNTDSNFYGLYPQDGNSLAVMFGLVSGTSDEAQGISSQLTQNWMDIGANCPELPGEISPYISSLEIQAHLLAGQPQRALDLIRTSWGWYLNNEYGTQSTMVEGYLINGTFGYRWDQGYGGDFSYTSHAHGWSTGPVTALTERILGLSVTGMAGSEWTFTPAQGDLTSVEGGFTTSLGQFQASWSVADGGCPVSYGVNTPDGTQGFLTIPQGSCTTELKVDGETPGEGVVSVVTGPGGGQYYSLQLGGGSHTLVVS

SEQ ID NO: 27326 - DNA, 1269 bp, Muscodor strobelii
  misc_feature: SGI EST ID NO. CUFF.64469.0
  misc_feature: Variant of the nucleotide sequence at SEQ ID NO 27324
agcattatttgacgtccaggaatccgatggtggacttcaattcgccggagcgccgctcttcatcggtgcatctagtgccacttaccacctgtggacgatgatcggaatctacaactatgtcctttactccggagacattgactttctgtcatcaatctggaccaaatacgtcgcagcgatggatttcataaccggaaaaatcgactctgacaatgggctactggatgtcaccagtattgccaacgactggggccggatcaactctaccgcctacgtagcacccgcacagatgcttctgtaccgcgtatacatcgccagtgctcagctcgcaacctgggtcaacgatacatctggctacgacacgacatggaacgcagcagccgacagcttcaaaaccgcagtacaagataatctctgggattccaatgctggtgctttcagggataacaccgattcgaatttctacgggctttatccgcaagacggcaactcgctagctgtcatgttcggtcttgtcagcggtacttccgatgaagcgcaaggcatatcctcccagcttacgcaaaattggatggacattggagcaaactgtccagaactaccaggcgagatctcaccttacatttcctcgttagagatccaagcccatctactcgccggccaacctcaacgcgctctcgacctcatccggacaagctggggttggtatctgaacaatgaatacggaacacaatctacgatggtcgaaggctaccttatcaacggcacgtttggatatcgctgggaccaaggctacggcggcgacttctcctacacatctcacgcgcacggatggtccaccggtcccgtcacagcgttgacagagaggatcctgggattgtccgtcactggtatggcgggttctgagtggacttttactcccgcgcaaggtgatctgacgagtgttgagggaggatttactactagtttggggcagttccaggcttcttggtctgtagcagatggtggttgtccggtttcttatggtgtgaatactcccgatgggacgcagggatttttgactattcctcagggtagttgtacgactgagcttaaagtcgatggtgagacgcctggtgagggggttgttagtgtcgttactggaccaggtggtggacagtattatagtttgcagttgggtggtgggagccatacactggttgttagctagatttgtgatcttatgggtgcgggtatattaatatcaatgaaatacattgtaaagttacc

SEQ ID NO: 27327 - DNA, 2091 bp, Muscodor strobelii
  misc_feature: SGI cDNA ID NO. 569360
  misc_feature: Encodes the peptide sequence at SEQ ID NO 27328
atgacgcctcacatggctcccacgctagcttctttggcagtgccgctcttaagtcttgcccaacatgcctttgctcagtcatgttggcaaggcatcacttgctctggccctgatacacaggctttcccaggtgtatgggacgacaacatcttcgctccagaatcgagaaatgtggcaccttcaacagtatgggacttggatagtggtgaccaagttgccacataccccgatacattcgatcttcaaagcgaccaaaccggtgtctatctagattttggcaaagcagttggtggcattgcgactatcgaatatactataacgtcgacgagcggagatggtgctctcggccttgctttctcggaagccaagaactggacgggacgtaattccgactccagcaatggcgctgtttttggaaatgatggtgctctctattcaaacttcacctccactggagatttgacatataccatgccgctggataaagttcgcggtgctttccgatacatgacgctatttgtcctaggcacagatgtcgccgtaacaattaatagcgtcactattgaaatatctttccaacctacatggtctaatcttcgggcttatcagggctatttccatagcaacgatgaaacgctcaacaagatctggtactctggagcttatactctgcagcttgatgccatcggtgggaaagagggcagacaatggcctgcgccagcatcaggatgggagaacaacgccactctaggcagtgccgatacatatagtgttgatggtgcgaggagagacagaagtctttggcctggtgatatgggtgtgtctgtgccggctgctttctatagcactggagatctttggagtgtaaaaaactcacttcaagcattatttgacgtccaggaatccgatggtggacttcaattcgccggagcgccgctcttcatcggtgcatctagtgccacttaccacctgtggacgatgatcggaatctacaactatgtcctttactccggagacattgactttctgtcatcaatctggaccaaatacgtcgcagcgatggatttcataaccggaaaaatcgactctgacaatgggctactggatgtcaccagtattgccaacgactggggccggatcaactctaccgcctacgtagcacccgcacagatgcttctgtaccgcgtatacatcgccagtgctcagctcgcaacctgggtcaacgatacatctggctacgacacgacatggaacgcagcagccgacagcttcaaaaccgcagtacaagataatctctgggattccaatgctggtgctttcagggataacaccgattcgaatttctacgggctttatccgcaagacggcaactcgctagctgtcatgttcggtcttgtcagcggtacttccgatgaagcgcaaggcatatcctcccagcttacgcaaaattggatggacattggagcaaactgtccagaactaccaggcgagatctcaccttacatttcctcgttagagatccaagcccatctactcgccggccaacctcaacgcgctctcgacctcatccggacaagctggggttggtatctgaacaatgaatacggaacacaatctacgatggtcgaaggctaccttatcaacggcacgtttggatatcgctgggaccaaggctacggcggcgacttctcctacacatctcacgcgcacggatggtccaccggtcccgtcacagcgttgacagagaggatcctgggattgtccgtcactggtatggcgggttctgagtggacttttactcccgcgcaaggtgatctgacgagtgttgagggaggatttactactagtttggggcagttccaggcttcttggtctgtagcagatggtggttgtccggtttcttatggtgtgaatactcccgatgggacgcagggatttttgactattcctcagggtagttgtacgactgagcttaaagtcgatggtgagacgcctggtgagggggttgttagtgtcgttactggaccaggtggtggacagtattatagtttgcagttgggtggtgggagccatacactggttgttagctag

SEQ ID NO: 27328 - protein, 696 aa, Muscodor strobelii
  misc_feature: SGI Peptide ID NO. 569360
  misc_feature (81)..(649): Pfam Id: PF05592 Pfam Desc: Bacterial alpha-L-rhamnosidase
  misc_feature (11)..(684): NCBI GI: 70991026 Blast Desc: alpha-L-rhamnosidase B [Aspergillus fumigatus Af293] gi|66847994|gb|EAL88324.1| alpha-L-rhamnosidase B, [Aspergillus fumigatus Af293] gi|159130836|gb|EDP55949.1| alpha-L-rhamnosidase
  misc_feature (25)..(682): NCBI GI: 119496565 Blast Desc: bacterial alpha-L-rhamnosidase domain protein [Neosartorya fischeri NRRL 181] gi|119413218|gb|EAW23159.1| bacterial alpha-L-rhamnosidase domain protein [Neosartorya NRRL
  misc_feature (25)..(696): NCBI GI: 156034396 Blast Desc: SS1G_13501 [Sclerotinia sclerotiorum 1980] gi|154698904|gb|EDN98642.1| SS1G_13501 [Sclerotinia sclerotiorum 1980]
  misc_feature (21)..(696): NCBI GI: 238503818 Blast Desc: alpha-L-rhamnosidase B, [Aspergillus flavus NRRL3357] gi|220690612|gb|EED46961.1| alpha-L-rhamnosidase B, [Aspergillus flavus NRRL3357]
  misc_feature (20)..(681): NCBI GI: 115389382 Blast Desc: conserved [Aspergillus terreus NIH2624] gi|114194592|gb|EAU36292.1| conserved [Aspergillus terreus NIH2624]
  misc_feature (17)..(650): NCBI GI: 212527780 Blast Desc: alpha-L-rhamnosidase B, [Penicillium marneffei ATCC 18224] gi|210073445|gb|EEA27532.1| alpha-L-rhamnosidase B, [Penicillium marneffei ATCC 18224]
  misc_feature (16)..(669): NCBI GI: 145255353 Blast Desc: An18g04800 [Aspergillus niger] gi|134084529|emb|CAK43282.1| protein product [Aspergillus niger]
  misc_feature (17)..(681): NCBI GI: 242784641 Blast Desc: alpha-L-rhamnosidase B, [Talaromyces stipitatus ATCC 10500] gi|218720575|gb|EED19994.1| alpha-L-rhamnosidase B, [Talaromyces stipitatus ATCC 10500]
  misc_feature (11)..(696): NCBI GI: 255935171 Blast Desc: Pc13g01670 [Penicillium chrysogenum Wisconsin 54-1255] gi|211583232|emb|CAP91236.1| Pc13g01670 [Penicillium chrysogenum Wisconsin 54-1255]
  misc_feature (7)..(664): NCBI GI: 261352769 Blast Desc: bacterial alpha-L-rhamnosidase domain-containing protein [Verticillium albo-atrum VaMs.102]
MTPHMAPTLASLAVPLLSLAQHAFAQSCWQGITCSGPDTQAFPGVWDDNIFAPESRNVAPSTVWDLDSGDQVATYPDTFDLQSDQTGVYLDFGKAVGGIATIEYTITSTSGDGALGLAFSEAKNWTGRNSDSSNGAVFGNDGALYSNFTSTGDLTYTMPLDKVRGAFRYMTLFVLGTDVAVTINSVTIEISFQPTWSNLRAYQGYFHSNDETLNKIWYSGAYTLQLDAIGGKEGRQWPAPASGWENNATLGSADTYSVDGARRDRSLWPGDMGVSVPAAFYSTGDLWSVKNSLQALFDVQESDGGLQFAGAPLFIGASSATYHLWTMIGIYNYVLYSGDIDFLSSIWTKYVAAMDFITGKIDSDNGLLDVTSIANDWGRINSTAYVAPAQMLLYRVYIASAQLATWVNDTSGYDTTWNAAADSFKTAVQDNLWDSNAGAFRDNTDSNFYGLYPQDGNSLAVMFGLVSGTSDEAQGISSQLTQNWMDIGANCPELPGEISPYISSLEIQAHLLAGQPQRALDLIRTSWGWYLNNEYGTQSTMVEGYLINGTFGYRWDQGYGGDFSYTSHAHGWSTGPVTALTERILGLSVTGMAGSEWTFTPAQGDLTSVEGGFTTSLGQFQASWSVADGGCPVSYGVNTPDGTQGFLTIPQGSCTTELKVDGETPGEGVVSVVTGPGGGQYYSLQLGGGSHTLVVS

SEQ ID NO: 27329 - DNA, 1269 bp, Muscodor strobelii; identical to SEQ ID NO: 27326
  misc_feature: SGI EST ID NO. CUFF.64469.0
  misc_feature: Variant of the nucleotide sequence at SEQ ID NO 27327

SEQ ID NO: 27330 - DNA, 1827 bp, Muscodor strobelii
  misc_feature: SGI cDNA ID NO. 569361
  misc_feature: Reduced expression when VOC is produced
  misc_feature: Encodes the peptide sequence at SEQ ID NO 27331
atgtacggcgatgacgacgactacgatgcccgccccatgagcttcattgcggcccctcgcggcggcgagcagctctcctcacgccccggccacgaattatcccccgccgacgagcatcgactgaggctcgtgcgatccacctcgggcgagacgggctctctgaagcccaatgccatgggcaacaaacccgctgctccagctctcaacacatccatgtcttcccagcgccccttgtcgaggacgaactcgggcgatagctctacgagtcccatatcccccggctccatgtcgcccagcctgcgagacatgcgtgacggccccagcgaatatcccctcaccaacatcgacaaccccaacgacatagctcaggaactcagcaatctgcaggcattacgtagattatccatggatgtctctaataacagcgatcccgatttgcttccattccagggcatgtctcttgtggccatgccctcggttgcgcccaaaggagacgacgacacagatccatcaaggttgctgtgggtgcctgctggcgtacatccggaattggcgccaaccgaattcaaaaactttgtcgaaaaaagagtacagtccatgaagcgaagatcaggagaatcttcttcatcttcgctctctcccgatgggctgtctagaagcgatactggaagtttgaggagaaagaaatctatgctgtccagacaggtcgataatgcgaatgggcacggtgcagatggatacatggatggggcagaaagactggaaagaaagagatcacagcggcaatctgaacaaggtgtacccgagctgagcctggaggagcttatcaaagacccgagcaaggctgtacagaagctcacactcgaagcgcagaacagcggcgatgattcggcaaatatggacgatatgccgattctacccccagtggcgccaggtatgggactgcgccgttcaacacgaactcagtaccgaaaaggtggaagtctaaagaatcggcccggttcgcttcgcaatacggagcgcctaccattttcaaagcgagtggctgggagaaggggcgaagacgggtccgacagttcgcccgctgaatcgccgctcgacgcaccaccgggtcatggcctgatgcgcgtgcaatcggaaccgatttctgctgaaaacttctcaaggccgtcgaggagcgtacgaaggcagcagccgtttgatcaagggtcgacagctgatgcttacgagcgcaatctacagcacaaccaagaaccaagccaaactcagcctagccgcccgtccgcttccaatagggtgcactcgcctgaaaactctcgaactggcgctccgatacctcaaatcatcgagacaccccctatccaggaagaagccgagccacggagaccatttcccgagcgatcttcctcgcaacggggccctgctcagaatctcattcaacccgcgtctgcgccacctgtcgaacctccgtctcgttccagcaaacgtccgatatatgggcagccacagccccttcaatcggaatcatcatctcaagcggccgacacaatcccacaaccaaagagatcaccaactgcccctccacagaactataccgagccatcgtataatgcgaggacggatgagttgacatttattccgacattttcagcatccgaggaaaagaagccggagaagaagagtaagaaggacggttcagaaagtggatcatcaaaggtctcgtcttggaaatggtttaagagcgatgacaaagagaaaaagaagaagagtgaggaagagggtcgaaagtcgaagaccaaggcatttgtcgagaaggcacatggataa

SEQ ID NO: 27331 - protein, 608 aa, Muscodor strobelii
  misc_feature: SGI Peptide ID NO. 569361
  misc_feature (1)..(583): NCBI GI: 116202773 Blast Desc: CHGG_09271 [Chaetomium globosum CBS 148.51] gi|88177789|gb|EAQ85257.1| CHGG_09271 [Chaetomium globosum CBS 148.51]
  misc_feature (1)..(583): NCBI GI: 171682544 Blast Desc: protein product [Podospora anserina] gi|170941231|emb|CAP66881.1| protein product [Podospora anserina]
  misc_feature (9)..(585): NCBI GI: 256727169 Blast Desc: NECHADRAFT_20861 [Nectria haematococca mpVI 77-13-4]
  misc_feature (1)..(580): NCBI GI: 39943652 Blast Desc: MGG_03837 [Magnaporthe grisea 70-15] gi|145014525|gb|EDJ99093.1| MGG_03837 [Magnaporthe grisea 70-15]
  misc_feature (11)..(579): NCBI GI: 46134195 Blast Desc: FG09237.1 [Gibberella zeae PH-1]
  misc_feature (1)..(579): NCBI GI: 154292958 Blast Desc: BC1G_14377 [Botryotinia fuckeliana B05.10] gi|150845718|gb|EDN20911.1| BC1G_14377 [Botryotinia fuckeliana B05.10]
  misc_feature (1)..(607): NCBI GI: 156034398 Blast Desc: SS1G_13502 [Sclerotinia sclerotiorum 1980] gi|154698905|gb|EDN98643.1| SS1G_13502 [Sclerotinia sclerotiorum 1980]
  misc_feature (1)..(581): NCBI GI: 85095968 Blast Desc: NCU09860 [Neurospora crassa OR74A] gi|28921657|gb|EAA30941.1| [Neurospora crassa OR74A]
  misc_feature (108)..(607): NCBI GI: 121699420 Blast Desc: telomere silencing protein Zds1, [Aspergillus clavatus NRRL 1] gi|119396157|gb|EAW06589.1| telomere silencing protein Zds1, [Aspergillus clavatus NRRL 1]
  misc_feature (108)..(579): NCBI GI: 159124242 Blast Desc: telomere silencing protein Zds1, [Aspergillus fumigatus A1163]
  misc_feature: Useful for introducing or modulating the production of volatile compounds
MYGDDDDYDARPMSFIAAPRGGEQLSSRPGHELSPADEHRLRLVRSTSGETGSLKPNAMGNKPAAPALNTSMSSQRPLSRTNSGDSSTSPISPGSMSPSLRDMRDGPSEYPLTNIDNPNDIAQELSNLQALRRLSMDVSNNSDPDLLPFQGMSLVAMPSVAPKGDDDTDPSRLLWVPAGVHPELAPTEFKNFVEKRVQSMKRRSGESSSSSLSPDGLSRSDTGSLRRKKSMLSRQVDNANGHGADGYMDGAERLERKRSQRQSEQGVPELSLEELIKDPSKAVQKLTLEAQNSGDDSANMDDMPILPPVAPGMGLRRSTRTQYRKGGSLKNRPGSLRNTERLPFSKRVAGRRGEDGSDSSPAESPLDAPPGHGLMRVQSEPISAENFSRPSRSVRRQQPFDQGSTADAYERNLQHNQEPSQTQPSRPSASNRVHSPENSRTGAPIPQIIETPPIQEEAEPRRPFPERSSSQRGPAQNLIQPASAPPVEPPSRSSKRPIYGQPQPLQSESSSQAADTIPQPKRSPTAPPQNYTEPSYNARTDELTFIPTFSASEEKKPEKKSKKDGSESGSSKVSSWKWFKSDDKEKKKKSEEEGRKSKTKAFVEKAHG

SEQ ID NO: 27332 - DNA, 5160 bp, Muscodor strobelii
  misc_feature: SGI EST ID NO. CUFF.64496.0
  misc_feature: Variant of the nucleotide sequence at SEQ ID NO 27330
cgaagaagttgctataattttaaaagaattttgggcatatatcgacttgaaatatcgttttcatctcattgatgccacatagctgagcttcgccaagcattgcaaaggacagccgttcaccacatcgaggcgagcaacgtgacgtcggtaggggtcctcagtattcctgttggggtagagcagaattaaccgagaaaggggtattgaggggtacttacgtacgttgttcccaatttcatcaccttgacagctcgacgtcgtcacgatacgacctcatggtggtgctatcttgaagtccatatggcatatacgagtaacaattaggcgctttcattgacccaaccaaagatgcaagacaccaacgactacaagtgttgcccgtccgcaaaaacattctcgacattcgatgtagatgtcgatcacgcggcccagcacgttggggaaaagagtctatttccaggctcgcgtctgcttggaaagtgctaacgaggcaacaaccgggattggcggggtacaactgaactcagatctgctctgggtagcctggtcaagctgaagtaaatagtcaggtgctagcatacaggcatgtgcttgtcatcgagaagacttgctgctattggaagcgcagtatttgtgctcgcttctggtgaactgaacaatgtacaaaacataaaacatatccaaaaaaaccgaatgtccttaaagtagaggggatgtattagtgcttatgagctgtacattcagaggtgggtgactctgatctgtggtgcagcaagagtcctgagatctaagtccgacagtggcaggccgcggcaggatgtaagcggtgttttctcgtctgataacgtagaaacgagaaagtaaataaaacaaagtatgaaacggtcaatcgaacattccttccttccgtgtgaagatgctttggctcgacacgtgacaaggttctttcgacgttagaggagtcgacaaggcgatgtcaatatactgtataggggctgcgatagggggcgagggctctggagtcgtctgaccaaataggccttgagagaggggatttcggagtgtgcaccaagcccgcgcggcatttgcgagaggtggcggccgtgatgcaggtgtgggttggtttgggtggtgcagcatggttggcgactaactcaaagcagcgatagcgtgtgatattacactaataataatgcacacttacaggccggagagtgtatgagaggagagaaacaaagcggagattggacgattggacggttcatctgaggaaagatgagagaatggagtgcggaggcttcagacaggactggagcgtgacagacgcggcccagatactcagtgttcgtcttgattgcactgatcggttccgtagctgcaagaggtagtggcgactttgtacatattgcagcgctttcaggttgaggacttggcaaagcgaatagctcccgtcataagttcaggtaggaggtgtgtacatggaacagtgtacacagcggagtgccaggtagctggccttagattccatcgtcctccagcgacgacatccacactcgacatctcaacaccgcaatactactaagtccgcctaataatacacgactcaccagcagaccgagagtcccggtctccatacggctagcagactctcgctgcacaccgcgcgacccgcttggccagcataactacacacatttacaatcgacacgtcctcaccaaaacagctgctcgaactgccgacgctatcacctgccttctctttcaggctgcgcgcgcacaattgctgcgtttgcctgacagctgcacagctactgcaaagagcttcgcacgcagcgccacgcttttgttgggctcattgtcaacgttcaacgcacgcgatatacagtccccgtactatacttgccccttttgaacctcatgcaaggctcgtcgactgctggaccgagtgcttggtgcaacccgaccgcaagaataggggatccctggaggctcgacctctgctgaggtcatagcggactcgctcaatgatggtatgttctatttcacggacttgtcgcctgctcagcctggaaggctacacacaagcgttgtacaaagaaaaccggctgactgactgacattcttcaacaaaagacctctcgaagaccccacaatgtcggcggcgggagcttcgcgagccggcgcggccacgccaaccaactgtccatatccgacaacagccaccacatcaccgagaccatcggcaccatgtacggcgatgacgacgactacgatgcccgccccatgagcttcattgcggcccctcgcggcggcgagcagctctcctcacgccccggccacgaattatcccccgccgacgagcatcgactgaggctcgtgcgatccacctcgggcgagacgggctctctgaagcccaatgccatgggcaacaaacccgctgctccagctctcaacacatccatgtcttcccagcgccccttgtcgaggacgaactcgggcgatagctctacgagtcccatatcccccggctccatgtcgcccagcctgcgagacatgcgtgacggccccagcgaatatcccctcaccaacatcgacaaccccaacgacatagctcaggaactcagcaatctgcaggcattacgtagattatccatggatgtctctaataacagcgatcccgatttgcttccattccagggcatgtctcttgtggccatgccctcggttgcgcccaaaggagacgacgacacagatccatcaaggttgctgtgggtgcctgctggcgtacatccggaattggcgccaaccgaattcaaaaactttgtcgaaaaaagagtacagtccatgaagcgaagatcaggagaatcttcttcatcttcgctctctcccgatgggctgtctagaagcgatactggaagtttgaggagaaagaaatctatgctgtccagacaggtcgataatgcgaatgggcacggtgcagatggatacatggatggggcagaaagactggaaagaaagagatcacagcggcaatctgaacaaggtgtacccgagctgagcctggaggagcttatcaaagacccgagcaaggctgtacagaagctcacactcgaagcgcagaacagcggcgatgattcggcaaatatggacgatatgccgattctacccccagtggcgccaggtatgggactgcgccgttcaacacgaactcagtaccgaaaaggtggaagtctaaagaatcggcccggttcgcttcgcaatacggagcgcctaccattttcaaagcgagtggctgggagaaggggcgaagacgggtccgacagttcgcccgctgaatcgccgctcgacgcaccaccgggtcatggcctgatgcgcgtgcaatcggaaccgatttctgctgaaaacttctcaaggccgtcgaggagcgtacgaaggcagcagccgtttgatcaagggtcgacagctgatgcttacgagcgcaatctacagcacaaccaagaaccaagccaaactcagcctagccgcccgtccgcttccaatagggtgcactcgcctgaaaactctcgaactggcgctccgatacctcaaatcatcgagacaccccctatccaggaagaagccgagccacggagaccatttcccgagcgatcttcctcgcaacggggccctgctcagaatctcattcaacccgcgtctgcgccacctgtcgaacctccgtctcgttccagcaaacgtccgatatatgggcagccacagccccttcaatcggaatcatcatctcaagcggccgacacaatcccacaaccaaagagatcaccaactgcccctccacagaactataccgagccatcgtataatgcgaggacggatgagttgacatttattccgacattttcagcatccgaggaaaagaagccggagaagaagagtaagaaggacggttcagaaagtggatcatcaaaggtctcgtcttggaaatggtttaagagcgatgacaaagagaaaaagaagaagagtgaggaagagggtcgaaagtcgaagaccaaggcatttgtcgagaaggcacatggataatgtgaggctcgatgtcctacaaacgtcaatcgatactgcactacataagggacgggaaagtctattgctcgaccgcgataatatggacagcaagctagaagaggagaggcgaaaggagagcacaaggcgttccggctccggtgaacagaaaaaagagaaagatggtctattctcttcatttttcagtagcagcaaaaagaagggcgatcgggactcagcaggtcgaaagtcgcacatgcagcggcggccttcttccccggaacccgctccctatcgtcctctacgagctgatgttgattatcactggacccgattccctatcttggaagagagggccatttacaggatggcgcacatcaaacttgccaatccgcgacgtgccttatacagccaagtcttactcagcaatttcatgtatgcatacctcgccaaagtacaagcgatgcaccctcagatccaggtacctcaatcacctcaacagaaaaggcaacaagaggaagagaggcgccgaagggaacaagagcagcaatacatggagcagcagcaggcccaggaaagtatggatcaatataacttcgagtatcatcgatcgacaaaccagtattcagatccaagtatgcagcacgaggaaggcgactaccccgaagcggcagagatctacgactatgaccacggcaaagaggacatggagcaagacacagactacgacgactacggccgcggaggcaaggattactattcctacaataattatcaacaaaacggacaacgtcatcacgataaggaggaagagatgtggtgatccatcaccacccctcgatggacgagtcaagattaatgaaagcgacatattatgcttgtatagctggccaattgcacagtgcatatttagggagtttaccggacgaacgagtagatctgccaacccatcattggcagctcttgttattttaccctgccatttgccgagaattagcattagcacgatggtgttggggatgggattggtggctgtctaatgaagctcgcttttcgaacgcaatatatagaaggtgaagagttgaaatctaaatcataatctgtaaa

SEQ ID NO: 27333 - DNA, 720 bp, Muscodor strobelii
  misc_feature: SGI cDNA ID NO. 569362
  misc_feature: Reduced expression when VOC is produced
  misc_feature: Encodes the peptide sequence at SEQ ID NO 27334
atggacagcaagctagaagaggagaggcgaaaggagagcacaaggcgttccggctccggtgaacagaaaaaagagaaagatggtctattctcttcatttttcagtagcagcaaaaagaagggcgatcgggactcagcaggtcgaaagtcgcacatgcagcggcggccttcttccccggaacccgctccctatcgtcctctacgagctgatgttgattatcactggacccgattccctatcttggaagagagggccatttacaggatggcgcacatcaaacttgccaatccgcgacgtgccttatacagccaagtcttactcagcaatttcatgtatgcatacctcgccaaagtacaagcgatgcaccctcagatccaggtacctcaatcacctcaacagaaaaggcaacaagaggaagagaggcgccgaagggaacaagagcagcaatacatggagcagcagcaggcccaggaaagtatggatcaatataacttcgagtatcatcgatcgacaaaccagtattcagatccaagtatgcagcacgaggaaggcgactaccccgaagcggcagagatctacgactatgaccacggcaaagaggacatggagcaagacacagactacgacgactacggccgcggaggcaaggattactattcctacaataattatcaacaaaacggacaacgtcatcacgataaggaggaagagatgtggtga

SEQ ID NO: 27334 - protein, 239 aa, Muscodor strobelii
  misc_feature: SGI Peptide ID NO. 569362
  misc_feature (67)..(119): Pfam Id: PF08632 Pfam Desc: Sporulation protein Zds1 C terminal region
  misc_feature (1)..(239): NCBI GI: 46134195 Blast Desc: FG09237.1 [Gibberella zeae PH-1]
  misc_feature (1)..(239): NCBI GI: 154292958 Blast Desc: BC1G_14377 [Botryotinia fuckeliana B05.10] gi|150845718|gb|EDN20911.1| BC1G_14377 [Botryotinia fuckeliana B05.10]
  misc_feature (1)..(239): NCBI GI: 256727169 Blast Desc: NECHADRAFT_20861 [Nectria haematococca mpVI 77-13-4]
  misc_feature (1)..(239): NCBI GI: 156034398 Blast Desc: SS1G_13502 [Sclerotinia sclerotiorum 1980] gi|154698905|gb|EDN98643.1| SS1G_13502 [Sclerotinia sclerotiorum 1980]
  misc_feature (1)..(239): NCBI GI: 261359368 Blast Desc: conserved [Verticillium albo-atrum VaMs.102]
  misc_feature (1)..(231): NCBI GI: 255932465 Blast Desc: Pc12g09630 [Penicillium chrysogenum Wisconsin 54-1255] gi|211582408|emb|CAP80590.1| Pc12g09630 [Penicillium chrysogenum Wisconsin 54-1255]
  misc_feature (1)..(185): NCBI GI: 238487866 Blast Desc: telomere silencing protein Zds1, [Aspergillus flavus NRRL3357] gi|220700050|gb|EED56389.1| telomere silencing protein Zds1, [Aspergillus flavus NRRL3357]
  misc_feature (2)..(232): NCBI GI: 67527831 Blast Desc: AN4169.2 [Aspergillus nidulans FGSC A4] gi|40740240|gb|EAA59430.1| AN4169.2 [Aspergillus nidulans FGSC A4] gi|259481234|tpe|CBF74566.1| TPA: telomere silencing protein
  misc_feature (1)..(185): NCBI GI: 119469035 Blast Desc: telomere silencing protein Zds1, [Neosartorya fischeri NRRL 181] gi|119406061|gb|EAW16012.1| telomere silencing protein Zds1, [Neosartorya fischeri NRRL 181]
  misc_feature (1)..(185): NCBI GI: 159124242 Blast Desc: telomere silencing protein Zds1, [Aspergillus fumigatus A1163]
  misc_feature: Useful for introducing or modulating the production of volatile compounds
MDSKLEEERRKESTRRSGSGEQKKEKDGLFSSFFSSSKKKGDRDSAGRKSHMQRRPSSPEPAPYRPLRADVDYHWTRFPILEERAIYRMAHIKLANPRRALYSQVLLSNFMYAYLAKVQAMHPQIQVPQSPQQKRQQEEERRRREQEQQYMEQQQAQESMDQYNFEYHRSTNQYSDPSMQHEEGDYPEAAEIYDYDHGKEDMEQDTDYDDYGRGGKDYYSYNNYQQNGQRHHDKEEEMW

SEQ ID NO: 27335 - DNA, 5160 bp, Muscodor strobelii; identical to SEQ ID NO: 27332
  misc_feature: SGI EST ID NO. CUFF.64496.0
  misc_feature: Variant of the nucleotide sequence at SEQ ID NO 27333

SEQ ID NO: 27336 - DNA, 1356 bp, Muscodor strobelii
  misc_feature: SGI cDNA ID NO. 569363
  misc_feature: Encodes the peptide sequence at SEQ ID NO 27337
atgtctcaaccaaaggaaataaccatcataggcggcggtataatcggctgcagcagcgcctatttcctaacacgccacccctcatactcaccctcaacgcaccgcataacgcttctcgaagcagcctccacaaacacaggagggcggacaaaagacagcattcaagaccccgccacactcgcagatccagaatcgtcatcaaagagaaatccagcacatgacggcatcgcgagtggtgcaagtggaaaagcagggggtttacttgcgctctgggcatttcctagggagatcgtgccgctgagttttaagctacatgaggaactcgcgagggaacacgagggagagaagagatgggggtacagacggtgttgggctagtcaggtcgactgtaaagcccgcctaccgcccggtctatcaggtaatgcggcaggagatgctgagggtgggggagaggcaatcaagggcttgcataaagaccataagaagagcgctgcggcactgaagaagttgggtgcgccggatgatctagattgggttgatgctgaggcgctgggcgcttatgataatatggggacacctgagaataccgcacaggttcaccctgagcttttcactaggagtatggctagtcttgctgaggagggtggcgtgaggattgttacgggggcgagggttacgagtatcaataccggtgagaaaggggtggagagtgtggtttatgtgaaagatggggaggaaatcacaattccgacgacggatgcagttgttgcggctggaccgtggacgaagactttgctccccggtgtccctgtcacggcgagtcgagcgcatagtgtggttatcaagacgcaggagcctgtgtcggcgtatgcgttgttcacggcgatcagactaccgtctgggttcaggacgccggtttggaaatcaagccccaaggggacgagtgttgcgaccccgttgaaggggactcagatcgtggagccggagatttatgccaggcctgatgggacggcgtatgcgtgcgggccgactgacgatgcgccgttaccgcggggaacggaggacgtggaggttgatgaggcgaggtgtgaggatattgttgcgcaggttggggggattagtgagcagcttcgggatggagaggtgcttgcgagacaggcttgcttcttaccgcagggtgggccgtatattgggaatgtgggtggtgtgaggggtctggttgttgcggctggtcatacgtgttggggcattcagaatgcgcctgggactgggaaactggttagtgagattgtgatggatggcaaggcgaagagtgcgaagttggggggttgtgatgcttcttggattgatatgtaa

SEQ ID NO: 27337 - protein, 451 aa, Muscodor strobelii
  misc_feature: SGI Peptide ID NO. 569363
  misc_feature (6)..(430): Pfam Id: PF01266 Pfam Desc: FAD dependent oxidoreductase
  misc_feature (8)..(445): NCBI GI: 226277987 Blast Desc: highly conserved oxidoreductase [Paracoccidioides brasiliensis Pb01]
  misc_feature (8)..(445): NCBI GI: 226293263 Blast Desc: highly conserved oxidoreductase [Paracoccidioides brasiliensis Pb18]
  misc_feature (1)..(445): NCBI GI: 115386380 Blast Desc: conserved [Aspergillus terreus NIH2624] gi|114190729|gb|EAU32429.1| conserved [Aspergillus terreus NIH2624]
  misc_feature (17)..(445): NCBI GI: 238494210 Blast Desc: fad NAD binding oxidoreductase, [Aspergillus flavus NRRL3357] gi|220694991|gb|EED51334.1| fad NAD binding oxidoreductase, [Aspergillus flavus NRRL3357]
  misc_feature (17)..(445): NCBI GI: 255945973 Blast Desc: Pc20g12690 [Penicillium chrysogenum Wisconsin 54-1255] gi|211588489|emb|CAP86598.1| Pc20g12690 [Penicillium chrysogenum Wisconsin 54-1255]
  misc_feature (2)..(445): NCBI GI: 121703760 Blast Desc: FAD dependent oxidoreductase, [Aspergillus clavatus NRRL 1] gi|119398288|gb|EAW08718.1| FAD dependent oxidoreductase, [Aspergillus clavatus NRRL 1]
  misc_feature (17)..(445): NCBI GI: 145250335 Blast Desc: An15g01410 [Aspergillus niger] gi|134082200|emb|CAL00955.1| protein product [Aspergillus niger]
  misc_feature (17)..(445): NCBI GI: 239614602 Blast Desc: conserved [Ajellomyces dermatitidis ER-3]
  misc_feature (17)..(445): NCBI GI: 261196213 Blast Desc: FAD dependent oxidoreductase [Ajellomyces dermatitidis SLH14081] gi|239587643|gb|EEQ70286.1| FAD dependent oxidoreductase [Ajellomyces dermatitidis SLH14081]
  misc_feature (17)..(445): NCBI GI: 67540870 Blast Desc: AN6605.2 [Aspergillus nidulans FGSC A4] gi|40738944|gb|EAA58134.1| AN6605.2 [Aspergillus nidulans FGSC A4]
MSQPKEITIIGGGIIGCSSAYFLTRHPSYSPSTHRITLLEAASTNTGGRTKDSIQDPATLADPESSSKRNPAHDGIASGASGKAGGLLALWAFPREIVPLSFKLHEELAREHEGEKRWGYRRCWASQVDCKARLPPGLSGNAAGDAEGGGEAIKGLHKDHKKSAAALKKLGAPDDLDWVDAEALGAYDNMGTPENTAQVHPELFTRSMASLAEEGGVRIVTGARVTSINTGEKGVESVVYVKDGEEITIPTTDAVVAAGPWTKTLLPGVPVTASRAHSVVIKTQEPVSAYALFTAIRLPSGFRTPVWKSSPKGTSVATPLKGTQIVEPEIYARPDGTAYACGPTDDAPLPRGTEDVEVDEARCEDIVAQVGGISEQLRDGEVLARQACFLPQGGPYIGNVGGVRGLVVAAGHTCWGIQNAPGTGKLVSEIVMDGKAKSAKLGGCDASWIDM

SEQ ID NO: 27338 - DNA, 1953 bp, Muscodor strobelii
  misc_feature: SGI EST ID NO. CUFF.64478.0
  misc_feature: Variant of the nucleotide sequence at SEQ ID NO 27336
agaacatgggcacctaagtggcaacaagcaaattaatatagcgatctgagatctacactcatagatcttcgctcttctcacatggttattttcactattcactacgcaaacaagccagcaactgcatgtacaaccccctttcacgtctcccatccttctatctcgtcagacatacacacaccaacttcactatgtctcaaccaaaggaaataaccatcataggcggcggtataatcggctgcagcagcgcctatttcctaacacgccacccctcatactcaccctcaacgcaccgcataacgcttctcgaagcagcctccacaaacacaggagggcggacaaaagacagcattcaagaccccgccacactcgcagatccagaatcgtcatcaaagagaaatccagcacatgacggcatcgcgagtggtgcaagtggaaaagcagggggtttacttgcgctctgggcatttcctagggagatcgtgccgctgagttttaagctacatgaggaactcgcgagggaacacgagggagagaagagatgggggtacagacggtgttgggctagtcaggtcgactgtaaagcccgcctaccgcccggtctatcaggtaatgcggcaggagatgctgagggtgggggagaggcaatcaagggcttgcataaagaccataagaagagcgctgcggcactgaagaagttgggtgcgccggatgatctagattgggttgatgctgaggcgctgggcgcttatgataatatggggacacctgagaataccgcacaggttcaccctgagcttttcactaggagtatggctagtcttgctgaggagggtggcgtgaggattgttacgggggcgagggttacgagtatcaataccggtgagaaaggggtggagagtgtggtttatgtgaaagatggggaggaaatcacaattccgacgacggatgcagttgttgcggctggaccgtggacgaagactttgctccccggtgtccctgtcacggcgagtcgagcgcatagtgtggttatcaagacgcaggagcctgtgtcggcgtatgcgttgttcacggcgatcagactaccgtctgggttcaggacgccggtttggaaatcaagccccaaggggacgagtgttgcgaccccgttgaaggggactcagatcgtggagccggagatttatgccaggcctgatgggacggcgtatgcgtgcgggccgactgacgatgcgccgttaccgcggggaacggaggacgtggaggttgatgaggcgaggtgtgaggatattgttgcgcaggttggggggattagtgagcagcttcgggatggagaggtgcttgcgagacaggcttgcttcttaccgcagggtgggccgtatattgggaatgtgggtggtgtgaggggtctggttgttgcggctggtcatacgtgttggggcattcagaatgcgcctgggactgggaaactggttagtgagattgtgatggatggcaaggcgaagagtgcgaagttggggggttgtgatgcttcttggattgatatgtaagagggacgaggaagagggaagagagcatgtggtgttgtgtgatattaggtagatgtttgaatggaatattcaatgctggaggtatcagctagtacgttatatagcacgataatgagctcgattcctaaaaaaacccaccagaacaaaactgtcatcctagatggcgcagtggtacagtcgtcagactcccaccttagaggtaccagaccaccggttcgagccccgctccagtcaattcgacccgtcggaaggtgcataccgacctgtataactatctcaatccacttaaaagaagatttattttctttttttcccctttgtctctctctcatctgacggcagagttgcgcaatcgttttactatgcgtggcttcgagatgagatttgtatgatacttagatcgtca

SEQ ID NO: 27339 - DNA, 315 bp, Muscodor strobelii
  misc_feature: SGI cDNA ID NO. 569364
  misc_feature: Elevated expression when VOC is produced
  misc_feature: Encodes the peptide sequence at SEQ ID NO 27340
atggtctcggcttctcacgtcggcggttcgcccaattccgaccagtcaacccccatcgcctgctcgtgtgtttgtaacggacagcaccgcatggacgccgaagatcctctgatccgcggattaagcgaattgacagacatgctcggtcaagtgattacctcaaatgcggcaatatcgcagcagctgactgccctgacccaaacccaagagaacacatgggcgcaggttgtgggcattcttcaggtgtgcctcggacagaacgcgggtatgccgattgcaggcgaggttggtccgggtccgttctttacacagtga

SEQ ID NO: 27340 - protein, 104 aa, Muscodor strobelii
  misc_feature: SGI Peptide ID NO. 569364
  misc_feature: Useful for introducing or modulating the production of volatile compounds
MVSASHVGGSPNSDQSTPIACSCVCNGQHRMDAEDPLIRGLSELTDMLGQVITSNAAISQQLTALTQTQENTWAQVVGILQVCLGQNAGMPIAGEVGPGPFFTQ

SEQ ID NO: 27341 - DNA, 1572 bp, Muscodor strobelii
  misc_feature: SGI EST ID NO. CUFF.64531.1
  misc_feature: Variant of the nucleotide sequence at SEQ ID NO 27339
ttatgccgacgaggataacgagcactgacccgccccggcgcttattgctattgagtattctgacagaagtcgtcgccctggctagggcagcgtccatcaccgcaacgtcagatcgcctgtagttgagaatatttgagctttcgctcatattaataatgacggcgacgctcgcatcatgcttggtaacagacttgaataactatagtatgaaaactctagaacgcaaacctggaccggacaaggggacaaagattgattgtcagcacaaaccgttcagttctacatacatcaactagcaggccttgccacaggttcgggagcgggcgatgttggtcattggtgattttctcggccttcacattccttctccgcaaggacaaacagacagcaagggaggatggcatcggacgttcaaatcatctctccgtgttcaccttatatttacgcaacctcggtaggcattcgaaatagatctatttctcctaccatctagttttcaagtcctcgtcgtaaacagactttttgcttcagaaaatggcgtcaaatcgaacgaccccagggaatcctatccaaatctcgcaatctcaggcggaacgtggctccgatcaggatcgcactcggcaccaacgtcgacgacgacgtggtccctacccaatgccacagcctcaagtgcagcttgccccgcggtatccggaagcaatggtctcggcttctcacgtcggcggttcgcccaattccgaccagtcaacccccatcgcctgctcgtgtgtttgtaacggacagcaccgcatggacgccgaagatcctctgatccgcggattaagcgaattgacagacatgctcggtcaagtgattacctcaaatgcggcaatatcgcagcagctgactgccctgacccaaacccaagagaacacatgggcgcaggttgtgggcattcttcaggtgtgcctcggacagaacgcgggtatgccgattgcaggcgaggttggtccgggtccgttctttacacagtgacgaggaattaggttcatttgcgaataattatacattaagtgcaaaactcactattagactggacgtgtgagcagttcttcacagaataatagccacacgaagattgttcattggcgcgtcattttcttcccaataaaaattcccgcaatgtacaagctagtcggccccaagtcgtagctctggcccattcaggcatgtgcttccgacggcctttcgagtccattggttcgatctcgacattggttaccggcaggacggtacgctaaagcaagagtcatacatgcttaagcggctgtgcagttcgccagcagctctgaaaatgggcaggtagaggtctcacggaatgcatcatagctacaatagacagcctgggttatatactaactagcccggctattctactattcgatgtgatctatgcgaactactgtgacagacacgcagcagtccctgagctccttctctggggccggagaatagcgaggattcgctgcgccacgacgcccacagggactgtctgctgttggttcggttgtttgtggccccctgcaaccttcg

SEQ ID NO: 27342 - DNA, 887 bp, Muscodor strobelii
  misc_feature: SGI cDNA ID NO. 569365
  misc_feature: Encodes the peptide sequence at SEQ ID NO 27343
atgacagagcaaggatgcgggacgaataatcgcgaaatcgagaacggcacgatcagacagcagtctgaggccaccgaaaagtctatggttcaagatcgaggcgaggcgaaagggtgtcagacacagagtaatgatcgcgtcattggaagtaactcgggtgtgctcttgcattgcgataccaaacgtgactcttcacacacctcgccccctaccacgaagctcaagcctccagtgaccaaggagaccctgggggagttagacttcactgagcttatctgtaacgcgaagttacgccatgacatcaattttgatcccggtcttcatttgcggccggacgtggatggcgacaagggtaagatgaagcagttaatggctgatcagttctgggagaccctccaaactcagctagccctgttcttgacggacagacgcagcttcatgattcagcacggaaatattgaaagctggtcgttaccattgcttctgcgatcaataagtgatattattgtcacgataataccaacacacgatcgtttataccttcatcaagcctttgatgttgaactgatcatgcaacagtttaacaacggagtggtcgatgtagagaagctggcatgctggctgtctgggctgctcaagtcacactgtgcccctatgagagatcaatgggcggataagatgtacggccagatagccaagggcaacaggacgaacgatgtgagcttgctagtgcaaggtttccgtagcctcctcagcttgttggaggctatgagattggacattgcgaatcaccagatcagaatgctacgccctacgatgatcgaggataccgtgcatttcgaacaggcctactttgttgacgagattcgacagcggcgattagacgc

SEQ ID NO: 27343 - protein, 295 aa, Muscodor strobelii
  misc_feature: SGI Peptide ID NO. 569365
  misc_feature (96)..(293): Pfam Id: PF05794 Pfam Desc: T-complex protein 11
  misc_feature (68)..(294): NCBI GI: 145607059 Blast Desc: MGG_12111 [Magnaporthe grisea 70-15] gi|145014662|gb|EDJ99230.1| MGG_12111 [Magnaporthe grisea 70-15]
  misc_feature (74)..(294): NCBI GI: 85079471 Blast Desc: NCU03466 [Neurospora crassa OR74A] gi|18376089|emb|CAD21116.1| related to SOK1 protein [Neurospora crassa] gi|28917416|gb|EAA27119.1| NCU03466 [Neurospora crassa
  misc_feature (30)..(294): NCBI GI: 116200047 Blast Desc: CHGG_08179 [Chaetomium globosum CBS 148.51] gi|88179458|gb|EAQ86926.1| CHGG_08179 [Chaetomium globosum CBS 148.51]
  misc_feature (63)..(295): NCBI GI: 46121661 Blast Desc: FG05209.1 [Gibberella zeae PH-1]
  misc_feature (38)..(294): NCBI GI: 171689948 Blast Desc: protein product [Podospora anserina] gi|170944936|emb|CAP71047.1| protein product [Podospora anserina]
  misc_feature (16)..(295): NCBI GI: 256732965 Blast Desc: NECHADRAFT_38663 [Nectria haematococca mpVI 77-13-4]
  misc_feature (74)..(295): NCBI GI: 154316697 Blast Desc: BC1G_03766 [Botryotinia fuckeliana B05.10] gi|150845378|gb|EDN20571.1| BC1G_03766 [Botryotinia fuckeliana B05.10]
  misc_feature (72)..(295): NCBI GI: 156050921 Blast Desc: SS1G_08048 [Sclerotinia sclerotiorum 1980] gi|154692448|gb|EDN92186.1| SS1G_08048 [Sclerotinia sclerotiorum 1980]
  misc_feature (64)..(243): NCBI GI: 261356815 Blast Desc: conserved [Verticillium albo-atrum VaMs.102]
  misc_feature (50)..(295): NCBI GI: 199434093 Blast Desc: DEHA2G10604p [Debaryomyces hansenii]
MTEQGCGTNNREIENGTIRQQSEATEKSMVQDRGEAKGCQTQSNDRVIGSNSGVLLHCDTKRDSSHTSPPTTKLKPPVTKETLGELDFTELICNAKLRHDINFDPGLHLRPDVDGDKGKMKQLMADQFWETLQTQLALFLTDRRSFMIQHGNIESWSLPLLLRSISDIIVTIIPTHDRLYLHQAFDVELIMQQFNNGVVDVEKLACWLSGLLKSHCAPMRDQWADKMYGQIAKGNRTNDVSLLVQGFRSLLSLLEAMRLDIANHQIRMLRPTMIEDTVHFEQAYFVDEIRQRRLD

SEQ ID NO: 27344 - DNA, 1406 bp, Muscodor strobelii
  misc_feature: SGI EST ID NO. CUFF.64506.0
  misc_feature: Variant of the nucleotide sequence at SEQ ID NO 27342
ccgaccgggatatgatccctttgttgcccaacactcatccaacatatatagggaagtctctgagatctatcactataatacttaacctgataccctagtacgcgcccagattcaccatatgcagatgtaaagaatgcgaactagtataaatccattacagtaatgcacatgctgagaagagtcggacaatttcatcttcccgaatctattccaggctcgtaaatatctttccggcctccagtgtcacgctggtcactgcaacacaattctcgccgcggcctttgcttcattagcttggctttccgtctattggactggcgggccggactcataaaacgcttgagttctgccagtccatcagtctgtttagtctgttccgtccctttccaatacttttcatctatacactctctctggcctcggctggccacaaatgccacggtagtcctcgtccccacctctacacggacactcgaacgccgacacatcaaacaaagacttctacgacgaattagccctagatgacagagcaaggatgcgggacgaataatcgcgaaatcgagaacggcacgatcagacagcagtctgaggccaccgaaaagtctatggttcaagatcgaggcgaggcgaaagggtgtcagacacagagtaatgatcgcgtcattggaagtaactcgggtgtgctcttgcattgcgataccaaacgtgactcttcacacacctcgccccctaccacgaagctcaagcctccagtgaccaaggagaccctgggggagttagacttcactgagcttatctgtaacgcgaagttacgccatgacatcaattttgatcccggtcttcatttgcggccggacgtggatggcgacaagggtaagatgaagcagttaatggctgatcagttctgggagaccctccaaactcagctagccctgttcttgacggacagacgcagcttcatgattcagcacggaaatattgaaagctggtcgttaccattgcttctgcgatcaataagtgatattattgtcacgataataccaacacacgatcgtttataccttcatcaagcctttgatgttgaactgatcatgcaacagtttaacaacggagtggtcgatgtagagaagctggcatgctggctgtctgggctgctcaagtcacactgtgcccctatgagagatcaatgggcggataagatgtacggccagatagccaagggcaacaggacgaacgatgtgagcttgctagtgcaaggtttccgtagcctcctcagcttgttggaggctatgagattggacattgcgaatcaccagatcagaatgctacgccctacgatgatcgaggataccgtgcatttcgaacaggcctactttgttgacgagattcgacagcggcgattagac

SEQ ID NO: 27345 - DNA, 1332 bp, Muscodor strobelii
  misc_feature: SGI cDNA ID NO. 569366
  misc_feature: Elevated expression when VOC is produced
  misc_feature: Encodes the peptide sequence at SEQ ID NO 27346
atggaagacataaaacccgatgtcgaaaaaggtggtgacactggatcagcgcaccgaaatgtcgacgatattccttcgcctcatgaggagcaagccgtcattaggaagttggactggcatctaatgcccatgatttttgccatctactcgttgtctgtcctcgacagatcaaatctaggtaatgctcatgttgcaggtctggatgagagcatcggtcttcacggcaatcaatactcaaccctcggaactttattctacgtgacgtacatcattttccagctattcggtgcggctgggtggaagcattttccggcccacatctgggttgcgtgcattgtactttcattcgccacaatctcctctgctcaggcagcggtgaagaactatgctggtatggtcgtgttgcgactcttccttggagcgacagaggcattgtattctgcagtgcccgtgtacctctcattcttctatccaaagaacaaagtcggctttcgacaaggcatattcctatctgggtcggctctggcgaacgcatatggcggggctctgggctacgcaatcacacacattcaaagtccgagaatagacccatggaggatattgttccttattgaggggttgccgacacttatcttggttttcgttgccttcttcttctttccagatgacatagaaagcgccaaatttctcaacattcgcgagaaagaggttgtgaaacatatggtgaaccggggtcagactgcagatgttgaagatcatatcggattgagaatgaacgatttttgggccgcttttaaggactggaagagttatgtaactggcataatgtacttcagtgtgaatgtctgctttgcgtcactaccgctgttcgttccaacgatcattgctgagatcggcacgttttcaaaactcgaggcaaacgggctctctgcccctccttacttattgactttcattctgatcatcatcgtctcattcatctcagacgcaactcgtgtccgcggtccctacgtctgtttcttcggtatcgtatctgcgatcggattcttgctattagcgacgacagaggcagcggcaccaaggtatatcggtgtgtacttggccattacagtctttgtctgtgtagcaattcttctagtctgggttacgaataatcataataccgagagcaaaagagccggaggttttgctatttttgctgcgtttgggcaagctgggccattgctaggcacgaatattttcccgccaagtgatagcccttactatcgtctctttttcattttgcctgctggtcgcagtcacttcagcaaccttcagctttttactccataa

SEQ ID NO: 27346 - protein, 443 aa, Muscodor strobelii
  misc_feature: SGI Peptide ID NO. 569366
  misc_feature (45)..(411): Pfam Id: PF07690 Pfam Desc: Major Facilitator Superfamily
  misc_feature (24)..(422): NCBI GI: 46139249 Blast Desc: FG11139.1 [Gibberella zeae PH-1]
  misc_feature (2)..(423): NCBI GI: 115399112 Blast Desc: [Aspergillus terreus NIH2624] gi|114192028|gb|EAU33728.1| [Aspergillus terreus NIH2624]
  misc_feature (3)..(423): NCBI GI: 145234460 Blast Desc: An02g14720 [Aspergillus niger] gi|134057547|emb|CAK48901.1| protein product [Aspergillus niger]
  misc_feature (1)..(423): NCBI GI: 225681985 Blast Desc: conserved [Paracoccidioides brasiliensis Pb03]
  misc_feature (1)..(423): NCBI GI: 226289157 Blast Desc: conserved [Paracoccidioides brasiliensis Pb18]
  misc_feature (1)..(423): NCBI GI: 226281213 Blast Desc: conserved [Paracoccidioides brasiliensis Pb01]
  misc_feature (26)..(422): NCBI GI: 189211381 Blast Desc: pantothenate transporter liz1 [Pyrenophora tritici-repentis Pt-1C-BFP] gi|187978114|gb|EDU44740.1| pantothenate transporter liz1 [Pyrenophora tritici-repentis
  misc_feature (20)..(422): NCBI GI: 238487978 Blast Desc: MFS transporter, [Aspergillus flavus NRRL3357] gi|220700106|gb|EED56445.1| MFS transporter, [Aspergillus flavus NRRL3357]
  misc_feature (12)..(422): NCBI GI: 261192332 Blast Desc: MFS transporter [Ajellomyces dermatitidis SLH14081] gi|239589448|gb|EEQ72091.1| MFS transporter [Ajellomyces dermatitidis SLH14081]
  misc_feature (1)..(422): NCBI GI: 145243280 Blast Desc: An11g01720 [Aspergillus niger] gi|134078847|emb|CAK45906.1| protein product [Aspergillus niger]
  misc_feature: Useful for introducing or modulating the production of volatile compounds
MEDIKPDVEKGGDTGSAHRNVDDIPSPHEEQAVIRKLDWHLMPMIFAIYSLSVLDRSNLGNAHVAGLDESIGLHGNQYSTLGTLFYVTYIIFQLFGAAGWKHFPAHIWVACIVLSFATISSAQAAVKNYAGMVVLRLFLGATEALYSAVPVYLSFFYPKNKVGFRQGIFLSGSALANAYGGALGYAITHIQSPRIDPWRILFLIEGLPTLILVFVAFFFFPDDIESAKFLNIREKEVVKHMVNRGQTADVEDHIGLRMNDFWAAFKDWKSYVTGIMYFSVNVCFASLPLFVPTIIAEIGTFSKLEANGLSAPPYLLTFILIIIVSFISDATRVRGPYVCFFGIVSAIGFLLLATTEAAAPRYIGVYLAITVFVCVAILLVWVTNNHNTESKRAGGFAIFAAFGQAGPLLGTNIFPPSDSPYYRLFFILPAGRSHFSNLQLFTP

SEQ ID NO: 27347 - DNA, 4142 bp, Muscodor strobelii
  misc_feature: SGI EST ID NO. CUFF.64602.0
  misc_feature: Variant of the nucleotide sequence at SEQ ID NO 27345
gagttcacctagcatcagtattcccgtgtatctaatcaatactgactattccctgcgtttctccatttccgacctttctggggtaccccgcactcctcgcaaatcatcgttgtatgcttgttatacttcagacgacccttgttctgcgagatgctagatgtccagcaagaagaaccgactctcaagaccaggtatcgaatacggcgcctggcggcatgggaatgaagtgctttaagtgatgtttcactgctcattctctgagaacgcgatgaagtttcgacactttcatgacgcgaccgacttctacacagggaataaacgccgatctggggtcacattcatcttgggagatagcctactgaagttgcaaggataacgtgagcattccccgcgcatctccacgtcgaatattgtgcagaggtttcagctcaagacggttgcctcaatcgctacttgcgaatcatcaatcagacctctcacttattgctgtttcggtgtcctcgtctccgaatggaagacataaaacccgatgtcgaaaaaggtggtgacactggatcagcgcaccgaaatgtcgacgatattccttcgcctcatgaggagcaagccgtcattaggaagttggactggcatctaatgcccatgatttttgccatctactcgttgtctgtcctcgacagatcaaatctaggtaatgctcatgttgcaggtctggatgagagcatcggtcttcacggcaatcaatactcaaccctcggaactttattctacgtgacgtacatcattttccagctattcggtgcggctgggtggaagcattttccggcccacatctgggttgcgtgcattgtactttcattcgccacaatctcctctgctcaggcagcggtgaagaactatgctggtatggtcgtgttgcgactcttccttggagcgacagaggcattgtattctgcagtgcccgtgtacctctcattcttctatccaaagaacaaagtcggctttcgacaaggcatattcctatctgggtcggctctggcgaacgcatatggcggggctctgggctacgcaatcacacacattcaaagtccgagaatagacccatggaggatattgttccttattgaggggttgccgacacttatcttggttttcgttgccttcttcttctttccagatgacatagaaagcgccaaatttctcaacattcgcgagaaagaggttgtgaaacatatggtgaaccggggtcagactgcagatgttgaagatcatatcggattgagaatgaacgatttttgggccgcttttaaggactggaagagttatgtaactggcataatgtacttcagtgtgaatgtctgctttgcgtcactaccgctgttcgttccaacgatcattgctgagatcggcacgttttcaaaactcgaggcaaacgggctctctgcccctccttacttattgactttcattctgatcatcatcgtctcattcatctcagacgcaactcgtgtccgcggtccctacgtctgtttcttcggtatcgtatctgcgatcggattcttgctattagcgacgacagaggcagcggcaccaaggtatatcggtgtgtacttggccattacagtctttgtctgtgtagcaattcttctagtctgggttacgaataatcataataccgagagcaaaagagccggaggttttgctatttttgctgcgtttgggcaagctgggccattgctaggcacgaatattttcccgccaagtgatagcccttactatcgtaaggggtcatgggtctctttttcattttgcctgctggtcgcagtcacttcagcaaccttcagctttttactccataaggaaaataagaagttaaatgaaaagtcagtcgcagagggtagagagaattcggaaagcgacttcagatatgtcatttgaagatggggtttcggatcagagaggctcttgtaggagtacgcagccccccacgcatcaagtttgtcactgtgccatcgtagatatccatgtcctcaacagaaaccggttcacgaaacactttctagaaatctcattccagctgcgctagcatatcagggtcagccgccatttctttgttggggaatagtgaagtaaatatatctgggactcgaatgcccgaaagaattcaccctggagcgagaagagatagaaagcgtaaagcaatgcacgcccaaatattactcggcacgagtatacatgcagttgtaaaattgcgaaaattgtcgagagaagccatgccatcacatgcacctcgtttatattgctcaagtccgaccgaaacgcgaaaaggggtatcgtgtgccaagtctaaaaactctatggggtatatgaacaccatgctcctatgcaaaacagcaggtcgcaaacaaggtcgtcaaacgcccaaaatgcctcaagtctcatctaaagccatgccctagcactgaaagaagaataaaatgttagaaagtcataaaatacgtatattcaactagtcgggaaggaaaacattaccaagcttcccatctctgcccaccaagggcaataagacgattgaacaactcgtctctaagcggcagcgccgtaatacgtagcaaattgccttctctgtctcgaatctcaagcccatcattcacctcccgacccaacgaccaaccaaccaacaacttcgccttccaaccgtaacccccaatcttcttcaactccgcaatgtcaccaatagcaatactccatttcggatgaagattctcatctgacccatcattctcagtcgttatatctgtgctaaagccaacagctggaatggtagactttgtcgttatatatactcttcccttcttgccattgtatcgtgcgacgaagtccacgggaccagacaaagaggcttccttcgaggatggaaccgctccaagtcgagcttttgcatggtccgatccagctttggctcgtgccgcatcaccagcaatgacgctcttcactgttcctttcattgtccccttgatgagactaattaccttacgacccttgtgaccgtgctttccaggcttcgccgcgtcgatatcagcgccgctagtctcgtgagctgtgttaggatcatgttgcatcgcttcctcaagctctgcgtctgttgcattgaggggaggctcggctccggttgccctcagctcggcgtcagtgatctcagctggctgatctgggggcgggaccgaaacgcgtggtgggggaggtaagggcgcgttattcgattctccaattcgaagtaaggtcaaggttaactgcgcgttggtcggcactccttttagaatagtgttacgtatctcaagcagcttctgccagttgggaatttttcggttgaggaacgctaagccacgtgaaatcagaggctggccgaagaatccaaagccagcaccgaaagtgacacctttcatgaacatgtaagacgttacgaaaagtgacacaaggagcattggagcaacgagtccagcgagccggagacggtaggtattctgaggaaaaggaggggtaggggacagcgcgttggcaaatcgttcccagccatccgttacatcgctgatgccatgcatgacgggacgcatcttagaccaaatagcattctcaacaggtactttggtcttatcgtgtttagctcctggctgaccgccagctgcaacatctttggcttcggcggccgagacagccaatgctgtcgggtcaggcacctcattttctaggggagcgttctcctcctgtgtatggggcgtcgattgcgggtgttttcctgttgcactagtcacgacgaccgctgtgaagccattgaaaaagttcgcggcctcctgctcaacagcttcgcccttgtggttttctggggctccagtggcactctcatgactcccaagaacacctgatttaggtttctgtacaccgccggacttcgagtcgacaagagcaataggggctggcgggaagaggatcgggcgagatggtgggtagacgatcagtgtaaccagtgtggcgacaagcaatggagtgacgagatcgaatatccatgcagtgaagtaagcctacatggcgttagcttattgtcccatgggaaaagcattgcagaagcgaaggaacgtacagcgcag

SEQ ID NO: 27348 - DNA, 2079 bp, Muscodor strobelii
  misc_feature: SGI cDNA ID NO. 569367
  misc_feature: Encodes the peptide sequence at SEQ ID NO 27349
atgtctgccccagaagaggacacgccagccagcaccactgccttggatgcagtgaaggacatcctcccaatccctgcgactacagatccagtcacagatccagagaagactcatcttgccaacagtctcgcagaggagccgacactctctcactcgctcgctatggccgaccatgaggagaagggtcatgttcagaccggatgggacgaagaggcgaaggatttaggttggaataggaaaaaagagaatattccgacccctctcgtcggtggcattggaaatgaagacttgtggttgctcactcgtcgctttaataagcaagtatatcacgttaaagaggtgcctcataatgtacctggagacttggacctcaatatatcagacgaagaagagttctctcctgacaagctaagggcgaccgttgagaggttttacatgacagtcattatcagcctattggcagtcgtcaaacatattgccagactacgatcctggcgtgaaacgcggcgaacatcatgcttctgcgctgcttacttcactgcatggatattcgatctcgtcactccattgcttgtcgccacactggttacactgatcgtctacccaccatctcgcccgatcctcttcccgccagcccctattgctcttgtcgactcgaagtccggcggtgtacagaaacctaaatcaggtgttcttgggagtcatgagagtgccactggagccccagaaaaccacaagggcgaagctgttgagcaggaggccgcgaactttttcaatggcttcacagcggtcgtcgtgactagtgcaacaggaaaacacccgcaatcgacgccccatacacaggaggagaacgctcccctagaaaatgaggtgcctgacccgacagcattggctgtctcggccgccgaagccaaagatgttgcagctggcggtcagccaggagctaaacacgataagaccaaagtacctgttgagaatgctatttggtctaagatgcgtcccgtcatgcatggcatcagcgatgtaacggatggctgggaacgatttgccaacgcgctgtcccctacccctccttttcctcagaatacctaccgtctccggctcgctggactcgttgctccaatgctccttgtgtcacttttcgtaacgtcttacatgttcatgaaaggtgtcactttcggtgctggctttggattcttcggccagcctctgatttcacgtggcttagcgttcctcaaccgaaaaattcccaactggcagaagctgcttgagatacgtaacactattctaaaaggagtgccgaccaacgcgcagttaaccttgaccttacttcgaattggagaatcgaataacgcgcccttacctcccccaccacgcgtttcggtcccgcccccagatcagccagctgagatcactgacgccgagctgagggcaaccggagccgagcctcccctcaatgcaacagacgcagagcttgaggaagcgatgcaacatgatcctaacacagctcacgagactagcggcgctgatatcgacgcggcgaagcctggaaagcacggtcacaagggtcgtaaggtaattagtctcatcaaggggacaatgaaaggaacagtgaagagcgtcattgctggtgatgcggcacgagccaaagctggatcggaccatgcaaaagctcgacttggagcggttccatcctcgaaggaagcctctttgtctggtcccgtggacttcgtcgcacgatacaatggcaagaagggaagagtatatataacgacaaagtctaccattccagctgttggctttagcacagatataacgactgagaatgatgggtcagatgagaatcttcatccgaaatggagtattgctattggtgacattgcggagttgaagaagattgggggttacggttggaaggcgaagttgttggttggttggtcgttgggtcgggaggtgaatgatgggcttgagattcgagacagagaaggcaatttgctacgtattacggcgctgccgcttagagacgagttgttcaatcgtcttattgcccttggtgggcagagatgggaagcttggtaa

SEQ ID NO: 27349 - protein, 692 aa, Muscodor strobelii
  misc_feature: SGI Peptide ID NO. 569367
  misc_feature (19)..(692): NCBI GI: 189204906 Blast Desc: conserved [Pyrenophora tritici-repentis Pt-1C-BFP] gi|187985887|gb|EDU51375.1| conserved [Pyrenophora tritici-repentis Pt-1C-BFP]
  misc_feature (20)..(692): NCBI GI: 169599410 Blast Desc: SNOG_02526 [Phaeosphaeria nodorum SN15] gi|160704603|gb|EAT90738.2| SNOG_02526 [Phaeosphaeria nodorum SN15]
  misc_feature (18)..(692): NCBI GI: 171678489 Blast Desc: protein product [Podospora anserina] gi|170937314|emb|CAP61971.1| protein product [Podospora anserina]
  misc_feature (18)..(692): NCBI GI: 164427024 Blast Desc: NCU02321 [Neurospora crassa OR74A] gi|157071573|gb|EAA30184.2| conserved [Neurospora crassa OR74A]
  misc_feature (47)..(692): NCBI GI: 156030534 Blast Desc: SS1G_14491 [Sclerotinia sclerotiorum 1980] gi|154700882|gb|EDO00621.1| SS1G_14491 [Sclerotinia sclerotiorum 1980]
  misc_feature (47)..(692): NCBI GI: 154290157 Blast Desc: BC1G_15771 [Botryotinia fuckeliana B05.10] gi|150848432|gb|EDN23625.1| BC1G_15771 [Botryotinia fuckeliana B05.10]
  misc_feature (33)..(690): NCBI GI: 242784062 Blast Desc: conserved [Talaromyces stipitatus ATCC 10500] gi|218720458|gb|EED19877.1| conserved [Talaromyces stipitatus ATCC 10500]
  misc_feature (31)..(692): NCBI GI: 261354342 Blast Desc: conserved [Verticillium albo-atrum VaMs.102]
  misc_feature (47)..(692): NCBI GI: 145233271 Blast Desc: An02g08740 [Aspergillus niger] gi|134056936|emb|CAK44283.1| [Aspergillus niger]
  misc_feature (25)..(689): NCBI GI: 255945411 Blast Desc: Pc20g09790 [Penicillium chrysogenum Wisconsin 54-1255] gi|211588208|emb|CAP86308.1| Pc20g09790 [Penicillium chrysogenum Wisconsin 54-1255]
MSAPEEDTPASTTALDAVKDILPIPATTDPVTDPEKTHLANSLAEEPTLSHSLAMADHEEKGHVQTGWDEEAKDLGWNRKKENIPTPLVGGIGNEDLWLLTRRFNKQVYHVKEVPHNVPGDLDLNISDEEEFSPDKLRATVERFYMTVIISLLAVVKHIARLRSWRETRRTSCFCAAYFTAWIFDLVTPLLVATLVTLIVYPPSRPILFPPAPIALVDSKSGGVQKPKSGVLGSHESATGAPENHKGEAVEQEAANFFNGFTAVVVTSATGKHPQSTPHTQEENAPLENEVPDPTALAVSAAEAKDVAAGGQPGAKHDKTKVPVENAIWSKMRPVMHGISDVTDGWERFANALSPTPPFPQNTYRLRLAGLVAPMLLVSLFVTSYMFMKGVTFGAGFGFFGQPLISRGLAFLNRKIPNWQKLLEIRNTILKGVPTNAQLTLTLLRIGESNNAPLPPPPRVSVPPPDQPAEITDAELRATGAEPPLNATDAELEEAMQHDPNTAHETSGADIDAAKPGKHGHKGRKVISLIKGTMKGTVKSVIAGDAARAKAGSDHAKARLGAVPSSKEASLSGPVDFVARYNGKKGRVYITTKSTIPAVGFSTDITTENDGSDENLHPKWSIAIGDIAELKKIGGYGWKAKLLVGWSLGREVNDGLEIRDREGNLLRITALPLRDELFNRLIALGGQRWEAW

SEQ ID NO: 27350 - DNA, 2760 bp, Muscodor strobelii
  misc_feature: SGI EST ID NO. CUFF.64603.2
  misc_feature: Variant of the nucleotide sequence at SEQ ID NO 27348
tattgccagactacgatcctggcgtgaaacgcggcgaacatcatgcttctgcgctgcttacttcactgcatggatattcgatctcgtcactccattgcttgtcgccacactggttacactgatcgtctacccaccatctcgcccgatcctcttcccgccagcccctattgctcttgtcgactcgaagtccggcggtgtacagaaacctaaatcaggtgttcttgggagtcatgagagtgccactggagccccagaaaaccacaagggcgaagctgttgagcaggaggccgcgaactttttcaatggcttcacagcggtcgtcgtgactagtgcaacaggaaaacacccgcaatcgacgccccatacacaggaggagaacgctcccctagaaaatgaggtgcctgacccgacagcattggctgtctcggccgccgaagccaaagatgttgcagctggcggtcagccaggagctaaacacgataagaccaaagtacctgttgagaatgctatttggtctaagatgcgtcccgtcatgcatggcatcagcgatgtaacggatggctgggaacgatttgccaacgcgctgtcccctacccctccttttcctcagaatacctaccgtctccggctcgctggactcgttgctccaatgctccttgtgtcacttttcgtaacgtcttacatgttcatgaaaggtgtcactttcggtgctggctttggattcttcggccagcctctgatttcacgtggcttagcgttcctcaaccgaaaaattcccaactggcagaagctgcttgagatacgtaacactattctaaaaggagtgccgaccaacgcgcagttaaccttgaccttacttcgaattggagaatcgaataacgcgcccttacctcccccaccacgcgtttcggtcccgcccccagatcagccagctgagatcactgacgccgagctgagggcaaccggagccgagcctcccctcaatgcaacagacgcagagcttgaggaagcgatgcaacatgatcctaacacagctcacgagactagcggcgctgatatcgacgcggcgaagcctggaaagcacggtcacaagggtcgtaaggtaattagtctcatcaaggggacaatgaaaggaacagtgaagagcgtcattgctggtgatgcggcacgagccaaagctggatcggaccatgcaaaagctcgacttggagcggttccatcctcgaaggaagcctctttgtctggtcccgtggacttcgtcgcacgatacaatggcaagaagggaagagtatatataacgacaaagtctaccattccagctgttggctttagcacagatataacgactgagaatgatgggtcagatgagaatcttcatccgaaatggagtattgctattggtgacattgcggagttgaagaagattgggggttacggttggaaggcgaagttgttggttggttggtcgttgggtcgggaggtgaatgatgggcttgagattcgagacagagaaggcaatttgctacgtattacggcgctgccgcttagagacgagttgttcaatcgtcttattgcccttggtgggcagagatgggaagcttgtgctagggcatggctttagatgagacttgaggcattttgggcgtttgacgaccttgtttgcgacctgctgttttgcataggagcatggtgttcatataccccatagagtttttagacttggcacacgataccccttttcgcgtttcggtcggacttgagcaatataaacgaggtgcatgtgatggcatggcttctctcgacaattttcgcaattttacaactgcatgtatactcgtgccgagtaatatttgggcgtgcattgctttacgctttctatctcttctcgctccagggtgaattctttcgggcattcgagtcccagatatatttacttcactattccccaacaaagaaatggcggctgaccctgatatgctagcgcagctggaatgagatttctagaaagtgtttcgtgaaccggtttctgttgaggacatggatatctacgatggcacagtgacaaacttgatgcgtggggggctgcgtactcctacaagagcctctctgatccgaaaccccatcttcaaatgacatatctgaagtcgctttccgaattctctctaccctctgcgactgacttttcatttaacttcttattttccttatggagtaaaaagctgaaggttgctgaagtgactgcgaccagcaggcaaaatgaaaaagagacctgattgtagatattagcggtcagtgtgcgtagagatttcaaatagtcctttggcggggtaaagggtgagatttctgcgcatcttttatgacggtgatatactagtgagcaggtaggaaagcgtcgcatacccatgaccccttacgatagtaagggctatcacttggcgggaaaatattcgtgcctagcaatggcccagcttgcccaaacgcagcaaaaatagcaaaacctccggctcttttgctctcggtattatgattattcgtaacccagactagaagaattgctacacagacaaagactgtaatggccaagtacacaccgatataccttggtgccgctgcctctgtcgtcgctaatagcaagaatccgatcgcagatacgataccgaagaaacagacgtagggaccgcggacacgagttgcgtctgagatgaatgagacgatgatgatcagaatgaaagtcaataagtaaggaggggcagagagccc

SEQ ID NO: 27351 - DNA, 816 bp, Muscodor strobelii
  misc_feature: SGI cDNA ID NO. 569368
  misc_feature: Encodes the peptide sequence at SEQ ID NO 27352
atgttgtcaaccaccttcctcaccctcctaaccgcctccgcgcaggcggcaaccgtctacctagcgggcgattcaacaatggcgcccagcggaggcggctccggaaccgagggctggggccagtatctcaagtactcacttccatcaacctacacagtatccaacaaagcgatcgccggccgctcagcacgctccttcacacgagagggcagattccaagccatcgcagacgtagtacaatccggtgattgggtcgtcgtggaattcggtcataatgatgggggaagtctgacaccgactgataatggcaggacggattgctttggtgatggagcgcagacttgccagactacatacaatggcgttgcggagacggtcctgacgtatcctgcgtattataaaaatgcggctagtttgttccttgcgaaaggtgcgaaggtcattttgagttcggctacgcctaataatatttgcgagtctggcacttgcagctggggaccgtcgaggttcgattattatgcttggcttgcggcaagtcaactcggaggcacagcaaagggagtttatcatgttgcgcatggcgaatatgcagcacaggttatggagaatttgggcaagacagttgtcaatgcgcattatccaaacgaccacacgcatacggatccgtatatggcaaatgtcatggctggcagttttgtacttggattgaaatgtggcacatcggcgttgggggccgccgttaagaacacgactgccgaattgaccacgtcgtcgtacggaccttgcatcaagtttaatagtactataccaatttaa

SEQ ID NO: 27352 - protein, 271 aa, Muscodor strobelii
  misc_feature: SGI Peptide ID NO. 569368
  misc_feature (19)..(232): Pfam Id: PF00657 Pfam Desc: GDSL-like Lipase/Acylhydrolase
  misc_feature (19)..(148): Pfam Id: PF00657 Pfam Desc: GDSL-like Lipase/Acylhydrolase
  misc_feature (1)..(263): NCBI GI: 255938415 Blast Desc: Pc13g15830 [Penicillium chrysogenum Wisconsin 54-1255] gi|211584598|emb|CAP92652.1| Pc13g15830 [Penicillium chrysogenum Wisconsin 54-1255]
  misc_feature (2)..(250): NCBI GI: 67524141 Blast Desc: AN2528.2 [Aspergillus nidulans FGSC A4] gi|40745477|gb|EAA64633.1| AN2528.2 [Aspergillus nidulans FGSC A4] gi|95025714|gb|ABF50855.1| rhamnogalacturonan acetylesterase
  misc_feature (6)..(250): NCBI GI: 242814193 Blast Desc: rhamnogalacturonan acetylesterase RgaE [Talaromyces stipitatus ATCC 10500] gi|218714661|gb|EED14084.1| rhamnogalacturonan acetylesterase RgaE [Talaromyces stipitatus
  misc_feature (2)..(250): NCBI GI: 115390368 Blast Desc: rhamnogalacturonan acetylesterase precursor [Aspergillus terreus NIH2624] gi|114195085|gb|EAU36785.1| rhamnogalacturonan acetylesterase precursor [Aspergillus terreus
  misc_feature (17)..(250): NCBI GI: 238495072 Blast Desc: rhamnogalacturonan acetylesterase RgaE [Aspergillus flavus NRRL3357] gi|220695422|gb|EED51765.1| rhamnogalacturonan acetylesterase RgaE [Aspergillus flavus NRRL3357]
  misc_feature (17)..(250): NCBI GI: 169777843 Blast Desc: [Aspergillus oryzae RIB40] gi|83772124|dbj|BAE62254.1| protein product [Aspergillus oryzae]
  misc_feature (17)..(263): NCBI GI: 121706276 Blast Desc: rhamnogalacturonan acetylesterase, [Aspergillus clavatus NRRL 1] gi|119399547|gb|EAW09975.1| rhamnogalacturonan acetylesterase, [Aspergillus clavatus NRRL 1]
  misc_feature (13)..(253): NCBI GI: 26398659 Blast Desc: RHA1_ASPAC RecName: Full=Rhamnogalacturonan acetylesterase; Short=RGAE; Flags: Precursor gi|1004217|emb|CAA61858.1| rhamnogalacturonan acetylesterase
  misc_feature (16)..(254): NCBI GI: 145241768 Blast Desc: RHA1_ASPAC RecName: Full=Rhamnogalacturonan acetylesterase; Short=RGAE; Flags: Precursor gi|1004217|emb|CAA61858.1| rhamnogalacturonan acetylesterase
  misc_feature (2)..(263): NCBI GI: 212544942 Blast Desc: rhamnogalacturonan acetylesterase RgaE [Penicillium marneffei ATCC 18224] gi|210065594|gb|EEA19688.1| rhamnogalacturonan acetylesterase RgaE [Penicillium marneffei
MLSTTFLTLLTASAQAATVYLAGDSTMAPSGGGSGTEGWGQYLKYSLPSTYTVSNKAIAGRSARSFTREGRFQAIADVVQSGDWVVVEFGHNDGGSLTPTDNGRTDCFGDGAQTCQTTYNGVAETVLTYPAYYKNAASLFLAKGAKVILSSATPNNICESGTCSWGPSRFDYYAWLAASQLGGTAKGVYHVAHGEYAAQVMENLGKTVVNAHYPNDHTHTDPYMANVMAGSFVLGLKCGTSALGAAVKNTTAELTTSSYGPCIKFNSTIPI

SEQ ID NO: 27353 - DNA, 1527 bp, Muscodor strobelii
  misc_feature: SGI cDNA ID NO. 569369
  misc_feature: Encodes the peptide sequence at SEQ ID NO 27354
atgagtgacttcgcggcaaggcggctgcagaatgtgcagaagaatgctgccttgttgaaagacacagcggagatcggcgccaagatcaagaaggcagctacgaagcctgtggtcccaaggaaaagacctgccgcggtaccagcaccccgatccacgcggtctaaggaaccagtcgtgccaactcgaaggagtgctcgtcaattaggcgtaaagacggatgacaatgactccagcattaagattgaggatattcccgttgaattgaaagatcgcgaacctaaacgtgttcggaagaacggtgacctgagtctcgatgatctccaagtcgatggcaagcgctggtctagtagagatgcgctcgcaagctttgtacaaggggcgcaaccaggtgtccggactttcacagacgatgatatcaatgacacggacgacgagaagctcaagagtatgcgacaggacctagaagagttgaagctttttgatggttggaatgttaatgatatcaagatcacacccgaaagggtctatgccctgacgtttcatcccatgctggataaacccatcgtccttgctggcgataaaaagggaactttgggcttcttcgatggatcgcagaagactccagattaccctgaggatgatgaggaggactatgatgtgccattaccacagattggagctttcgaggttcaccggagaactatcacttctatcaagattccctccttcgattccaacaacgtcatcacatcctcatacgatagttcaattcggtgtcttgacttggagaaacaactctcgacacagatctgggctccagacgaggatggcgatgaactcggcatatcgtgcctcgacatttcgcctgaagccaaggacaccattgtcttctcgacgttggagggatctctcgggcggtttgaccgtcgatctaaagataaggccgagatatggggcctgactgagcagaagataggaggattctcgctaaacccggttctgccacatcttgtcgccacagcatctctggatcggactctgaagatctgggatcttcgcatgatcaagggcaaaggcgagctccgccacccctctcttcttggtgaacaccagtcacgtctgtctgtttcacacgcatcctggagtgcaagtgggcacattgccacatcgtcgtatgatgacactgtgaaaatctacgacttctcagaggctagcaagtggaagcctggccacgacatacctgacaagcaaatgaaccccaaggtcaaggtcccacacaacaatcagactggccgctgggtgaccattctcaaacctcagtggcagacgaaacccgcagatggtgtcaataagttcgccatcgcgaatatgaaccgctttgtcgatgtttatgacagcgcgggcaagcagcttgcacaacttgatggcgacggtattacggctgtgcctgctgtcgccgagttccatcctgtgcataactgggtggctggtggtaacggaagtgggaagctatgtttgtggcgttag

SEQ ID NO: 27354 - protein, 508 aa, Muscodor strobelii
  misc_feature: SGI Peptide ID NO. 569369
  misc_feature (277)..(351): Pfam Id: PF00400 Pfam Desc: WD domain, G-beta repeat
  misc_feature (1)..(508): NCBI GI: 46126943 Blast Desc: FG07849.1 [Gibberella zeae PH-1]
  misc_feature (1)..(507): NCBI GI: 261361268 Blast Desc: WD repeat-containing protein [Verticillium albo-atrum VaMs.102]
  misc_feature (1)..(507): NCBI GI: 171680438 Blast Desc: protein product [Podospora anserina] gi|170939846|emb|CAP65071.1| protein product [Podospora anserina]
  misc_feature (1)..(508): NCBI GI: 256724550 Blast Desc: NECHADRAFT_88236 [Nectria haematococca mpVI 77-13-4]
  misc_feature (1)..(507): NCBI GI: 85090504 Blast Desc: NCU11420 [Neurospora crassa OR74A] gi|74696288|sp|Q7S1H9.1|YD156_NEUCR RecName: Full=WD repeat-containing protein NCU09302/NCU11420 conserved [Neurospora
  misc_feature (1)..(507): NCBI GI: 116179408 Blast Desc: CHGG_00332 [Chaetomium globosum CBS 148.51] gi|121938115|sp|Q2HHH2.1|YD156_CHAGB RecName: Full=WD repeat-containing protein CHGG_00332 gi|88184629|gb|EAQ92097.1|
  misc_feature (1)..(507): NCBI GI: 169600443 Blast Desc: SNOG_03055 [Phaeosphaeria nodorum SN15] gi|121930831|sp|Q0UYV9.1|YD156_PHANO RecName: Full=WD repeat-containing protein SNOG_03055 gi|111068666|gb|EAT89786.1|
  misc_feature (1)..(507): NCBI GI: 156050781 Blast Desc: SS1G_07978 [Sclerotinia sclerotiorum 1980] gi|154692378|gb|EDN92116.1| SS1G_07978 [Sclerotinia sclerotiorum 1980]
  misc_feature (1)..(507): NCBI GI: 189211267 Blast Desc: WD repeat containing protein [Pyrenophora tritici-repentis Pt-1C-BFP] gi|187978057|gb|EDU44683.1| WD repeat containing protein [Pyrenophora tritici-repentis Pt-1C-BFP]
  misc_feature (1)..(507): NCBI GI: 238504330 Blast Desc: WD domain protein [Aspergillus flavus NRRL3357] gi|220690867|gb|EED47216.1| WD domain protein [Aspergillus flavus NRRL3357]
MSDFAARRLQNVQKNAALLKDTAEIGAKIKKAATKPVVPRKRPAAVPAPRSTRSKEPVVPTRRSARQLGVKTDDNDSSIKIEDIPVELKDREPKRVRKNGDLSLDDLQVDGKRWSSRDALASFVQGAQPGVRTFTDDDINDTDDEKLKSMRQDLEELKLFDGWNVNDIKITPERVYALTFHPMLDKPIVLAGDKKGTLGFFDGSQKTPDYPEDDEEDYDVPLPQIGAFEVHRRTITSIKIPSFDSNNVITSSYDSSIRCLDLEKQLSTQIWAPDEDGDELGISCLDISPEAKDTIVFSTLEGSLGRFDRRSKDKAEIWGLTEQKIGGFSLNPVLPHLVATASLDRTLKIWDLRMIKGKGELRHPSLLGEHQSRLSVSHASWSASGHIATSSYDDTVKIYDFSEASKWKPGHDIPDKQMNPKVKVPHNNQTGRWVTILKPQWQTKPADGVNKFAIANMNRFVDVYDSAGKQLAQLDGDGITAVPAVAEFHPVHNWVAGGNGSGKLCLWR

SEQ ID NO: 27355 - DNA, 2119 bp, Muscodor strobelii
  misc_feature: SGI EST ID NO. CUFF.64533.0
  misc_feature: Variant of the nucleotide sequence at SEQ ID NO 27353
atcgcttgctgttgccatcaatattacgaactgcttgagttgtcaggggaaagtcaatcgttgtctatcgagttgattgtgtttgttactaagctttccattgaattcaccgtgacttatcttcacttgtcttctattttgccaattcttgtgtcgcgcgctctccctattccaaggtgcaacattcggtttatcttggcgcaactcgatcactcgcgttgccatgagtgacttcgcggcaaggcggctgcagaatgtgcagaagaatgctgccttgttgaaagacacagcggagatcggcgccaagatcaagaaggcagctacgaagcctgtggtcccaaggaaaagacctgccgcggtaccagcaccccgatccacgcggtctaaggaaccagtcgtgccaactcgaaggagtgctcgtcaattaggcgtaaagacggatgacaatgactccagcattaagattgaggatattcccgttgaattgaaagatcgcgaacctaaacgtgttcggaagaacggtgacctgagtctcgatgatctccaagtcgatggcaagcgctggtctagtagagatgcgctcgcaagctttgtacaaggggcgcaaccaggtgtccggactttcacagacgatgatatcaatgacacggacgacgagaagctcaagagtatgcgacaggacctagaagagttgaagctttttgatggttggaatgttaatgatatcaagatcacacccgaaagggtctatgccctgacgtttcatcccatgctggataaacccatcgtccttgctggcgataaaaagggaactttgggcttcttcgatggatcgcagaagactccagattaccctgaggatgatgaggaggactatgatgtgccattaccacagattggagctttcgaggttcaccggagaactatcacttctatcaagattccctccttcgattccaacaacgtcatcacatcctcatacgatagttcaattcggtgtcttgacttggagaaacaactctcgacacagatctgggctccagacgaggatggcgatgaactcggcatatcgtgcctcgacatttcgcctgaagccaaggacaccattgtcttctcgacgttggagggatctctcgggcggtttgaccgtcgatctaaagataaggccgagatatggggcctgactgagcagaagataggaggattctcgctaaacccggttctgccacatcttgtcgccacagcatctctggatcggactctgaagatctgggatcttcgcatgatcaagggcaaaggcgagctccgccacccctctcttcttggtgaacaccagtcacgtctgtctgtttcacacgcatcctggagtgcaagtgggcacattgccacatcgtcgtatgatgacactgtgaaaatctacgacttctcagaggctagcaagtggaagcctggccacgacatacctgacaagcaaatgaaccccaaggtcaaggtcccacacaacaatcagactggccgctgggtgaccattctcaaacctcagtggcagacgaaacccgcagatggtgtcaataagttcgccatcgcgaatatgaaccgctttgtcgatgtttatgacagcgcgggcaagcagcttgcacaacttgatggcgacggtattacggctgtgcctgctgtcgccgagttccatcctgtgcataactgggtggctggtggtaacggaagtgggaagctatgtttgtggcgttagagaagcgcggttggcaatatcatccgcaggatcgcagattcgctttatcatacttcgactacaaataggcatcgagccattcgaaggggtctagggtactaggagataagcatgtgtggactggatctgaatttcggtgtcaatccaattcaaagtgtcttgtattgggtgatatgaagacgtcactatgatgtaagggtgtatctaaggcatcagaatatgtctatagcacaggagttggcattgcagtcgttcgcattcggcttacatggcatcgctctcgcagttcatgctccaattctatgtagggcacggtactcgttccgagcatggagacaatcaatgaatagcaagcttagtctcatgatt

SEQ ID NO: 27356 - DNA, 849 bp, Muscodor strobelii
  misc_feature: SGI cDNA ID NO. 569370
  misc_feature: Encodes the peptide sequence at SEQ ID NO 27357
atggggcatacaattattcggcttcataacatcatgatcgttggatttcacggcggcttgcgctgggagaccaagggcacacgtgtcgtcaatgagaacggcaaagtacagcatgcctactacaatctgctgaacaacccatactctaatcatctcggccgcgtcattacgaaacagctagggacgtcgaagaagactctcgtagcagaggcactagcagacctattcgagcttgccgttgaatgggcctggctctctcagaacctcgatccgaaagaattcttcaagttcgtccaagactctttcgaatgggcctctaagatatccgaggacgccttctggggcttaactcagcgattattccacgctcgcgccctcttcaaagataccgttccccgcgcagaggaatcacgtggaaccagattgaccaaggcgctcgatgacttaaccgtcaagatcagccaattctatgcgcacgatgagaccaatccggacaccgaacgaaagggcaaggctaaggtttccaagaaggatcgagagctcgcgcgcaaaagggaatgcgctaagcaatacagcgggctatggattgctgattctgaaggtgatgggactgatgagaagaggttctatgaggtcatcccgggacaagatccgattctctatacgtatcgtccgcgcacaaaacccgaatggcaagacccaaaggacagcaactactgggcccagctgggcagcaacaaccctcgtttggcgacagttgacgtattctcggagctggcagtcagatttggtgggctcgagatcgccgagagtccagatactcctcaaggcactgctcgccagacatag

SEQ ID NO: 27357 - protein, 282 aa, Muscodor strobelii
  misc_feature: SGI Peptide ID NO. 569370
MGHTIIRLHNIMIVGFHGGLRWETKGTRVVNENGKVQHAYYNLLNNPYSNHLGRVITKQLGTSKKTLVAEALADLFELAVEWAWLSQNLDPKEFFKFVQDSFEWASKISEDAFWGLTQRLFHARALFKDTVPRAEESRGTRLTKALDDLTVKISQFYAHDETNPDTERKGKAKVSKKDRELARKRECAKQYSGLWIADSEGDGTDEKRFYEVIPGQDPILYTYRPRTKPEWQDPKDSNYWAQLGSNNPRLATVDVFSELAVRFGGLEIAESPDTPQGTARQT

SEQ ID NO: 27358 - DNA, 747 bp, Muscodor strobelii
  misc_feature: SGI EST ID NO. CUFF.64536.0
  misc_feature: Variant of the nucleotide sequence at SEQ ID NO 27356
ggcaaattgaatcgatcgtattagtaataagcccagaccgaatagctcatcctcttttcattattcagcctgagagagcaaacacataatattgatagcagcttttattcaatatctctcctaatcatggcaggtacagctgtattccccattgaattgttatccgtgcctcccttctgacctggtcttgcaatcaggtacctaagcaaccaccaaacttgggccgtacgttccaatctgtgcaaaccttcctcctcttgttttcctccatccctccatcccgcctacaaccaaaatctgccctgcgcactccgcttactctcgcacatcactgcgtcattcaacgcgaatcgatcttcaagctactatcccgtcttcatacgcgtcacgatggggcatacaattattcggcttcataacatcatgatcgttggatttcacggcggcttgcgctgggagaccaagggcacacgtgtcgtcaatgagaacggcaaagtacagcatgcctactacaatctgctgaacaacccatactctaatcatctcggccgcgtcattacgaaacagctagggacgtcgaagaagactctcgtagcagaggcactagcagacctattcgagcttgccgttgaatgggcctggctctctcagaacctcgatccgaaagaattcttcaagttcgtccaagactctttcgaatgggcctctaagatatccgaggacgccttctggggcttaactcagcga

SEQ ID NO: 27359 - DNA, 828 bp, Muscodor strobelii
  misc_feature: SGI cDNA ID NO. 569371
  misc_feature: Encodes the peptide sequence at SEQ ID NO 27360
atgggtcgtcgtgattttattcgcctccacaacctcatgatccggggatttcatggcgggttaagatgggaaaccaagggctttgatatgcccgatgagcatggtgatatggtccaccactactgtaacctgctgaataacccatactcaaaccgacttggagggcttatccgacaccacctgggcaccataaagaagactctagtggccgaagctcttgcggatatctacaatctggccgccgacaatgtccgtctgtgtcgtttcctggagccggagaaattcttcaagttcgcgaaggattcgttcttctggtcggcaaatatccccgacgacgctttctgggccctggcccagcgacttttgcatgcccgcgccctgttccgggatactgtcccggactttcacgagtcccgcggtacagagttgacgacggccattgacaatttctggggccgcttcaacgctttctattcgcccgaggcgattaaccaggagtatggatttggcgataagcacaaggctgtcaaggatgccgagtttaatcgcagaaaggcatgtgccacggactacggtcaatactgcaagagcaattcggagggcgatggtacaaaccagaaacgaacattcaagatcgttaacggaagggatgtcgttctcgatacgtacaagaagcgagagcacatcgcgggaccacagccgcagaataattactgggttcagcagggcaatatcaatcctcgccgaatggtggtggatctattcgtcgagctccgggagaagttcgccgagatggagatacccgacaatatggatttctcccagtag

SEQ ID NO: 27360 - protein, 275 aa, Muscodor strobelii
  misc_feature: SGI Peptide ID NO. 569371
MGRRDFIRLHNLMIRGFHGGLRWETKGFDMPDEHGDMVHHYCNLLNNPYSNRLGGLIRHHLGTIKKTLVAEALADIYNLAADNVRLCRFLEPEKFFKFAKDSFFWSANIPDDAFWALAQRLLHARALFRDTVPDFHESRGTELTTAIDNFWGRFNAFYSPEAINQEYGFGDKHKAVKDAEFNRRKACATDYGQYCKSNSEGDGTNQKRTFKIVNGRDVVLDTYKKREHIAGPQPQNNYWVQQGNINPRRMVVDLFVELREKFAEMEIPDNMDFSQ

SEQ ID NO: 27361 - DNA, 833 bp, Muscodor strobelii
  misc_feature: SGI EST ID NO. CUFF.64551.0
  misc_feature: Variant of the nucleotide sequence at SEQ ID NO 27359
acgaaagtcagaacttacccgacttggtatttcacatggagagccggttggtaggtgcagcctccgagagctgtcgatctcctgcttcatgttttcgaaggaaatgttgcaatcccagtctctattcgaatgacaatacgactatcagggacttgggctattcgaggaacagagtcttgctgccctcttccggcattgtagactaccttcctcggaatcgtgcaagtccaaccctccatacaaccaaccaatccgtacctatcttctttttacgtcccagagaaactccatctcggctcccattaggtacatcgtcaaagtctaacacaacagttaatcaagcgtttgtcaacatcaccatcttccgcttcgttatccgtaactgaggttcatcaataccacacctgcctaacttccgtcccttgcctggttgacacttgcaacttgcttcgtcaacacttaccctcaatacctatacgatactcatcacttcctcaatccgcgaaatcgctcctcaacatatcacaatgggtcgtcgtgattttattcgcctccacaacctcatgatccggggatttcatggcgggttaagatgggaaaccaagggctttgatatgcccgatgagcatggtgatatggtccaccactactgtaacctgctgaataacccatactcaaaccgacttggagggcttatccgacaccacctgggcaccataaagaagactctagtggccgaagctcttgcggatatctacaatctggccgccgacaatgtccgtctgtgtcgtttcctggagccggagaaattcttcaagttcgcgaaggattcg

SEQ ID NO: 27362 - DNA, 1521 bp, Muscodor strobelii
  misc_feature: SGI cDNA ID NO. 569372
  misc_feature: Encodes the peptide sequence at SEQ ID NO 27363
atggcggcaaaagatccttgggaagtccccgatgaccactcagctacctctgatcccacgtccggccaagaaaatcagtctgaaacccagacccaacatgatgacgacgaacatgaggatcacgctatgcacgaagaagaagaacatagacatgatgatgaacaggaagagcatgacgagcccgaagacggaaatgacgacgcccacgaggaccaagatgagcacgatgacgaccatgactccaatgcctcggagtcttcagacgaggacattgacatgacggtccagcacgatatggacaagctgcagaacacttttcctcgttttagagacaactatcgcctaatcaagcgtattggcgaaggcacgttctcaacggtctataaagcagaagacgtgcagtacgactactataataactcctgggacctcgacgccaacgacgagcaatggacacccccgcccttgctgtcgacctcccgctcccgcttcacgtcctcctcatctcgccctcagcgacgcaaacccaaatacgtcgccatcaagaagatctacgtcacctcttcaccctcccgcatcctcaacgagctcgagctcctacacgacctccgcaacgccgcctctgtctgtcccttaatcactgccttccgccaagcagaccaagtcctcgccatcctaccctatttccgacacgaagacttccgcaaatactaccccaagatgaccgtccccgacatcaaagtctacctacgctccctcttcaccgccctcgccgcagttcacgaaaagggtataatccaccgagacatcaagcccacaaacttcctctacgacccggccaaaaaacgcggcgtactcgtcgacttcggactcgcagagcgcgagggaacggagactaagccctgtctctgccacgaagatcgcgccgtccgtaaacagcgactacaacagtctgtagcttttaattcaatccactcaggccctcaaccaggctaccccaagaacgacacccgtccctcccggcgcgcaaaccgcgcaggaacacgaggattccgcgcaccggaagtattattcaaatgcacagagcaaacgaccaaaatcgatatctggtccgcgggcgtcatcctcctcacaatactctgtaagcgcttccccttcttcaacagcgcagacgacatagaagccatgatcgaaatcgccaccatcttcggatccaagcggatgaaactcgcggctcagctgcatgggtgcatgtttgatagcgatatcccgacgattggcgtccagggcttctcgttcgagaagatcatgttgtggtctacgtgtaggagtgagggcggtggcaaggatgggactagtttgccgcttacgggtgaggagaaggaggctattgagttcttgagcaggtgcttggagttggatccgtcgagacggattagtgctgaggaggcgctgggtcatgagtttttggcggttggagaggaaggggaggaggatgaggagggggttatgatgttgtag

SEQ ID NO: 27363 - protein, 506 aa, Muscodor strobelii
  misc_feature: SGI Peptide ID NO. 569372
  misc_feature (113)..(490): Pfam Id: PF00069 Pfam Desc: Protein kinase domain
  misc_feature (113)..(293): Pfam Id: PF00069 Pfam Desc: Protein kinase domain
  misc_feature (345)..(399): Pfam Id: PF00069 Pfam Desc: Protein kinase domain
  misc_feature (460)..(490): Pfam Id: PF00069 Pfam Desc: Protein kinase domain
  misc_feature (91)..(497): NCBI GI: 164429298 Blast Desc: NCU11410 [Neurospora crassa OR74A] gi|157073425|gb|EDO65431.1| NCU11410 [Neurospora crassa OR74A]
  misc_feature (7)..(506): NCBI GI: 171680428 Blast Desc: protein product [Podospora anserina] gi|170939841|emb|CAP65066.1| protein product [Podospora anserina]
  misc_feature (91)..(494): NCBI GI: 46126955 Blast Desc: FG07855.1 [Gibberella zeae PH-1]
  misc_feature (91)..(490): NCBI GI: 256724545 Blast Desc: NECHADRAFT_4143 [Nectria haematococca mpVI 77-13-4]
  misc_feature (38)..(493): NCBI GI: 261361275 Blast Desc: cell division control protein [Verticillium albo-atrum VaMs.102]
  misc_feature (96)..(493): NCBI GI: 116179418 Blast Desc: CHGG_00337 [Chaetomium globosum CBS 148.51] gi|88184634|gb|EAQ92102.1| CHGG_00337 [Chaetomium globosum CBS 148.51]
  misc_feature (94)..(498): NCBI GI: 39942816 Blast Desc: MGG_03488 [Magnaporthe grisea 70-15] gi|145009959|gb|EDJ94615.1| MGG_03488 [Magnaporthe grisea 70-15]
  misc_feature (29)..(490): NCBI GI: 154304778 Blast Desc: BC1G_08128 [Botryotinia fuckeliana B05.10] gi|150854028|gb|EDN29220.1| BC1G_08128 [Botryotinia fuckeliana B05.10]
  misc_feature (70)..(490): NCBI GI: 156042680 Blast Desc: SS1G_11138 [Sclerotinia sclerotiorum 1980] gi|154695524|gb|EDN95262.1| SS1G_11138 [Sclerotinia sclerotiorum 1980]
  misc_feature (66)..(491): NCBI GI: 212545050 Blast Desc: cell cycle protein kinase, [Penicillium marneffei ATCC 18224] gi|210065648|gb|EEA19742.1| cell cycle protein kinase, [Penicillium marneffei ATCC 18224]
  misc_feature (96)..(490): SWISSPROT Homolog: EC 2.7.11.1 Non-specific serine/threonine protein kinase
MAAKDPWEVPDDHSATSDPTSGQENQSETQTQHDDDEHEDHAMHEEEEHRHDDEQEEHDEPEDGNDDAHEDQDEHDDDHDSNASESSDEDIDMTVQHDMDKLQNTFPRFRDNYRLIKRIGEGTFSTVYKAEDVQYDYYNNSWDLDANDEQWTPPPLLSTSRSRFTSSSSRPQRRKPKYVAIKKIYVTSSPSRILNELELLHDLRNAASVCPLITAFRQADQVLAILPYFRHEDFRKYYPKMTVPDIKVYLRSLFTALAAVHEKGIIHRDIKPTNFLYDPAKKRGVLVDFGLAEREGTETKPCLCHEDRAVRKQRLQQSVAFNSIHSGPQPGYPKNDTRPSRRANRAGTRGFRAPEVLFKCTEQTTKIDIWSAGVILLTILCKRFPFFNSADDIEAMIEIATIFGSKRMKLAAQLHGCMFDSDIPTIGVQGFSFEKIMLWSTCRSEGGGKDGTSLPLTGEEKEAIEFLSRCLELDPSRRISAEEALGHEFLAVGEEGEEDEEGVMML

SEQ ID NO: 27364 - DNA, 1880 bp, Muscodor strobelii
  misc_feature: SGI EST ID NO. CUFF.64561.0
  misc_feature: Variant of the nucleotide sequence at SEQ ID NO 27362
gatcgtgtcttaggtaatcgcatttcatgatactcaaaactcacgacaaggactagctatcgacgaaagattcagagaaggtgggaggtggagctaggaagcaaagaaaagtgttctatcttataattccacctcatcatcgccgtcactcaatccactcccttcgcctcaactttggcaacaccaccaaccaatatggcggcaaaagatccttgggaagtccccgatgaccactcagctacctctgatcccacgtccggccaagaaaatcagtctgaaacccagacccaacatgatgacgacgaacatgaggatcacgctatgcacgaagaagaagaacatagacatgatgatgaacaggaagagcatgacgagcccgaagacggaaatgacgacgcccacgaggaccaagatgagcacgatgacgaccatgactccaatgcctcggagtcttcagacgaggacattgacatgacggtccagcacgatatggacaagctgcagaacacttttcctcgttttagagacaactatcgcctaatcaagcgtattggcgaaggcacgttctcaacggtctataaagcagaagacgtgcagtacgactactataataactcctgggacctcgacgccaacgacgagcaatggacacccccgcccttgctgtcgacctcccgctcccgcttcacgtcctcctcatctcgccctcagcgacgcaaacccaaatacgtcgccatcaagaagatctacgtcacctcttcaccctcccgcatcctcaacgagctcgagctcctacacgacctccgcaacgccgcctctgtctgtcccttaatcactgccttccgccaagcagaccaagtcctcgccatcctaccctatttccgacacgaagacttccgcaaatactaccccaagatgaccgtccccgacatcaaagtctacctacgctccctcttcaccgccctcgccgcagttcacgaaaagggtataatccaccgagacatcaagcccacaaacttcctctacgacccggccaaaaaacgcggcgtactcgtcgacttcggactcgcagagcgcgagggaacggagactaagccctgtctctgccacgaagatcgcgccgtccgtaaacagcgactacaacagtctgtagcttttaattcaatccactcaggccctcaaccaggctaccccaagaacgacacccgtccctcccggcgcgcaaaccgcgcaggaacacgaggattccgcgcaccggaagtattattcaaatgcacagagcaaacgaccaaaatcgatatctggtccgcgggcgtcatcctcctcacaatactctgtaagcgcttccccttcttcaacagcgcagacgacatagaagccatgatcgaaatcgccaccatcttcggatccaagcggatgaaactcgcggctcagctgcatgggtgcatgtttgatagcgatatcccgacgattggcgtccagggcttctcgttcgagaagatcatgttgtggtctacgtgtaggagtgagggcggtggcaaggatgggactagtttgccgcttacgggtgaggagaaggaggctattgagttcttgagcaggtgcttggagttggatccgtcgagacggattagtgctgaggaggcgctgggtcatgagtttttggcggttggagaggaaggggaggaggatgaggagggggttatgatgttgtagggttgagggatgaggtggggagtggaatggtgtgcattgtagagatacccttattgtatgtaatattgcatcgctggcgcctgttagatgtggctggagccgttggccggagcttaattcaatgtatatttaactataatgttcatgagccctttctgcccgga

SEQ ID NO: 27365 - DNA, 3774 bp, Muscodor strobelii
  misc_feature: SGI cDNA ID NO. 569373
  misc_feature: Encodes the peptide sequence at SEQ ID NO 27366
atggagtccgtcgacttcgacatcaacgatgcgctcaagcattacatgagcgacccggctaccatcgcgacccccgaagccgacagtcagctcgtcgactgcgagtccgaccccgagagtctgtccaacatcgccctcatcaacgccgtcctcaaccccatcatcgatgccgtcgccgacaaccccgacgccatcacccgctccgcctactttgactcgttgcagtttctactaaagtgcgctcccagttcccctgtgcccctaacaacgccgcgctctgccgaagtcggcaagcacgctgctcgacgagaccccgtttctaagatgttcgtgaaatccaggtacacccagttcctgcccacccatgccctcagcaagatcttcgacctcgtcatgtccgggctcgccgccgaggccgacgccatcgcccacgacctcgacggccccgacgagcaggaagtccttcaacaccacaagtccctccttgagatctacggcttcctcctgcagtggactatggcttgtgtcgagaccaaggccgccgagaagtcctccgccgctcccgtctcacgcgctcgaggcaaaggcgccaagtccaagaatgccgccaacaaggacgaccactgggatagtgctgctcagctgcagtctgcgttggatgtaatgtccaaggtgttgaagctgaagctcggcaagatctttctcaccaccagcgaacgtgacaccttcgtcggccttctcacgagacctgtatacatggtgcttgagagcgagcagagggtcaagaacacggcgataaggatgcactctttcaaagtcctctgcattgccgtcaagcaccacggccacggctatgccgcgcagatcaatatcgtccaaaacttgacttactttgaacatctatctgaacccatggccgagttcctgcacattctctccgagcagtatgactatccccaactcgcagaagaaattttgagagaaattggaaacaaggagttcaatacgaacgatacgaaaggacccaagtcggtatcaacattcattgccaagctctcggagctggtcccaagactcgtcatcaagcagatgaccatgcttgcgaaacaattagacagcgagtctcatacgctacgaagctctctgatagaagtttgtggaaacatgattgcccaccttagcaaccaggaagagcgaagcgacaaccataagtcacagctcaatgcatttttcgacgtcttggaagaacgctttttggacatcaacccttattgccgtgttcgggctatccaagtttatacgaggatatgtgagctggagcagaaatttcctaaacggagacagaaggccaccgagctggcataccgcagcctcgaggacaagagtagccacgtcaggaggaatgcggtcaagttgctcggcactcttatcaagactcacccctttaccgtactccacggcgcacagctctcccgcaaggattggcaggaacgtctcgataaggtcgattcggaactgaatgcgctccagcccccagctggtgagcctgggctgggcgaggacaaggcgaactcaactgcactggttgatgaaccaacccaattagaatcgccccagaagccatctcaccccaacgaaatgtccgaagaagaaaaagctgctgctatcgagaaggcccagcaagatgctgcgacgtcggaagcaatcgaaaaactcactctgacgaagcgctattataccgacgccttgaagttcatcgaggtcttacacgaagctactggcaccgttgtacagctcctcggttccaagaacaagtcagaggttattgaggccatggactatttggaaatcggcaatgcttacaacatcgaggataacatggtgggcattcgacgcatgatgcgtcttatctggaccaagggcaacagtgatgagggcaagggtgtccaaacgcatctcatcgattgctataagcgtcttttcttcgaagcccccgatcacttctctcccaatgacgcagccatctatatagcgagaaatatgatcagtctcacctctggtacgacgcccgcagagttgacgagcttggaacaactactcgctactatgatgaagggcggtatgatctcagatcgcgttgttactaagctatgggatgtatatggctttcagaagcgcgagatctcccggtcgcaacgaagaggtgccatcattgtgctcggtatgctcgctaccgcgtcgcccgagatcgtggtaggagagatggagaccatgttgaaattcggcctaggatctcttgggcgagctgatttgcaactggctaaatacacttgtattgcattgcggagattgaatcccactggtcggcaggctaaggaatctgctgtcactttcaatcgccttcccaatgaccatgctgtattggctaaactagcagccatcactgaggtgccaagcgaaagcaaggagtggtatggcgtggcagaacaagccatcaatgctatctatgctctggcaaagcatcctgacactctttgcaccgagattattcgtcgacgaaccaaggtcgtcttcgcttcgcagaatcgatcgccctcaacatcacggcctgggtctcgagatgacccgacgatgactgtcatgggaggtggcatgacgcagcagttcaacacgatggcacttgatgctcctacgcagaccatcaatcagccaatccctgaaccacctgctgagcccaaagaaaaggctgctattgcactttcgcaactgctcttcgtagtaggtcacattgctatcaagcagattgtacatctcgagatgtgcgaacttgatttcaagcggcgcaaacaggaaaaggaaaaagaggcgacgaaaccagatgaagcccggccagctgctggccgaaaaggcaagaatgcgacacctgcccccgaagagccaggtgatgagcttgacttgatcggcggtacaacagaagatgacttcacagaggcaatgactcatatccgtgagcgagaattgctctttggacctcaatccatcttgtctaacttcggccccatggttgccgagatctgttcaaggagtgatatctacaaagacaagagcctccaagccgccgccacactctgcttagctaagttaatgtgcgtcagtagcgagtattgcgaagcgcacttaccgctgcttatcacgattatggagcggtcacccaacccaactgtccgctccaacgtcgtgattgccctaggcgatatggccgtatgcttcaatcatcttattgacgagaatacggacttcttgtatcgccgccttgctgataacgacctgtctgtcaagcgaacgtgtctcatgacactcaccttcctcatcctcgccggccaagtcaaagttaaaggccaactgggcgagatggccaagtgtcttgaggatgaagataagcgcattgcggacttggcgaggatgttcttcacggaactcagcaccaaggacaatgcggtatataatcactttgtcgatatgttcagtttgctgtctgccggacagatggatgaggagcctttcaagaggattgttaagttcttgttgggttttgttgagaaggacaaacacgcaagacaacttgccgataaactggctgctcgcctccctcgttgcgagacagaaaggcagtggaatgatgtggcatatgcccttggcttgttacagcataagaatgaggatattacgaaggccattactgagggcttcaaaatcgtgcctgctgcagcttaa

SEQ ID NO: 27366 - protein, 1257 aa, Muscodor strobelii
  misc_feature: SGI Peptide ID NO. 569373
  misc_feature (1)..(1257): NCBI GI: 46126953 Blast Desc: FG07854.1 [Gibberella zeae PH-1]
  misc_feature (16)..(1257): NCBI GI: 256724427 Blast Desc: condensin component [Nectria haematococca mpVI 77-13-4]
  misc_feature (1)..(1231): NCBI GI: 171680430 Blast Desc: protein product [Podospora anserina] gi|170939842|emb|CAP65067.1| protein product [Podospora anserina]
  misc_feature (1)..(1257): NCBI GI: 156042678 Blast Desc: SS1G_11137 [Sclerotinia sclerotiorum 1980] gi|154695523|gb|EDN95261.1| SS1G_11137 [Sclerotinia sclerotiorum 1980]
  misc_feature (1)..(1256): NCBI GI: 85090494 Blast Desc: NCU09297 [Neurospora crassa OR74A] gi|28919807|gb|EAA29207.1| NCU09297 [Neurospora crassa OR74A]
  misc_feature (1)..(1257): NCBI GI: 154304776 Blast Desc: BC1G_08127 [Botryotinia fuckeliana B05.10] gi|150854027|gb|EDN29219.1| BC1G_08127 [Botryotinia fuckeliana B05.10]
  misc_feature (1)..(1257): NCBI GI: 116179416 Blast Desc: CHGG_00336 [Chaetomium globosum CBS 148.51] gi|88184633|gb|EAQ92101.1| CHGG_00336 [Chaetomium globosum CBS 148.51]
  misc_feature (3)..(1257): NCBI GI: 145616210 Blast Desc: MGG_03487 [Magnaporthe grisea 70-15] gi|145009960|gb|EDJ94616.1| MGG_03487 [Magnaporthe grisea 70-15]
  misc_feature (4)..(1257): NCBI GI: 261188561 Blast Desc: condensin complex subunit 1 [Ajellomyces dermatitidis SLH14081] gi|239593179|gb|EEQ75760.1| condensin complex subunit 1 [Ajellomyces dermatitidis SLH14081] gi|239613251|gb|EEQ90238.1| 1
  misc_feature (4)..(1257): NCBI GI: 226284004 Blast Desc: condensin complex component cnd1 [Paracoccidioides brasiliensis Pb01]
MESVDFDINDALKHYMSDPATIATPEADSQLVDCESDPESLSNIALINAVLNPIIDAVADNPDAITRSAYFDSLQFLLKCAPSSPVPLTTPRSAEVGKHAARRDPVSKMFVKSRYTQFLPTHALSKIFDLVMSGLAAEADAIAHDLDGPDEQEVLQHHKSLLEIYGFLLQWTMACVETKAAEKSSAAPVSRARGKGAKSKNAANKDDHWDSAAQLQSALDVMSKVLKLKLGKIFLTTSERDTFVGLLTRPVYMVLESEQRVKNTAIRMHSFKVLCIAVKHHGHGYAAQINIVQNLTYFEHLSEPMAEFLHILSEQYDYPQLAEEILREIGNKEFNTNDTKGPKSVSTFIAKLSELVPRLVIKQMTMLAKQLDSESHTLRSSLIEVCGNMIAHLSNQEERSDNHKSQLNAFFDVLEERFLDINPYCRVRAIQVYTRICELEQKFPKRRQKATELAYRSLEDKSSHVRRNAVKLLGTLIKTHPFTVLHGAQLSRKDWQERLDKVDSELNALQPPAGEPGLGEDKANSTALVDEPTQLESPQKPSHPNEMSEEEKAAAIEKAQQDAATSEAIEKLTLTKRYYTDALKFIEVLHEATGTVVQLLGSKNKSEVIEAMDYLEIGNAYNIEDNMVGIRRMMRLIWTKGNSDEGKGVQTHLIDCYKRLFFEAPDHFSPNDAAIYIARNMISLTSGTTPAELTSLEQLLATMMKGGMISDRVVTKLWDVYGFQKREISRSQRRGAIIVLGMLATASPEIVVGEMETMLKFGLGSLGRADLQLAKYTCIALRRLNPTGRQAKESAVTFNRLPNDHAVLAKLAAITEVPSESKEWYGVAEQAINAIYALAKHPDTLCTEIIRRRTKVVFASQNRSPSTSRPGSRDDPTMTVMGGGMTQQFNTMALDAPTQTINQPIPEPPAEPKEKAAIALSQLLFVVGHIAIKQIVHLEMCELDFKRRKQEKEKEATKPDEARPAAGRKGKNATPAPEEPGDELDLIGGTTEDDFTEAMTHIRERELLFGPQSILSNFGPMVAEICSRSDIYKDKSLQAAATLCLAKLMCVSSEYCEAHLPLLITIMERSPNPTVRSNVVIALGDMAVCFNHLIDENTDFLYRRLADNDLSVKRTCLMTLTFLILAGQVKVKGQLGEMAKCLEDEDKRIADLARMFFTELSTKDNAVYNHFVDMFSLLSAGQMDEEPFKRIVKFLLGFVEKDKHARQLADKLAARLPRCETERQWNDVAYALGLLQHKNEDITKAITEGFKIVPAAA

SEQ ID NO: 27367 - DNA, 5338 bp, Muscodor strobelii
  misc_feature: SGI EST ID NO. CUFF.64572.0
  misc_feature: Variant of the nucleotide sequence at SEQ ID NO 27365
gcaatcgcaaccatcatcagccctcaatttttggagcagattgtacctgctttattttgtttcacggcaggcttttctctcttctgacctcatactagcaggtcaactgcttgaacagttgttgctttccattctccctgtattgcaagcgcgatacttcgaaagaaactcaattgcacacaccaattactaagtgtttatttactctgagcttctacgcttcatcgatagccctgcctgagtcgcattctgagtaccgcatcccaggagatcaatcaccctgcctagaggggaatatcttcatcatggagtccgtcgacttcgacatcaacgatgcgctcaagcattacatgagcgacccggctaccatcgcgacccccgaagccgacagtcagctcgtcgactgcgagtccgaccccgagagtctgtccaacatcgccctcatcaacgccgtcctcaaccccatcatcgatgccgtcgccgacaaccccgacgccatcacccgctccgcctactttgactcgttgcagtttctactaaagtacacccagttcctgcccacccatgccctcagcaagatcttcgacctcgtcatgtccgggctcgccgccgaggccgacgccatcgcccacgacctcgacggccccgacgagcaggaagtccttcaacaccacaagtccctccttgagatctacggcttcctcctgcagtggactatggcttgtgtcgagaccaaggccgccgagaagtcctccgccgctcccgtctcacgcgctcgaggcaaaggcgccaagtccaagaatgccgccaacaaggacgaccactgggatagtgctgctcagctgcagtctgcgttggatgtaatgtccaaggtgttgaagctgaagctcggcaagatctttctcaccaccagcgaacgtgacaccttcgtcggccttctcacgagacctgtatacatggtgcttgagagcgagcagagggtcaagaacacggcgataaggatgcactctttcaaagtcctctgcattgccgtcaagcaccacggccacggctatgccgcgcagatcaatatcgtccaaaacttgacttactttgaacatctatctgaacccatggccgagttcctgcacattctctccgagcagtatgactatccccaactcgcagaagaaattttgagagaaattggaaacaaggagttcaatacgaacgatacgaaaggacccaagtcggtatcaacattcattgccaagctctcggagctggtcccaagactcgtcatcaagcagatgaccatgcttgcgaaacaattagacagcgagtctcatacgctacgaagctctctgatagaagtttgtggaaacatgattgcccaccttagcaaccaggaagagcgaagcgacaaccataagtcacagctcaatgcatttttcgacgtcttggaagaacgctttttggacatcaacccttattgccgtgttcgggctatccaagtttatacgaggatatgtgagctggagcagaaatttcctaaacggagacagaaggccaccgagctggcataccgcagcctcgaggacaagagtagccacgtcaggaggaatgcggtcaagttgctcggcactcttatcaagactcacccctttaccgtactccacggcgcacagctctcccgcaaggattggcaggaacgtctcgataaggtcgattcggaactgaatgcgctccagcccccagctggtgagcctgggctgggcgaggacaaggcgaactcaactgcactggttgatgaaccaacccaattagaatcgccccagaagccatctcaccccaacgaaatgtccgaagaagaaaaagctgctgctatcgagaaggcccagcaagatgctgcgacgtcggaagcaatcgaaaaactcactctgacgaagcgctattataccgacgccttgaagttcatcgaggtcttacacgaagctactggcaccgttgtacagctcctcggttccaagaacaagtcagaggttattgaggccatggactatttggaaatcggcaatgcttacaacatcgaggataacatggtgggcattcgacgcatgatgcgtcttatctggaccaagggcaacagtgatgagggcaagggtgtccaaacgcatctcatcgattgctataagcgtcttttcttcgaagcccccgatcacttctctcccaatgacgcagccatctatatagcgagaaatatgatcagtctcacctctggtacgacgcccgcagagttgacgagcttggaacaactactcgctactatgatgaagggcggtatgatctcagatcgcgttgttactaagctatgggatgtatatggctttcagaagcgcgagatctcccggtcgcaacgaagaggtgccatcattgtgctcggtatgctcgctaccgcgtcgcccgagatcgtggtaggagagatggagaccatgttgaaattcggcctaggatctcttgggcgagctgatttgcaactggctaaatacacttgtattgcattgcggagattgaatcccactggtcggcaggctaaggaatctgctgtcactttcaatcgccttcccaatgaccatgctgtattggctaaactagcagccatcactgaggtgccaagcgaaagcaaggagtggtatggcgtggcagaacaagccatcaatgctatctatgctctggcaaagcatcctgacactctttgcaccgagattattcgtcgacgaaccaaggtcgtcttcgcttcgcagaatcgatcgccctcaacatcacggcctgggtctcgagatgacccgacgatgactgtcatgggaggtggcatgacgcagcagttcaacacgatggcacttgatgctcctacgcagaccatcaatcagccaatccctgaaccacctgctgagcccaaagaaaaggctgctattgcactttcgcaactgctcttcgtagtaggtcacattgctatcaagcagattgtacatctcgagatgtgcgaacttgatttcaagcggcgcaaacaggaaaaggaaaaagaggcgacgaaaccagatgaagcccggccagctgctggccgaaaaggcaagaatgcgacacctgcccccgaagagccaggtgatgagcttgacttgatcggcggtacaacagaagatgacttcacagaggcaatgactcatatccgtgagcgagaattgctctttggacctcaatccatcttgtctaacttcggccccatggttgccgagatctgttcaaggagtgatatctacaaagacaagagcctccaagccgccgccacactctgcttagctaagttaatgtgcgtcagtagcgagtattgcgaagcgcacttaccgctgcttatcacgattatggagcggtcacccaacccaactgtccgctccaacgtcgtgattgccctaggcgatatggccgtatgcttcaatcatcttattgacgagaatacggacttcttgtatcgccgccttgctgataacgacctgtctgtcaagcgaacgtgtctcatgacactcaccttcctcatcctcgccggccaagtcaaagttaaaggccaactgggcgagatggccaagtgtcttgaggatgaagataagcgcattgcggacttggcgaggatgttcttcacggaactcagcaccaaggacaatgcggtatataatcactttgtcgatatgttcagtttgctgtctgccggacagatggatgaggagcctttcaagaggattgttaagttcttgttgggttttgttgagaaggacaaacacgcaagacaacttgccgataaactggctgctcgcctccctcgttgcgagacagaaaggcagtggaatgatgtggcatatgcccttggcttgttacagcataagaatgaggatattacgaaggccattactgagggcttcaaaatcgtgcctgctgcagcttaaagactggtggtaatgtgatcatggggattacgtgtagtagagttatgataccaaattggagcatggcgttgaggatggggccatgcgagttgctgtttttctttatacaatgaatggaacgtaaatattaccgaaagatgtctatgtgctggtttgaactagatgtgtcactatgccgctgtcggcaaatcatgtgaggtgagatcccaccccagattcaagtccatcgcctttaacaattctctatcatccaattgctaagtcgaatatagacattctaggaccaatctatgactagcaactaaatgatagagattttcctcagggccaaacttaaaaaaaaaaaaagggttcacgctacctccgctgatttcacttcactttcccaatagcgcatgaatactatctcactcactccgatcgccctccatggccatgagaatcgccaataacaaacacaagctcatcacatcatcatatcaacttcctcccattcaaggcctaatataaacaatacttcccgggcccgccatctcaacagacctatcaacagcctcctgaaacctctcaagagcatactcgccatgaatagtatgtccagcggctttccccaacttcagcagtcccgtctcagcaagacgaatagccccctcgatatcctcccgctcatacatacacacacccttaatcgtccagctattcagcattgccttccagtacggaatcggtagactctcatcgccacgtccacctaaaagtacgattcggccccgctctcgcaggactgatatcgcggcggggaaattggtgctgcctgttgcggcggggggcgagacatcgatgatgccgtcgattagaccgaaggctccgagtgctgcgctgtctgtttgtaggtcgccggttaattggactgttgagatgttattggggtatgtctttttgatctgcgccagaccagccgcattgcggctcgctgctatgacgcggaggccgacagcgactgcgacgtctactgcggctaggctgtagtggccagttgccggggttatgatcacgcgttcgcccggctggatagagatactgcggagtcctgcgtatgcgatggcgtctgcggataggacttgtagctctgctatatgaaggcccaggcccccttcttctggtcgaccgaggaggagagattcatcgagggggtagacgttttctaggggggctaggcagtactctgcgtataaccctccgcttgctagggccttgtataggtttcgaaacgcttctgtgaattcggcggagacgccgaggattacgtgcgttgaggggtcgtcacgggcgcggatgtgtgaggagattctgggagttgaaag

SEQ ID NO: 27368 - DNA, 1158 bp, Muscodor strobelii
  misc_feature: SGI cDNA ID NO. 569374
  misc_feature: Encodes the peptide sequence at SEQ ID NO 27369
atgtcttcccctctccctcccaaaatgaaagccctcgtccaaacaggacccagcacagcctccgtccaatccgtgcccgtgcccatcgtaacacccggttcagccctcataaaagtctcaatagcactagtccactccaacgtatccaacatcttcaaagcgcagcaccccatgttccaactcccatggcctgtcatcccaggcgccttcggcctcggccgaattgcatccctaggcccagacgcagtccgccttaaaaaagaccaactcgtcctggtatgtgtagaaaagactctctgcgaaatctcctcacacatccgcgcccgtgacgacccctcaacgcacgtaatcctcggcgtctccgccgaattcacagaagcgtttcgaaacctatacaaggccctagcaagcggagggttatacgcagagtactgcctagcccccctagaaaacgtctaccccctcgatgaatctctcctcctcggtcgaccagaagaagggggcctgggccttcatatagcagagctacaagtcctatccgcagacgccatcgcatacgcaggactccgcagtatctctatccagccgggcgaacgcgtgatcataaccccggcaactggccactacagcctagccgcagtagacgtcgcagtcgctgtcggcctccgcgtcatagcagcgagccgcaatgcggctggtctggcgcagatcaaaaagacataccccaataacatctcaacagtccaattaaccggcgacctacaaacagacagcgcagcactcggagccttcggtctaatcgacggcatcatcgatgtctcgccccccgccgcaacaggcagcaccaatttccccgccgcgatatcagtcctgcgagagcggggccgaatcgtacttttaggtggacgtggcgatgagagtctaccgattccgtactggaaggcaatgctgaatagctggacgattaagggtgtgtgtatgtatgagcgggaggatatcgagggggctattcgtcttgctgagacgggactgctgaagttggggaaagccgctggacatactattcatggcgagtatgctcttgagaggtttcaggaggctgttgataggtctgttgagatggcgggcccgggaagtattgtttatattaggccttga

SEQ ID NO: 27369 - protein, 385 aa, Muscodor strobelii
  misc_feature: SGI Peptide ID NO. 569374
  misc_feature (32)..(155): Pfam Id: PF08240 Pfam Desc: Alcohol dehydrogenase GroES-like domain
  misc_feature (196)..(342): Pfam Id: PF00107 Pfam Desc: Zinc-binding dehydrogenase
  misc_feature (284)..(342): Pfam Id: PF00107 Pfam Desc: Zinc-binding dehydrogenase
  misc_feature (5)..(385): NCBI GI: 256728770 Blast Desc: NECHADRAFT_86057 [Nectria haematococca mpVI 77-13-4]
  misc_feature (3)..(385): NCBI GI: 156061299 Blast Desc: SS1G_02792 [Sclerotinia sclerotiorum 1980] gi|154700196|gb|EDN99934.1| SS1G_02792 [Sclerotinia sclerotiorum 1980]
  misc_feature (4)..(380): NCBI GI: 154319662 Blast Desc: BC1G_02312 [Botryotinia fuckeliana B05.10] gi|150855970|gb|EDN31162.1| BC1G_02312 [Botryotinia fuckeliana B05.10]
  misc_feature (2)..(365): NCBI GI: 39960341 Blast Desc: MGG_09359 [Magnaporthe grisea 70-15] gi|145014309|gb|EDJ98877.1| MGG_09359 [Magnaporthe grisea 70-15]
  misc_feature (21)..(383): NCBI GI: 256726237 Blast Desc: NECHADRAFT_81942 [Nectria haematococca mpVI 77-13-4]
  misc_feature (5)..(385): NCBI GI: 261198679 Blast Desc: isopropanol dehydrogenase [Ajellomyces dermatitidis SLH14081] gi|239594893|gb|EEQ77474.1| isopropanol dehydrogenase [Ajellomyces dermatitidis SLH14081] gi|239609983|gb|EEQ86970.1|
  misc_feature (5)..(385): NCBI GI: 212544364 Blast Desc: alcohol dehydrogenase, [Penicillium marneffei ATCC 18224] gi|210065305|gb|EEA19399.1| alcohol dehydrogenase, [Penicillium marneffei ATCC 18224]
  misc_feature (22)..(385): NCBI GI: 46115822 Blast Desc: FG03753.1 [Gibberella zeae PH-1]
  misc_feature (22)..(385): NCBI GI: 145251589 Blast Desc: An15g07870 [Aspergillus niger] gi|134082843|emb|CAK42674.1| protein product [Aspergillus niger]
  misc_feature (6)..(385): NCBI GI: 281211102 Blast Desc: isopropanol dehydrogenase [Polysphondylium pallidum PN500]
  misc_feature (11)..(381): SWISSPROT Homolog: EC 1.1.1.1 Alcohol dehydrogenase
MSSPLPPKMKALVQTGPSTASVQSVPVPIVTPGSALIKVSIALVHSNVSNIFKAQHPMFQLPWPVIPGAFGLGRIASLGPDAVRLKKDQLVLVCVEKTLCEISSHIRARDDPSTHVILGVSAEFTEAFRNLYKALASGGLYAEYCLAPLENVYPLDESLLLGRPEEGGLGLHIAELQVLSADAIAYAGLRSISIQPGERVIITPATGHYSLAAVDVAVAVGLRVIAASRNAAGLAQIKKTYPNNISTVQLTGDLQTDSAALGAFGLIDGIIDVSPPAATGSTNFPAAISVLRERGRIVLLGGRGDESLPIPYWKAMLNSWTIKGVCMYEREDIEGAIRLAETGLLKLGKAAGHTIHGEYALERFQEAVDRSVEMAGPGSIVYIRP

SEQ ID NO: 27370 - DNA, 1356 bp, Muscodor strobelii
  misc_feature: SGI cDNA ID NO. 569375
  misc_feature: Elevated expression when VOC is produced
  misc_feature: Encodes the peptide sequence at SEQ ID NO 27371
atgaccgacgtgtatgtgacaatgggctcatctgaggacattagaaacctccgcaagcgccgagcacacaagaaatctcgacgcgggtgtgcgaattgtaagctgagaagtatcaaatgtgatgaaacaaagccgtattgtaaaaaatgtgaatccttcaacgtcatttgcttttacgggtccaaatcatcaccggacaatcttgcaacaaaagccagcttccagatctctttacctggcgctgttgataagtcgctgccagcccctttgccagtatgtggatcgggacacaatatcgaaacatatcaactatttccctgtgatatacccctgatcgaaaagttccaaaggcgcactgttcagactctcggtacttgggctacgcgtcatgtctatatctcgaaaactctgtccatggcattctcttaccctctattaatgcacgtcatcctcgccatggccgaaatccacgacctagtcttgccacgcgctcgcgataagcctgaagcgacatgcatgcttgcataccactggtaccacgccgtcgcgatgatgaagcgcaagcttctcgagcctatcgttccatctgagcgtgatgcactgtggttgtcgtcgagtctaattagtatcagtaatttggcttacgtccaagcccgtacgccagaggaagcttggccactttgtccgccatcgggagctgatctttcctggtttaagctctgtgatggtcagagattggttgcgagtttgacggatccgttgagaccggactcggagttgagacttgctgcgaaggagatgtgtgatatcgtggattgggtgaaagaattgggggagggtgattgggaacacgaggcgttggacgaagagacgaaggcatttggtaggttttttggactttggggtgatgaggcctctgatttggaaggtgagaactgtatgactggaaggatgaatggtcgcgacgacgcggaagtccaaaagcagaccgacggattcgtcaatgtgattaacccctactacgcgaccgcgaaagtagcattacgcctgtttcggcgagacttggacccggacaactttctgatgcacatatgcttcattacgtcgttcgacaccgacttccgtagcctactaagccgcaaagacgcgaaagccatgcttttgctgctcttttggtatgcaaagatctgtgacatacgggtctggtggttgtggaagcagtcgcgtaccgaaggagttgcgatataccagtatctaaaaagagaatggatgaagagcgggaatatcaaaggactgaaattgatcgaggcgcctatggggcggatcttagctgcgatagcgaaagatgcgatatga

SEQ ID NO: 27371 - protein, 451 aa, Muscodor strobelii
  misc_feature: SGI Peptide ID NO. 569375
  misc_feature (28)..(66): Pfam Id: PF00172 Pfam Desc: Fungal Zn(2)-Cys(6) binuclear cluster domain
  misc_feature (17)..(432): NCBI GI: 256726121 Blast Desc: NECHADRAFT_81712 [Nectria haematococca mpVI 77-13-4]
  misc_feature (18)..(421): NCBI GI: 154319664 Blast Desc: BC1G_02313 [Botryotinia fuckeliana B05.10] gi|150855971|gb|EDN31163.1| BC1G_02313 [Botryotinia fuckeliana B05.10]
  misc_feature (9)..(421): NCBI GI: 46111711 Blast Desc: FG02737.1 [Gibberella zeae PH-1]
  misc_feature (18)..(441): NCBI GI: 156061297 Blast Desc: SS1G_02791 [Sclerotinia sclerotiorum 1980] gi|154700195|gb|EDN99933.1| SS1G_02791 [Sclerotinia sclerotiorum 1980]
  misc_feature (16)..(432): NCBI GI: 212544258 Blast Desc: conserved [Penicillium marneffei ATCC 18224] gi|210065252|gb|EEA19346.1| conserved [Penicillium marneffei ATCC 18224]
  misc_feature (18)..(421): NCBI GI: 239609984 Blast Desc: conserved [Ajellomyces dermatitidis ER-3]
  misc_feature (18)..(421): NCBI GI: 261198677 Blast Desc: conserved [Ajellomyces dermatitidis SLH14081] gi|239594892|gb|EEQ77473.1| conserved [Ajellomyces dermatitidis SLH14081]
  misc_feature (6)..(429): NCBI GI: 119497451 Blast Desc: NFIA_022980 [Neosartorya fischeri NRRL 181] gi|119413646|gb|EAW23587.1| [Neosartorya fischeri NRRL 181]
  misc_feature (15)..(420): NCBI GI: 70990132 Blast Desc: C6 finger domain protein [Aspergillus fumigatus Af293] gi|66847547|gb|EAL87877.1| C6 finger domain protein, [Aspergillus fumigatus Af293]
  misc_feature (10)..(432): NCBI GI: 255955525 Blast Desc: Pc21g15030 [Penicillium chrysogenum Wisconsin 54-1255] gi|211590226|emb|CAP96400.1| Pc21g15030 [Penicillium chrysogenum Wisconsin 54-1255]
  misc_feature: Useful for introducing or modulating the production of volatile compounds
MTDVYVTMGSSEDIRNLRKRRAHKKSRRGCANCKLRSIKCDETKPYCKKCESFNVICFYGSKSSPDNLATKASFQISLPGAVDKSLPAPLPVCGSGHNIETYQLFPCDIPLIEKFQRRTVQTLGTWATRHVYISKTLSMAFSYPLLMHVILAMAEIHDLVLPRARDKPEATCMLAYHWYHAVAMMKRKLLEPIVPSERDALWLSSSLISISNLAYVQARTPEEAWPLCPPSGADLSWFKLCDGQRLVASLTDPLRPDSELRLAAKEMCDIVDWVKELGEGDWEHEALDEETKAFGRFFGLWGDEASDLEGENCMTGRMNGRDDAEVQKQTDGFVNVINPYYATAKVALRLFRRDLDPDNFLMHICFITSFDTDFRSLLSRKDAKAMLLLLFWYAKICDIRVWWLWKQSRTEGVAIYQYLKREWMKSGNIKGLKLIEAPMGRILAAIAKDAI

SEQ ID NO: 27372 - DNA, 1887 bp, Muscodor strobelii
  misc_feature: SGI cDNA ID NO. 569376
  misc_feature: Encodes the peptide sequence at SEQ ID NO 27373
atggatagactaatcaaaatctcttttgtactttgcagcttttcaaccacattgccgcaggtagctgctgatgctgcgcattacaattatcttgaaggctttcagaatggcacccttgggaagattcctacacagacctttttctcatcgcctctaaaagccccaatctggcaggtcaataaactagatctcaacaagatagatgacactcgtttcatgttcatcactggtggctacgattggttcggcccaagtattatttcgtcgagggacttaagcttgatctgggccgacaacgactatttcgattcgcaagccttccgaacctatacagtgtttgataaacccgttattggtgtctttgccggcggcgctgtccaaatctacgatgaaaactacaacctcattaatcgagtgacacctaaaggcgacttttgggattacaatgcggatagtcatgaagccttaataacgacaaacaatagtgtggtaatgatcatagggaagaaagagactgctgatctgaagcacctcggtcaaggcaaagaagatgtgaccaataattacatccaagaggtaaagataggtagcaacaaggtccttttccagttcaatatgcgggactacttcaaccccgaggattcttactggccatggaagggatcaggaccatacgacttcagttgggctcatgatctatggcatacaaatagtgttgaaaagttgccaaacggagactttctggttagtagccggcacctccacagcatctttctcctagacggcaaggcagcaaaagttaagtgggttcttgggggtaaacgaagcgacttcaaagacattacgaaaaatgggtcaggcgtgtttcattggcagcataatgcgcgtctgacggcgccaaaccggatcactctctttgacaaccacaacatttggaacggcttctgtaaagagtctaaaagaggctgctcccgtggcttagagatcgagtttgacgagaagaaaaagacgtactgggttatcaatgagtggtaccatcctcaagggctaataacagcgtcgcgaggcggtgtaaatcgcacgccaaagaacaatacgcttgtggcttggggtcagaatcctatgtacactgaacacacgcccgatggcgaggtcgtaatggacgtccagcgtgggcaagttttgccactggaccatggaatcacccccgttattgcctatcgtgcttggaaagcagactggataggaaagccaaaatggccaccgtccattgctgccaacactcataatgtcacgaatgtgactagcatctatgtttcatggaacggggcgaccgaggttgataaatatgtcctacttgcatccaatgatagcagtctcttgaatggcaaagacagtatcatcgcaacatcgcgccgaaaaggattcgagacggcctttgcgctaaatcaaaaagtgcaatacacacgcatcgcagccctcgataggaacgggaccattcttggctttacagccgcagtaaacactgagactggtaacacaaccgaactcgagtacccactaaacgacatttggacgtcgaaactagcggaggcagaagctctggaagcagcgaaacatcgagatgaaattgacaagtcacggactatcgacggtccagctctagctttcattgctatctggattgcaattggctttaccgctattatcatcattgtgtgggccaacaccaaaacaccagagacgagcaacgatacgccgacgaggaagggactgatggattcgctgttgactattgtaaaacttcggaccatcaggagctggaatgacaacgtgagtccagaagaggaagaaggccttgtgagcggggaggaaaagccgatatag

SEQ ID NO: 27373 - protein, 628 aa, Muscodor strobelii
  misc_feature: SGI Peptide ID NO. 569376
  misc_feature (21)..(512): NCBI GI: 256728970 Blast Desc: NECHADRAFT_93399 [Nectria haematococca mpVI 77-13-4]
  misc_feature (23)..(569): NCBI GI: 46138467 Blast Desc: FG10748.1 [Gibberella zeae PH-1]
  misc_feature (46)..(558): NCBI GI: 256726433 Blast Desc: NECHADRAFT_93090 [Nectria haematococca mpVI 77-13-4]
  misc_feature (18)..(515): NCBI GI: 145237878 Blast Desc: An07g05030 [Aspergillus niger] gi|134076063|emb|CAK39422.1| protein product [Aspergillus niger]
  misc_feature (5)..(536): NCBI GI: 169772893 Blast Desc: [Aspergillus oryzae RIB40] gi|83768776|dbj|BAE58913.1| protein product [Aspergillus oryzae]
  misc_feature (34)..(517): NCBI GI: 256733432 Blast Desc: NECHADRAFT_36547 [Nectria haematococca mpVI 77-13-4]
  misc_feature (121)..(508): NCBI GI: 255941392 Blast Desc: Pc16g11630 [Penicillium chrysogenum Wisconsin 54-1255] gi|211586088|emb|CAP93833.1| Pc16g11630 [Penicillium chrysogenum Wisconsin 54-1255]
  misc_feature (5)..(512): NCBI GI: 119473829 Blast Desc: NFIA_002430 [Neosartorya fischeri NRRL 181] gi|119406943|gb|EAW16893.1| conserved [Neosartorya fischeri NRRL 181]
  misc_feature (21)..(573): NCBI GI: 67538590 Blast Desc: AN5465.2 [Aspergillus nidulans FGSC A4] gi|40743435|gb|EAA62625.1| AN5465.2 [Aspergillus nidulans FGSC A4] gi|259485087|tpe|CBF81860.1| TPA: conserved [Aspergillus FGSC
  misc_feature (13)..(505): NCBI GI: 159125981 Blast Desc: conserved [Aspergillus fumigatus A1163]
MDRLIKISFVLCSFSTTLPQVAADAAHYNYLEGFQNGTLGKIPTQTFFSSPLKAPIWQVNKLDLNKIDDTRFMFITGGYDWFGPSIISSRDLSLIWADNDYFDSQAFRTYTVFDKPVIGVFAGGAVQIYDENYNLINRVTPKGDFWDYNADSHEALITTNNSVVMIIGKKETADLKHLGQGKEDVTNNYIQEVKIGSNKVLFQFNMRDYFNPEDSYWPWKGSGPYDFSWAHDLWHTNSVEKLPNGDFLVSSRHLHSIFLLDGKAAKVKWVLGGKRSDFKDITKNGSGVFHWQHNARLTAPNRITLFDNHNIWNGFCKESKRGCSRGLEIEFDEKKKTYWVINEWYHPQGLITASRGGVNRTPKNNTLVAWGQNPMYTEHTPDGEVVMDVQRGQVLPLDHGITPVIAYRAWKADWIGKPKWPPSIAANTHNVTNVTSIYVSWNGATEVDKYVLLASNDSSLLNGKDSIIATSRRKGFETAFALNQKVQYTRIAALDRNGTILGFTAAVNTETGNTTELEYPLNDIWTSKLAEAEALEAAKHRDEIDKSRTIDGPALAFIAIWIAIGFTAIIIIVWANTKTPETSNDTPTRKGLMDSLLTIVKLRTIRSWNDNVSPEEEEGLVSGEEKPI

SEQ ID NO: 27374 - DNA, 3878 bp, Muscodor strobelii
  misc_feature: SGI EST ID NO. CUFF.64570.0
  misc_feature: Variant of the nucleotide sequence at SEQ ID NO 27372
cctgcaccaaaaaggcgtatcatcagcatttgtgtcaccatgactgctgtaaaagtctcttcccttcttctactaacaggctagtggcatgattgtgcagttatggaaggagggagaaataatgggaggacatggctgcttcgcctaccagtcgggtagttcatatggggaaactcaatgacagctagatccgctcatgatgaatacgcctgggcgctgcactgtgtctagtctctttttgcatctctgtatcaagagcacagcctcgacaaattccgagattgccctttcttctggaatctgagcacaataacgggaaaccattgacggcggctcccttcgacgcgacacagtcccagccggccggctcttgtcggaactcggcagctagtggacggcggccactagtgccctctcgatgacgcggattgaacaagcaaggagcgttccacagcagacaacacactccgtgcattacttgcctacgatattcttaaagtcttgtcttacctctatgatgagaagaacatgtcgacgggagtattgcacagctactcgaaataccggactctctacttcaaatactaccaatcatggtaaccggcaatggcggccctgtcttgtacgtgagaacgtacaagcagagtacgtgtactcacaatgagaacctcaaatgatccacttacctgtattgcaagggcccttctcgtgtatttggctatgtcttgtccattcttgatgttctattctggtgctagtgacgccccattctcatgagtcgctgtggatctgcgtacgacatcaggggcattgcttcctccctaccgaagacagggagtctttataatgacagttaactgtcgctcttgtcctatggtaacattttcgcagctgtttggatgccgatgacaacattttcaagcgtaatgttgtcatcgccctcgtcattctcacgatggatagactaatcaaaatctcttttgtactttgcagcttttcaaccacattgccgcaggtagctgctgatgctgcgcattacaattatcttgaaggctttcagaatggcacccttgggaagattcctacacagacctttttctcatcgcctctaaaagccccaatctggcaggtcaataaactagatctcaacaagatagatgacactcgtttcatgttcatcactggtggctacgattggttcggcccaagtattatttcgtcgagggacttaagcttgatctgggccgacaacgactatttcgattcgcaagccttccgaacctatacagtgtttgataaacccgttattggtgtctttgccggcggcgctgtccaaatctacgatgaaaactacaacctcattaatcgagtgacacctaaaggcgacttttgggattacaatgcggatagtcatgaagccttaataacgacaaacaatagtgtggtaatgatcatagggaagaaagagactgctgatctgaagcacctcggtcaaggcaaagaagatgtgaccaataattacatccaagaggtaaagataggtagcaacaaggtccttttccagttcaatatgcgggactacttcaaccccgaggattcttactggccatggaagggatcaggaccatacgacttcagttgggctcatgatctatggcatacaaatagtgttgaaaagttgccaaacggagactttctggttagtagccggcacctccacagcatctttctcctagacggcaaggcagcaaaagttaagtgggttcttgggggtaaacgaagcgacttcaaagacattacgaaaaatgggtcaggcgtgtttcattggcagcataatgcgcgtctgacggcgccaaaccggatcactctctttgacaaccacaacatttggaacggcttctgtaaagagtctaaaagaggctgctcccgtggcttagagatcgagtttgacgagaagaaaaagacgtactgggttatcaatgagtggtaccatcctcaagggctaataacagcgtcgcgaggcggtgtaaatcgcacgccaaagaacaatacgcttgtggcttggggtcagaatcctatgtacactgaacacacgcccgatggcgaggtcgtaatggacgtccagcgtgggcaagttttgccactggaccatggaatcacccccgttattgcctatcgtgcttggaaagcagactggataggaaagccaaaatggccaccgtccattgctgccaacactcataatgtcacgaatgtgactagcatctatgtttcatggaacggggcgaccgaggttgataaatatgtcctacttgcatccaatgatagcagtctcttgaatggcaaagacagtatcatcgcaacatcgcgccgaaaaggattcgagacggcctttgcgctaaatcaaaaagtgcaatacacacgcatcgcagccctcgataggaacgggaccattcttggctttacagccgcagtaaacactgagactggtaacacaaccgaactcgagtacccactaaacgacatttggacgtcgaaactagcggaggcagaagctctggaagcagcgaaacatcgagatgaaattgacaagtcacggactatcgacggtccagctctagctttcattgctatctggattgcaattggctttaccgctattatcatcattgtgtgggccaacaccaaaacaccagagacgagcaacgatacgccgacgaggaagggactgatggattcgctgttgactattgtaaaacttcggaccatcaggagctggaatgacaacgtgagtccagaagaggaagaaggccttgtgagcggggaggaaaagccgatatagattataaacactcatgctacatagcagtctctttttacatatgtcctccagaacactctagcatcaaacgattctttcacttagcgtctgtacaataatataattttttagacaattccagcaatgctcatatcgcatctttcgctatcgcagctaagatccgccccataggcgcctcgatcaatttcagtcctttgatattcccgctcttcatccattctctttttagatactggtatatcgcaactccttcggtacgcgactgcttccacaaccaccagacccgtatgtcacagatctttgcataccaaaagagcagcaaaagcatggctttcgcgtctttgcggcttagtaggctacggaagtcggtgtcgaacgacgtaatgaagcatatgtgcatcagaaagttgtccgggtccaagtctcgccgaaacaggcgtaatgctactttcgcggtcgcgtagtaggggttaatcacattgacgaatccgtcggtctgcttttggacttccgcgtcgtcgcgaccattcatccttccagtcatacagttctcaccttccaaatcagaggcctcatcaccccaaagtccaaaaaacctaccaaatgccttcgtctcttcgtccaacgcctcgtgttcccaatcaccctcccccaattctttcacccaatccacgatatcacacatctccttcgcagcaagtctcaactccgagtccggtctcaacggatccgtcaaactcgcaaccaatctctgaccatcacagagcttaaaccaggaaagatcagctcccgatggcggacaaagtggccaagcttcctctggcgtacgggcttggacgtaagccaaattactgatactaattagactcgacgacaaccacagtgcatcacgctcagatggaacgataggctcgagaagcttgcgcttcatcatcgcgacggcgtggtaccagtggtatgcaagcatgcatgtcgcttcaggcttatcgcgagcgcgtggcaagactaggtcgtggatttcggccatggcgaggat

SEQ ID NO: 27375 - DNA, 1479 bp, Muscodor strobelii
  misc_feature: SGI cDNA ID NO. 569377
  misc_feature: Elevated expression when VOC is produced
  misc_feature: Encodes the peptide sequence at SEQ ID NO 27376
atgccttctctcttacgctgtgctatcatcacagctggtttctttgctcatgccaattacgcgagtggaacctgcaatactgctgccgatcgagcttgttggtcctcggggtttgacataaacacagattatgagtcggtaacgccatccggcgttactcgatcctacagctggacagttgaggagatcgaggactggcttgccccagatggcgagctgaagagtagagctatgctcataaacggcatgtatccaggaccaactattacggcagactggggcgacactatctcggtgactgtgactaacaaattaatggtgaatggcaccgtattccactggcacggcctacgtcaactcaacaacaatgtggaggacggcgttggaggtataacggaatgccccattcctcctgggagaagtaagacgtacacgttcaagttgacgcaatacggcaatacatggtatcattctcacttctcatcacaatatgccaacggcgtcttcggcgccatccaaattaacggcccgtcgtcagcgaattatgacatcgatctgggtacttatcccatcaatgatttttacctggcctcggcagaccagatcgtcgcaaccagtcagcttggcgcggcatcggaagtgagctctaacgtgatgttcaatggcacaaatatcaatttgtctggtaatggtgctggttcgtattcgcttgtgaacttgacgccaggcaaaacgcatcttctccgcctctacaacccttcagctcaacatcattatcaagtatctgtcgtcgggcacaatatgactgtgatcgcaaccgacctggtacctattgagccagtcgcgacagataatctcttcctcgccatcggacaacgcgcacatattctgctcacggcgaaccaaaaagccggtaactattggatgaacataacactaccgacgtccggaaaatgcggagtttcaaaaaacctgtttcccgcagctattgtgcactacacgaatgtgacacttggaagcccaacggataagggaacaacccctgttgacacgggctgcttagatagtctcgcgtacacgcccatagtgtcgcaggcagcggatccagagacgttcggacacacgccagacaatacggtagattttagttctgtcacgacgccaacgacgcattgggttatcaacgggtcgacgatatacaactcgacaatgagggtagactggaacaagccgctgctagactacgtcctgtcagacaatatgtcctacccattgacagatgacgttatcacgatcaatcaaaagaacgaatggacgtactggattatggagagcacctcaacaggacctcacccaattcatctacatggacacgatttcctagtgttgggtgtctcagctgcgaatgcgggtttttttcggatgtcgacgttgcctcgctcaattttgacaatcccaagcgacgcgatgtcacgatga

SEQ ID NO: 27376 - protein, 492 aa, Muscodor strobelii
  misc_feature: SGI Peptide ID NO. 569377
  misc_feature (187)..(336): Pfam Id: PF00394 Pfam Desc: Multicopper oxidase
  misc_feature (405)..(481): Pfam Id: PF07731 Pfam Desc: Multicopper oxidase
  misc_feature (61)..(179): Pfam Id: PF07732 Pfam Desc: Multicopper oxidase
  misc_feature (405)..(479): Pfam Id: PF07731 Pfam Desc: Multicopper oxidase
  misc_feature (24)..(466): NCBI GI: 74691506 Blast Desc: LAC1_MELAO RecName: Full=Laccase-1; AltName: Full=Benzenediol:oxygen oxidoreductase 1; AltName: Full=Urishiol oxidase 1; AltName: Full=Diphenol oxidase 1; AltName: Flags:
  misc_feature (24)..(466): NCBI GI: 251836877 Blast Desc: LAC1_MELAO RecName: Full=Laccase-1; AltName: Full=Benzenediol:oxygen oxidoreductase 1; AltName: Full=Urishiol oxidase 1; AltName: Full=Diphenol oxidase 1; AltName: Flags:
  misc_feature (24)..(466): NCBI GI: 170784985 Blast Desc: LAC1_MELAO RecName: Full=Laccase-1; AltName: Full=Benzenediol:oxygen oxidoreductase 1; AltName: Full=Urishiol oxidase 1; AltName: Full=Diphenol oxidase 1; AltName: Flags:
  misc_feature (25)..(466): NCBI GI: 2833199 Blast Desc: LAC1_CRYPA RecName: Full=Laccase; AltName: Full=Benzenediol:oxygen oxidoreductase; AltName: Full=Urishiol oxidase; AltName: Full=Diphenol oxidase; Flags: Precursor laccase
  misc_feature (24)..(466): NCBI GI: 22218673 Blast Desc: LAC1_CRYPA RecName: Full=Laccase; AltName: Full=Benzenediol:oxygen oxidoreductase; AltName: Full=Urishiol oxidase; AltName: Full=Diphenol oxidase; Flags: Precursor laccase
  misc_feature (24)..(466): NCBI GI: 116205994 Blast Desc: laccase [Chaetomium globosum CBS 148.51] gi|88182887|gb|EAQ90355.1| laccase [Chaetomium globosum CBS 148.51]
  misc_feature (25)..(466): NCBI GI: 85082547 Blast Desc: laccase precursor [Neurospora crassa OR74A] gi|118572665|sp|P06811.3|LAC1_NEUCR RecName: Full=Laccase; AltName: Full=Benzenediol:oxygen oxidoreductase; AltName: Flags:
  misc_feature (25)..(466): NCBI GI: 168826 Blast Desc: laccase [Neurospora crassa]
  misc_feature (25)..(466): NCBI GI: 168828 Blast Desc: laccase [Neurospora crassa]
  misc_feature (10)..(466): NCBI GI: 171678535 Blast Desc: protein product [Podospora anserina] gi|2829670|sp|P78722.1|LAC2_PODAN RecName: Full=Laccase-2; AltName: Full=Laccase II; AltName: Full=Benzenediol:oxygen 2; 2;
  misc_feature (24)..(466): SWISSPROT Homolog: EC 1.10.3.2 Laccase
  misc_feature: Useful for introducing or modulating the production of volatile compounds
MPSLLRCAIITAGFFAHANYASGTCNTAADRACWSSGFDINTDYESVTPSGVTRSYSWTVEEIEDWLAPDGELKSRAMLINGMYPGPTITADWGDTISVTVTNKLMVNGTVFHWHGLRQLNNNVEDGVGGITECPIPPGRSKTYTFKLTQYGNTWYHSHFSSQYANGVFGAIQINGPSSANYDIDLGTYPINDFYLASADQIVATSQLGAASEVSSNVMFNGTNINLSGNGAGSYSLVNLTPGKTHLLRLYNPSAQHHYQVSVVGHNMTVIATDLVPIEPVATDNLFLAIGQRAHILLTANQKAGNYWMNITLPTSGKCGVSKNLFPAAIVHYTNVTLGSPTDKGTTPVDTGCLDSLAYTPIVSQAADPETFGHTPDNTVDFSSVTTPTTHWVINGSTIYNSTMRVDWNKPLLDYVLSDNMSYPLTDDVITINQKNEWTYWIMESTSTGPHPIHLHGHDFLVLGVSAANAGFFRMSTLPRSILTIPSDAMSR

SEQ ID NO: 27377 - DNA, 1854 bp, Muscodor strobelii
  misc_feature: SGI EST ID NO. CUFF.64584.0
  misc_feature: Variant of the nucleotide sequence at SEQ ID NO 27375
ctcgtgcggttgaagcacgcatggtcaattcacaatgccttctctcttacgctgtgctatcatcacagctggtttctttgctcatgccaattacgcgagtggaacctgcaatactgctgccgatcgagcttgttggtcctcggggtttgacataaacacagattatgagtcggtaacgccatccggcgttactcgatcctacagctggacagttgaggagatcgaggactggcttgccccagatggcgagctgaagagtagagctatgctcataaacggcatgtatccaggaccaactattacggcagactggggcgacactatctcggtgactgtgactaacaaattaatggtgaatggcaccgtattccactggcacggcctacgtcaactcaacaacaatgtggaggacggcgttggaggtataacggaatgccccattcctcctgggagaagtaagacgtacacgttcaagttgacgcaatacggcaatacatggtatcattctcacttctcatcacaatatgccaacggcgtcttcggcgccatccaaattaacggcccgtcgtcagcgaattatgacatcgatctgggtacttatcccatcaatgatttttacctggcctcggcagaccagatcgtcgcaaccagtcagcttggcgcggcatcggaagtgagctctaacgtgatgttcaatggcacaaatatcaatttgtctggtaatggtgctggttcgtattcgcttgtgaacttgacgccaggcaaaacgcatcttctccgcctctacaacccttcagctcaacatcattatcaagtatctgtcgtcgggcacaatatgactgtgatcgcaaccgacctggtacctattgagccagtcgcgacagataatctcttcctcgccatcggacaacgcgcacatattctgctcacggcgaaccaaaaagccggtaactattggatgaacataacactaccgacgtccggaaaatgcggagtttcaaaaaacctgtttcccgcagctattgtgcactacacgaatgtgacacttggaagcccaacggataagggaacaacccctgttgacacgggctgcttagatagtctcgcgtacacgcccatagtgtcgcaggcagcggatccagagacgttcggacacacgccagacaatacggtagattttagttctgtcacgacgccaacgacgcattgggttatcaacgggtcgacgatatacaactcgacaatgagggtagactggaacaagccgctgctagactacgtcctgtcagacaatatgtcctacccattgacagatgacgttatcacgatcaatcaaaagaacgaatggacgtactggattatggagagcacctcaacaggacctcacccaattcatctacatggacacgatttcctagtgttgggtgtctcagctgcgaatgcgggtttttttcggatgtcgacgttgcctcgctcaattttgacaatcccaagcgacgcgatgtcacgatgatacctccgaagggttggcttgtactcgctttcaaatcggacaatccaggtgcttggctttttcattgccacattgcgtggcatggatcgaatggcatggcgctcacgtttctagaacgcatatccgagcaaaaagcgctcataagcgcttcgcaattgaaggcgtatgaggataattgtgctgcgtggagtgagtactggaacgatcagacttcagtcaagcaaaccgattcaggggtttaaggggcttgaagcgtcgcggaattgagtcattcttgtagtattgcctttcgctatagagagtgagacaagcagttgagaattgcctatctacgaagtgat

SEQ ID NO: 27378 - DNA, 474 bp, Muscodor strobelii
  misc_feature: SGI cDNA ID NO. 569378
  misc_feature: Encodes the peptide sequence at SEQ ID NO 27379
atggcacccaataaaaggaagcccaagctagcatcctcgatgtttccttcactgcatctagacgtttcgagtctgcttgcagaggatgacctccgcttcacttttcaccccaacggtcaggaccgggatgctactcgaagctacgacaccaacatcatgggatattttgcttgtcacaatgcccaatgtaacaaaaccggatggggaagcaaacgaattgcaataacaattcgcatgtttgagggcaaaaagtacaatgcgagtgtgtggcatcaacactgcgcatcatgcaacacaatgggcaaacccaagttagatgactcgtatgcagatcgagtcgcctatagactaaagaagtggagcggtcttcaaatggaacggaaattatacatcaaaaagcgtggcaaattgccgcatcatcgtcttttgtgcgaaggatgcaaagcaggccattgcacggaggcagatgactag

SEQ ID NO: 27379 - protein, 157 aa, Muscodor strobelii
  misc_feature: SGI Peptide ID NO. 569378
  misc_feature (1)..(156): NCBI GI: 121703902 Blast Desc: conserved [Aspergillus clavatus NRRL 1] gi|119398359|gb|EAW08789.1| conserved [Aspergillus clavatus NRRL 1]
  misc_feature (1)..(156): NCBI GI: 256722733 Blast Desc: NECHADRAFT_53170 [Nectria haematococca mpVI 77-13-4]
  misc_feature (1)..(157): NCBI GI: 169777867 Blast Desc: [Aspergillus oryzae RIB40] gi|83772136|dbj|BAE62266.1| protein product [Aspergillus oryzae]
  misc_feature (1)..(156): NCBI GI: 238841695 Blast Desc: conserved [Microsporum canis CBS 113480]
  misc_feature (3)..(152): NCBI GI: 225560056 Blast Desc: conserved [Ajellomyces capsulatus G186AR]
  misc_feature (8)..(152): NCBI GI: 154309750 Blast Desc: BC1G_07345 [Botryotinia fuckeliana B05.10] gi|150851806|gb|EDN26999.1| BC1G_07345 [Botryotinia fuckeliana B05.10]
  misc_feature (13)..(156): NCBI GI: 258573021 Blast Desc: conserved [Uncinocarpus reesii 1704] gi|237900958|gb|EEP75359.1| conserved [Uncinocarpus reesii 1704]
  misc_feature (14)..(157): NCBI GI: 46116014 Blast Desc: FG03849.1 [Gibberella zeae PH-1]
  misc_feature (12)..(153): NCBI GI: 261205866 Blast Desc: conserved [Ajellomyces dermatitidis SLH14081] gi|239592729|gb|EEQ75310.1| conserved [Ajellomyces dermatitidis SLH14081]
  misc_feature (14)..(155): NCBI GI: 255944477 Blast Desc: Pc20g04630 [Penicillium chrysogenum Wisconsin 54-1255] gi|211587741|emb|CAP85792.1| Pc20g04630 [Penicillium chrysogenum Wisconsin 54-1255]
MAPNKRKPKLASSMFPSLHLDVSSLLAEDDLRFTFHPNGQDRDATRSYDTNIMGYFACHNAQCNKTGWGSKRIAITIRMFEGKKYNASVWHQHCASCNTMGKPKLDDSYADRVAYRLKKWSGLQMERKLYIKKRGKLPHHRLLCEGCKAGHCTEADD

SEQ ID NO: 27380 - DNA, 498 bp, Muscodor strobelii
  misc_feature: SGI EST ID NO. CUFF.64575.0
  misc_feature: Variant of the nucleotide sequence at SEQ ID NO 27378
gcaaaaagtacaatgcgagtgtgtggcatcaacactgcgcatcatgcaacacaatgggcaaacccaagttagatgactcgtatgcagatcgagtcgcctatagactaaagaagtggagcggtcttcaaatggaacggaaattatacatcaaaaagcgtggcaaattgccgcatcatcgtcttttgtgcgaaggatgcaaagcaggccattgcacggaggcagatgactagtactattcatacgtacaactcatcgtcctgcatttctgactttttctgacgactgagactttgtttcgttccgttaggatgttctgaccttttcttttttcaaagtagatattgggacattgggagactttcatgatggcctgacctgtctctctatggttagcttgtggatgagggttgagagtagttctcgaaacgtagcgagatcgacacgaagaactggtttccggcggtacgtatgctagctattaatatagacgggaggctg

SEQ ID NO: 27381 - DNA, 1278 bp, Muscodor strobelii
  misc_feature: SGI cDNA ID NO. 569379
  misc_feature: Encodes the peptide sequence at SEQ ID NO 27382
atgggccagctcgtctcaacagccatggcccaagagcagaactccaacatcaccgggagcgctatcaagatcatccccattggcaccgcctcgcagccctttgacgacacgacttaccttgccgatccttgggtcattcctcgccagtcgtcttctggcttctggctctctggcacaacgtcaaaatatctgcattgtagtggttctctcagcagcgaatgcgcttccgcacatccggcgctgaatctgacttacactaacagtgcctccctcgaaagacagatgtccagcgcgggcgctaaggtttgcgcacacggaaaccaccagcctgtccaggatcgcgtaactaagaaatggcacgcagccatcactctacgtgtcttcccctcggatgcatcatgtgccaaaggtggtggtacggttgatcgctggcacgttgttgttcacgcgaggccggctgatggtgaagacgcttccggcgtagatccacctacagcctgggtcggcgactctgcgcttgccggaagcttctccgaacccaaggtgaaagggaattatgatggcaagtattttcgcacgcccgcgccagagtctcagctctatcttctttacgagaaagaagacatcgagatgacgaatcaagctggcgggcaaggacgaaacggcgtcgtggcatgggccatgaaagacgattataaaacccctgtgaatagctctgccaagcctgttttccttctgaggtccgacgaggacctgaactcgcaatttgcatcagtagaccaatggactagtggccaggggtctaaagtcatcgagacaggcaatgtgtttgtcgtgaatgggaaatttgccatgacctactcgacgggcacgtttcagaaaaagacctacaaggctgggctagcatggtctgatactttcttgcccaaaaagggggatacctggcgtaaggtcatgcgggcaaatccgaacggattctataagtcgccaggatccaaggaggctgattacctcgtgcagtcagataacaaccacgctggatggaactacgttggcgaccaagtcattgcgcctggggttgctaccgtagtgaataatggggcaagtgggaagtatgtcctagttttctgtggctacgacgccaaggacctgccaccgacgccgacacatcgccggccgtactatattgagttggctgttaatgtgccgaaagatgtttcggtggcagacgcgactgatgcggagttacgggactgggtcaagcctagatattcatga

SEQ ID NO: 27382 - protein, 425 aa, Muscodor strobelii
  misc_feature: SGI Peptide ID NO. 569379
MGQLVSTAMAQEQNSNITGSAIKIIPIGTASQPFDDTTYLADPWVIPRQSSSGFWLSGTTSKYLHCSGSLSSECASAHPALNLTYTNSASLERQMSSAGAKVCAHGNHQPVQDRVTKKWHAAITLRVFPSDASCAKGGGTVDRWHVVVHARPADGEDASGVDPPTAWVGDSALAGSFSEPKVKGNYDGKYFRTPAPESQLYLLYEKEDIEMTNQAGGQGRNGVVAWAMKDDYKTPVNSSAKPVFLLRSDEDLNSQFASVDQWTSGQGSKVIETGNVFVVNGKFAMTYSTGTFQKKTYKAGLAWSDTFLPKKGDTWRKVMRANPNGFYKSPGSKEADYLVQSDNNHAGWNYVGDQVIAPGVATVVNNGASGKYVLVFCGYDAKDLPPTPTHRRPYYIELAVNVPKDVSVADATDAELRDWVKPRYS

SEQ ID NO: 27383 - DNA, 317 bp, Muscodor strobelii
  misc_feature: SGI EST ID NO. CUFF.64593.0
  misc_feature: Variant of the nucleotide sequence at SEQ ID NO 27381
gccaggggtctaaagtcatcgagacaggcaatgtgtttgtcgtgaatgggaaatttgccatgacctactcgacgggcacgtttcagaaaaagacctacaaggctgggctagcatggtctgatactttcttgcccaaaaagggggatacctggcgtaaggtcatgcgggcaaatccgaacggattctataagtcgccaggatccaaggaggctgattacctcgtgcagtcagataacaaccacgctggatggaactacgttggcgaccaagtcattgcgcctggggttgctaccgtagtgaataatggggcaagtggg

SEQ ID NO: 27384 - DNA, 816 bp, Muscodor strobelii
  misc_feature: SGI cDNA ID NO. 569380
  misc_feature: Encodes the peptide sequence at SEQ ID NO 27385
atgcatgagttcgacggtgtagacgatgcatccgaagctgcatcggaggatctttcctttcattcgctgtctccgaaaggcgatatagagactgttgatgagcgaacaaacgccagttttgtaccgttggctcaatcttcaggtgtcgagcagcaacgccacagatatcagagaaatggtcgattctcatgtccagaatgtggcaaaacatgtgctcgacgtgattcgctttacaggcaccgaagagtcaaacatcacattggcatccagtattcatgtggtgaaccgcactgcagtaagaaggacaagcaatggggacgtttcgatgcattcaagaagcacatgaggctccaccatcataagtccatagtttatcaggatagcgataacttcggtagggtggtccctcctccgaatgatccatctcctagcatcgttgaatcggagtctagccagactgctgctacaccagatctgcccatgagctatggccacgatcctacgatgtcccgtaccgcattggtgagggaagaggagtacaaattgacaccgagtctcgcgaggaacacgctgccgcgcctagactcctacgaccgtgggcagctcattcagctcattggcgccaagatgcaggaatatgacgacctaagacgccaatgcgaagctctgaaaaccgagagggatgagagagcacgcgaatgtggcaagttgaaagaccaatgccagatcgtcaaaatggagagagatgaatatcttgaagctctcactatgtctgaggagatgcgaatgaaacttgagggcaagggtcgttcgtga

SEQ ID NO: 27385 - protein, 271 aa, Muscodor strobelii
  misc_feature: SGI Peptide ID NO. 569380
  misc_feature (62)..(85): Pfam Id: PF00096 Pfam Desc: Zinc finger, C2H2 type
MHEFDGVDDASEAASEDLSFHSLSPKGDIETVDERTNASFVPLAQSSGVEQQRHRYQRNGRFSCPECGKTCARRDSLYRHRRVKHHIGIQYSCGEPHCSKKDKQWGRFDAFKKHMRLHHHKSIVYQDSDNFGRVVPPPNDPSPSIVESESSQTAATPDLPMSYGHDPTMSRTALVREEEYKLTPSLARNTLPRLDSYDRGQLIQLIGAKMQEYDDLRRQCEALKTERDERARECGKLKDQCQIVKMERDEYLEALTMSEEMRMKLEGKGRS

SEQ ID NO: 27386 - DNA, 2350 bp, Muscodor strobelii
  misc_feature: SGI EST ID NO. CUFF.64747.0
  misc_feature: Variant of the nucleotide sequence at SEQ ID NO 27384
gctattctgacgcgacgtcggttgactcaacggctatgcgccatgcatgagttcgacggtgtagacgatgcatccgaagctgcatcggaggatctttcctttcattcgctgtctccgaaaggcgatatagagactgttgatgagcgaacaaacgccagttttgtaccgttggctcaatcttcaggtgtcgagcagcaacgccacagatatcagagaaatggtcgattctcatgtccagaatgtggcaaaacatgtgctcgacgtgattcgctttacaggcaccgaagagtcaaacatcacattggcatccagtattcatgtggtgaaccgcactgcagtaagaaggacaagcaatggggacgtttcgatgcattcaagaagcacatgaggctccaccatcataagtccatagtttatcaggatagcgataacttcggtagggtggtccctcctccgaatgatccatctcctagcatcgttgaatcggagtctagccagactgctgctacaccagatctgcccatgagctatggccacgatcctacgatgtcccgtaccgcattggtgagggaagaggagtacaaattgacaccgagtctcgcgaggaacacgctgccgcgcctagactcctacgaccgtgggcagctcattcagctcattggcgccaagatgcaggaatatgacgacctaagacgccaatgcgaagctctgaaaaccgagagggatgagagagcacgcgaatgtggcaagttgaaagaccaatgccagatcgtcaaaatggagagagatgaatatcttgaagctctcactatgtctgaggagatgcgaatgaaacttgagggcaagggtcgttcgtgatcgccctgtggttttcgtgtcttcatccatttctattcccgactacacaacattccaacatgagagaaacatttggtattcaccatggcctgctatagacgatgaggtgggtcttggcacagctcgctacctcattgcaccagtcagtatcccttgagtcgtcaacctatgtctgtgtgtgcggcatcctttcgagctcgggtcacggaaaacgcaggacgcactaaacgtatgctaattagaagcgaccgaagcaacctggtaaaagtttatactgtacgttctggtcattcaaataaaggtactcgcttcgtggaacggaagatacgagtaatattctatgttcgaaaacccgaaaggaagggagaaataggtcgtcttcagttcgcgcatcgcttctcacatcccttctcttcattatcagattgtcctaatagcatctaataactacgctgtccttctacggatccgacccaattgatagatcattcatctaaactatctagaccgaagatgactaagtgctatgtgggtgcgtgtatatgttatcgttgccaaaatccaatagcaatgcttcccatacatttctgctagtgggtaatgcaaaataatcagtagtcgctagtagctttgagagtctagaagttatcacaatacacgcaatggcgttcagaattataatgtgcatatagacttagttttgaaaacctcaaatcacctgcccttccatcttagtctcgcaacccactgtgcccaccgcctgacctcttcctctgccattaacagctctaccgtataataattccttgcaagttcctcatggccagcaaacctatgcacaaaagagtgacaggcgcggcagagccatgcaacattctgcagatcggcctctcgatgccagccgcgcttaacggccttagcatgtacaaaccggggaatgaggtgatggtacgtcaaattcaaccagtcgcggccgcagatctcacaagcgtcggctcgtgtggcgactggaggcggcggttttgtactgattgctgtgaggtaggcagtgaggaccggcgcaaggaattcgtgattccttgcacattttcgtggagaatgccataggctatgagcgagtccccgatgtctggatccaggagcggcaggtgggtggctatgtcttcgccggtgagagggagggaataatgttcttggagatggggcgtcgcgatatagtcgttatagtctattgctttgagttccgggggtagacaggtgaatacttcggttgcgacgtattccgtgaagtcggcgaggtctgcgttttggctaatgttttgatctgcatcgttctcatcctgactttgatccaagctcatcaattgtgctggtttgtctactgcctgctcgccaatttgtgtctggcattggaggctcgtttcatcggacggctcagacgctttcgtgcgttttctgtcccgagtcttggtccgccgtcgctcctttttgc

SEQ ID NO: 27387 - DNA, 621 bp, Muscodor strobelii
  misc_feature: SGI cDNA ID NO. 569381
  misc_feature: Encodes the peptide sequence at SEQ ID NO 27388
atgtcggtaccagaagatcagaagcagaacttcgaattatttcgcgactgtcttgacactgcgttaatagagaagatatcagaaccgcgcaaaaaggagcgacggcggaccaagactcgggacagaaaacgcacgaaagcgtctgagccgtccgatgaaacgagcctccaatgccagacacaaattggcgagcaggcagtagacaaaccagcacaattgatgagcttggatcaaagtcaggatgagaacgatgcagatcaaaacattagccaaaacgcagacctcgccgacttcacggaatacgtcgcaaccgaagtattcacctgtctacccccggaactcaaagcaatagactataacgactatatcgcgacgccccatctccaagaacattattccctccctctcaccggcgaagacatagccacccacctgccgctcctggatccagacatcggggactcgctcatagcctatggcattctccacgaaaatgtgcaaggaatcacgaattccttgcgccggtcctcactgcctacctcacagcaatcagtacaaaaccgccgcctccagtcgccacacgagccgacgcttgtgagatctgcggccgcgactggttga

SEQ ID NO: 27388 - protein, 206 aa, Muscodor strobelii
  misc_feature: SGI Peptide ID NO. 569381
  misc_feature (3)..(161): NCBI GI: 116203653 Blast Desc: CHGG_09710 [Chaetomium globosum CBS 148.51] gi|88175838|gb|EAQ83306.1| CHGG_09710 [Chaetomium globosum CBS 148.51]
  misc_feature (6)..(162): NCBI GI: 156039649 Blast Desc: SS1G_11961 [Sclerotinia sclerotiorum 1980] gi|154697698|gb|EDN97436.1| SS1G_11961 [Sclerotinia sclerotiorum 1980]
  misc_feature (85)..(169): NCBI GI: 261361214 Blast Desc: conserved [Verticillium albo-atrum VaMs.102]
  misc_feature (7)..(162): NCBI GI: 154295142 Blast Desc: BC1G_13514 [Botryotinia fuckeliana B05.10] gi|150844197|gb|EDN19390.1| BC1G_13514 [Botryotinia fuckeliana B05.10]
  misc_feature (6)..(159): NCBI GI: 67528021 Blast Desc: AN4249.2 [Aspergillus nidulans FGSC A4] gi|40740158|gb|EAA59348.1| AN4249.2 [Aspergillus nidulans FGSC A4] gi|259481139|tpe|CBF74395.1| TPA: conserved [Aspergillus FGSC
  misc_feature (1)..(162): NCBI GI: 256732595 Blast Desc: NECHADRAFT_78942 [Nectria haematococca mpVI 77-13-4]
  misc_feature (10)..(162): NCBI GI: 115389290 Blast Desc: conserved [Aspergillus terreus NIH2624] gi|114194546|gb|EAU36246.1| conserved [Aspergillus terreus NIH2624]
  misc_feature (2)..(162): NCBI GI: 189200693 Blast Desc: conserved [Pyrenophora tritici-repentis Pt-1C-BFP] gi|187983782|gb|EDU49270.1| conserved [Pyrenophora tritici-repentis Pt-1C-BFP]
  misc_feature (3)..(164): NCBI GI: 238844153 Blast Desc: conserved [Microsporum canis CBS 113480]
  misc_feature (94)..(162): NCBI GI: 46125217 Blast Desc: FG06986.1 [Gibberella zeae PH-1]
MSVPEDQKQNFELFRDCLDTALIEKISEPRKKERRRTKTRDRKRTKASEPSDETSLQCQTQIGEQAVDKPAQLMSLDQSQDENDADQNISQNADLADFTEYVATEVFTCLPPELKAIDYNDYIATPHLQEHYSLPLTGEDIATHLPLLDPDIGDSLIAYGILHENVQGITNSLRRSSLPTSQQSVQNRRLQSPHEPTLVRSAAATG

SEQ ID NO: 27389 - DNA, 377 bp, Muscodor strobelii
  misc_feature: SGI EST ID NO. CUFF.64599.0
  misc_feature: Variant of the nucleotide sequence at SEQ ID NO 27387
attaaagggcgtaggtacttcgtcaataacaaagaaaatatgaatgtgagagagtgttgtgcatttgttgaatgcttagtggatagtgagcgagtgagcagggaactagaaaataactataagttgcagagtgatgcacaagattctaatggacatgttcaccggaaatcaatcatctggagtcaagagcggttttgtattgagatctaagcaatgtcaacttgtttttcatcatacgagcttgtccgataaatgaagacattacaattgagagcaatgctctgaaacatcaatatacagcagcaacttgattacatctgtataagctatcacggtctcaaaatgtcggtaccagaagatcagaagcagaacttcga

SEQ ID NO: 27390 - DNA, 705 bp, Muscodor strobelii
  misc_feature: SGI cDNA ID NO. 569382
  misc_feature: Encodes the peptide sequence at SEQ ID NO 27391
atggcatccaagataattatcgctttcgacttatatgggacgttgctctctactgaatcaattgccgatgacttgtctatgatatatggcgatcgatccaaaagtatagcggcgctgtggcgtcggctgcagcttgaatatacttggcgcatcaacagcatgggcgagtacaagacgtttagcgaaatcactaggagtgccctgggccatgctgttgccgatcatggtttgacacttcaggcacaagatgcccacaacctgatgaggtcatacgacaccctgcacgcatttccagaaatatcagctgcgatcagcctcctgcacacgaacaaagatgcgatcgacgcgtatatcttcacaaatggaacaaaagagatggtcgaaaattctgttaaaacttctctgggatctaacgcagatatctttcaggccttaatcaccgttgatgatgtgcaatgcttcaaaccggacccgaaaacatatcgctatctgatggagcgcgtagggaaaaaggagcattcagaagatgtatggcttgtgagctgtaacccgttcgatgtgctgggcgcaaaatcggccgggctgaaagctgcattcatcgatagaaccgggaaagggtggattgaccgtctcgatgagatgcatccaccctcaatcgtggcagacaatgtggaggaagcgattcagtctattcttgactattaa

SEQ ID NO: 27391 - protein, 234 aa, Muscodor strobelii
  misc_feature: SGI Peptide ID NO. 569382
  misc_feature (4)..(203): Pfam Id: PF00702 Pfam Desc: haloacid dehalogenase-like hydrolase
  misc_feature (4)..(231): NCBI GI: 156039647 Blast Desc: SS1G_11960 [Sclerotinia sclerotiorum 1980] gi|154697697|gb|EDN97435.1| SS1G_11960 [Sclerotinia sclerotiorum 1980]
  misc_feature (5)..(234): NCBI GI: 261206220 Blast Desc: haloacid dehalogenase [Ajellomyces dermatitidis SLH14081] gi|239592906|gb|EEQ75487.1| haloacid dehalogenase [Ajellomyces dermatitidis SLH14081]
  misc_feature (1)..(231): NCBI GI: 240280817 Blast Desc: haloacid dehalogenase [Ajellomyces capsulatus H143]
  misc_feature (5)..(234): NCBI GI: 239610923 Blast Desc: haloacid dehalogenase [Ajellomyces dermatitidis ER-3]
  misc_feature (4)..(232): NCBI GI: 46137167 Blast Desc: FG10099.1 [Gibberella zeae PH-1]
  misc_feature (1)..(233): NCBI GI: 212528230 Blast Desc: haloacid dehalogenase, type II [Penicillium marneffei ATCC 18224] gi|210073670|gb|EEA27757.1| haloacid dehalogenase, type II [Penicillium marneffei ATCC 18224]
  misc_feature (4)..(231): NCBI GI: 154295144 Blast Desc: BC1G_13515 [Botryotinia fuckeliana B05.10] gi|150844198|gb|EDN19391.1| BC1G_13515 [Botryotinia fuckeliana B05.10]
  misc_feature (1)..(231): NCBI GI: 225560630 Blast Desc: haloacid dehalogenase [Ajellomyces capsulatus G186AR]
  misc_feature (1)..(222): NCBI GI: 70996877 Blast Desc: haloacid dehalogenase, type II [Aspergillus fumigatus Af293] gi|66850829|gb|EAL91155.1| haloacid dehalogenase, type II [Aspergillus fumigatus Af293] gi|159127076|gb|EDP52192.1| type II
  misc_feature (4)..(233): NCBI GI: 67523811 Blast Desc: AN2361.2 [Aspergillus nidulans FGSC A4] gi|40745316|gb|EAA64472.1| AN2361.2 [Aspergillus nidulans FGSC A4] gi|259487763|tpe|CBF86689.1| TPA: haloacid dehalogenase, type
  misc_feature (7)..(204): SWISSPROT Homolog: EC 3.8.1.3 Haloacetate dehalogenase
MASKIIIAFDLYGTLLSTESIADDLSMIYGDRSKSIAALWRRLQLEYTWRINSMGEYKTFSEITRSALGHAVADHGLTLQAQDAHNLMRSYDTLHAFPEISAAISLLHTNKDAIDAYIFTNGTKEMVENSVKTSLGSNADIFQALITVDDVQCFKPDPKTYRYLMERVGKKEHSEDVWLVSCNPFDVLGAKSAGLKAAFIDRTGKGWIDRLDEMHPPSIVADNVEEAIQSILDY

SEQ ID NO: 27392 - DNA, 2097 bp, Muscodor strobelii
  misc_feature: SGI EST ID NO. CUFF.64825.0
  misc_feature: Variant of the nucleotide sequence at SEQ ID NO 27390
agaagagatgcacaggggttgatcgtgatcgaattcgatgattccatagctggtcttggtatatgtaaagagctcttcgtcgaatttcaattgtaccttgcagtgatcatctcagatatctacctaaggcgattttttcgacaagttcccatcccaacatggcatccaagataattatcgctttcgacttatatgggacgttgctctctactgaatcaattgccgatgacttgtctatgatatatggcgatcgatccaaaagtatagcggcgctgtggcgtcggctgcagcttgaatatacttggcgcatcaacagcatgggcgagtacaagacgtttagcgaaatcactaggagtgccctgggccatgctgttgccgatcatggtttgacacttcaggcacaagatgcccacaacctgatgaggtcatacgacaccctgcacgcatttccagaaatatcagctgcgatcagcctcctgcacacgaacaaagatgcgatcgacgcgtatatcttcacaaatggaacaaaagagatggtcgaaaattctgttaaaacttctctgggatctaacgcagatatctttcaggccttaatcaccgttgatgatgtgcaatgcttcaaaccggacccgaaaacatatcgctatctgatggagcgcgtagggaaaaaggagcattcagaagatgtatggcttgtgagctgtaacccgttcgatgtgctgggcgcaaaatcggccgggctgaaagctgcattcatcgatagaaccgggaaagggtggattgaccgtctcgatgagatgcatccaccctcaatcgtggcagacaatgtggaggaagcgattcagtctattcttgactattaagtagtcaatgtattaataagtctataaacaaagtcgtaaccgtcgtgatctcatgccatgtaccattactgaagtctcttctcagacctgcagctcgttcgattatacaatcttgttaaagctctccatcaacttaattgtctcttcagcgaatagctcagcatcaccgggccatctggcgctgatatagttgtactgctcatcctccacgacaaacggaccaggattcaaggaaaccttgaactgcgcaggattacctaagaccttggtaacagattcctcgacgttctcgctcccatgaccgaaggttttgtagtagtcgcccagaaacgctcgagttccccaatatgcgctttgctcaaaccgcgtgggtaatgcggtcgtgagacagtctcgaatgacgctacgcccttccgcatctttggactcgctgagtaccatgacgccgtgacagacagcagctacggccttttgcttaggcaaacctctcttcgtcttggggaagtaatccaccaagagcttgtggacggtatcggattcgatgatctgtcgaacgctcttctcgtgaccgccgggcaggacgacgagatcgtagggatcgagagagaagttgggcgctgaccaggacagtggatggagatactcttcgtttcgttgcatgttcttgtacttggtaacggcatccttcttcgcgcctagtagtttctgggtgatgccttcgagcatcttcttgtcgcatcgaggcactttgccgctctcggtcgcaaagctaatggtatatccggcggctttgaatgcatcgtacggtacggcagtctctgtttatagcataatatggttagtatctccatgctgctacatgtgatgccgacgaagctaacctgttggatcgtggccgtaatcagccatcaaaaagatgacgttcggtgtcgcgatggacgttccgggtgtgatgatctgtggctcctccattgtgtgtttcagtttcggttactttggtattcttggtgatgttcgtgtccgcgtccttgggctttaacgagaatcgggagctctgtggagcttgtttctcgaaaaataatcgatggcgttggcagattatatagctggtggtttgcgaatgctcgcgattcaataacctgatataagaagatctacgcgtaactcatcactacctatgacgaagcctgttgccagtcaatgtgacaagatgcctatcacagcctaatctctg

SEQ ID NO: 27393 - DNA, 558 bp, Muscodor strobelii
  misc_feature: SGI cDNA ID NO. 569383
  misc_feature: Encodes the peptide sequence at SEQ ID NO 27394
atgcaacgaaacgaagagtatctccatccactgtcctggtcagcgcccaacttctctctcgatccctacgatctcgtcgtcctgcccggcggtcacgagaagagcgttcgacagatcatcgaatccgataccgtccacaagctcttggtggattacttccccaagacgaagagaggtttgcctaagcaaaaggccgtagctgctgtctgtcacggcgtcatggtactcagcgagtccaaagatgcggaagggcgtagcgtcattcgagactgtctcacgaccgcattacccacgcggtttgagcaaagcgcatattggggaactcgagcgtttctgggcgactactacaaaaccttcggtcatgggagcgagaacgtcgaggaatctgttaccaaggtcttaggtaatcctgcgcagttcaaggtttccttgaatcctggtccgtttgtcgtggaggatgagcagtacaactatatcagcgccagatggcccggtgatgctgagctattcgctgaagagacaattaagttgatggagagctttaacaagattgtataa

SEQ ID NO: 27394 - protein, 185 aa, Muscodor strobelii
  misc_feature: SGI Peptide ID NO. 569383
  misc_feature (1)..(179): NCBI GI: 154293869 Blast Desc: BC1G_14006 [Botryotinia fuckeliana B05.10] gi|150845161|gb|EDN20354.1| BC1G_14006 [Botryotinia fuckeliana B05.10]
  misc_feature (10)..(179): NCBI GI: 212533277 Blast Desc: conserved [Penicillium marneffei ATCC 18224] gi|210072159|gb|EEA26248.1| conserved [Penicillium marneffei ATCC 18224]
  misc_feature (1)..(137): NCBI GI: 156039717 Blast Desc: SS1G_11995 [Sclerotinia sclerotiorum 1980] gi|154697732|gb|EDN97470.1| SS1G_11995 [Sclerotinia sclerotiorum 1980]
  misc_feature (1)..(179): NCBI GI: 42522498 Blast Desc: ThiJ/PfpI family protein [Bdellovibrio bacteriovorus HD100] gi|39575030|emb|CAE78871.1| ThiJ/PfpI family protein [Bdellovibrio bacteriovorus HD100]
  misc_feature (1)..(179): NCBI GI: 70730297 Blast Desc: ThiJ/PfpI family protein, [Pseudomonas fluorescens Pf-5] gi|68344596|gb|AAY92202.1| ThiJ/PfpI family protein, [Pseudomonas fluorescens Pf-5]
  misc_feature (1)..(180): NCBI GI: 77458390 Blast Desc: ThiJ/PfpI [Pseudomonas fluorescens Pf0-1] gi|77382393|gb|ABA73906.1| ThiJ/PfpI family protein [Pseudomonas fluorescens Pf0-1]
  misc_feature (1)..(180): NCBI GI: 183983036 Blast Desc: MMAR_3035 [Mycobacterium marinum M] gi|183176362|gb|ACC41472.1| conserved membrane protein [Mycobacterium marinum M]
  misc_feature (1)..(172): NCBI GI: 118617795 Blast Desc: MUL_2275 [Mycobacterium ulcerans Agy99] gi|118569905|gb|ABL04656.1| conserved membrane protein [Mycobacterium ulcerans Agy99]
  misc_feature (1)..(182): NCBI GI: 45659260 Blast Desc: LIC13443 [Leptospira interrogans serovar Copenhageni str. Fiocruz L1-130] gi|45602506|gb|AAS71983.1| conserved [Leptospira interrogans serovar Copenhageni str. Fiocruz L1-130]
  misc_feature (1)..(182): NCBI GI: 24216999 Blast Desc: ThiJ/PfpI family protein [Leptospira interrogans serovar Lai str. 56601] gi|24198402|gb|AAN51498.1|AE011583_8 ThiJ/PfpI family protein [Leptospira interrogans serovar Lai str.
MQRNEEYLHPLSWSAPNFSLDPYDLVVLPGGHEKSVRQIIESDTVHKLLVDYFPKTKRGLPKQKAVAAVCHGVMVLSESKDAEGRSVIRDCLTTALPTRFEQSAYWGTRAFLGDYYKTFGHGSENVEESVTKVLGNPAQFKVSLNPGPFVVEDEQYNYISARWPGDAELFAEETIKLMESFNKIV

SEQ ID NO: 27395 - DNA, 2150 bp, Muscodor strobelii
  misc_feature: SGI EST ID NO. CUFF.64826.1
  misc_feature: Variant of the nucleotide sequence at SEQ ID NO 27393
cagagattaggctgtgataggcatcttgtcacattgactggcaacaggcttcgtcataggtagtgatgagttacgcgtagatcttcttatatcaggttattgaatcgcgagcattcgcaaaccaccagctatataatctgccaacgccatcgattatttttcgagaaacaagctccacagagctcccgattctcgttaaagcccaaggacgcggacacgaacatcaccaagaataccaaagtaaccgaaactgaaacacacaatggaggagccacagatcatcacacccggaacgtccatcgcgacaccgaacgtcatctttttgatggctgattacggccacgatccaacagagactgccgtaccgtacgatgcattcaaagccgccggatataccattagctttgcgaccgagagcggcaaagtgcctcgatgcgacaagaagatgctcgaaggcatcacccagaaactactaggcgcgaagaaggatgccgttaccaagtacaagaacatgcaacgaaacgaagagtatctccatccactgtcctggtcagcgcccaacttctctctcgatccctacgatctcgtcgtcctgcccggcggtcacgagaagagcgttcgacagatcatcgaatccgataccgtccacaagctcttggtggattacttccccaagacgaagagaggtttgcctaagcaaaaggccgtagctgctgtctgtcacggcgtcatggtactcagcgagtccaaagatgcggaagggcgtagcgtcattcgagactgtctcacgaccgcattacccacgcggtttgagcaaagcgcatattggggaactcgagcgtttctgggcgactactacaaaaccttcggtcatgggagcgagaacgtcgaggaatctgttaccaaggtcttaggtaatcctgcgcagttcaaggtttccttgaatcctggtccgtttgtcgtggaggatgagcagtacaactatatcagcgccagatggcccggtgatgctgagctattcgctgaagagacaattaagttgatggagagctttaacaagattgtataatcgaacgagctgcaggtctgagaagagacttcagtaatggtacatggcatgagatcacgacggttacgactttgtttatagacttattaatacattgactacttaatagtcaagaatagactgaatcgcttcctccacattgtctgccacgattgagggtggatgcatctcatcgagacggtcaatccaccctttcccggttctatcgatgaatgcagctttcagcccggccgattttgcgcccagcacatcgaacgggttacagctcacaagccatacatcttctgaatgctcctttttccctacgcgctccatcagatagcgatatgttttcgggtccggtttgaagcattgcacatcatcaacggtgattaaggcctgaaagatatctgcgttagatcccagagaagttttaacagaattttcgaccatctcttttgttccatttgtgaagatatacgcgtcgatcgcatctttgttcgtgtgcaggaggctgatcgcagctgatatttctggaaatgcgtgcagggtgtcgtatgacctcatcaggttgtgggcatcttgtgcctgaagtgtcaaaccatgatcggcaacagcatggcccagggcactcctagtgatttcgctaaacgtcttgtactcgcctttacacatcatcagcaacacattatacatgcaaagcaatgcatggaatttgtagactcgaacctgagtatatctttaccagtcttaaaggagaaaacagaaggactttactcacccatgctgttgatgcgccaagtatattcaagctgcagccgacgccacagcgccgctatacttttggatcgatcgccatatatcatagacaagtcatcggcaattgattcagtagagagcaacgtcccatataagtcgaaagcgataattatcttggatgccatgttgggatgggaacttgtcgaaaaaatcgccttaggtagatatctgagatgatcactgcaaggtacaattgaaattcgacgaagagctctttacatataccaagaccagctatggaatcatcgaattcgatcacgatcaacccctgtgcatctcttct

SEQ ID NO: 27396 - DNA, 807 bp, Muscodor strobelii
  misc_feature: SGI cDNA ID NO. 569384
  misc_feature: Encodes the peptide sequence at SEQ ID NO 27397
atggaggagccacagatcatcacacccggaacgtccatcgcgacaccgaacgtcatctttttgatggctgattacggccacgatccaacagagactgccgtaccgtacgatgcattcaaagccgccggatataccattagctttgcgaccgagagcggcaaagtgcctcgatgcgacaagaagatgctcgaaggcatcacccagaaactactaggcgcgaagaaggatgccgttaccaagtacaagaacatgcaacgaaacgaagagtatctccatccactgtcctggtcagcgcccaacttctctctcgatccctacgatctcgtcgtcctgcccggcggtcacgagaagagcgttcgacagatcatcgaatccgataccgtccacaagctcttggtggattacttccccaagacgaagagaggtttgcctaagcaaaaggccgtagctgctgtctgtcacggcgtcatggtactcagcgagtccaaagatgcggaagggcgtagcgtcattcgagactgtctcacgaccgcattacccacgcggtttgagcaaagcgcatattggggaactcgagcgtttctgggcgactactacaaaaccttcggtcatgggagcgagaacgtcgaggaatctgttaccaaggtcttaggtaatcctgcgcagttcaaggtttccttgaatcctggtccgtttgtcgtggaggatgagcagtacaactatatcagcgccagatggcccggtgatgctgagctattcgctgaagagacaattaagttgatggagagctttaacaagattgtataa

SEQ ID NO: 27397 - protein, 268 aa, Muscodor strobelii
  misc_feature: SGI Peptide ID NO. 569384
  misc_feature (18)..(262): NCBI GI: 154293869 Blast Desc: BC1G_14006 [Botryotinia fuckeliana B05.10] gi|150845161|gb|EDN20354.1| BC1G_14006 [Botryotinia fuckeliana B05.10]
  misc_feature (13)..(262): NCBI GI: 212533277 Blast Desc: conserved [Penicillium marneffei ATCC 18224] gi|210072159|gb|EEA26248.1| conserved [Penicillium marneffei ATCC 18224]
  misc_feature (13)..(220): NCBI GI: 156039717 Blast Desc: SS1G_11995 [Sclerotinia sclerotiorum 1980] gi|154697732|gb|EDN97470.1| SS1G_11995 [Sclerotinia sclerotiorum 1980]
  misc_feature (28)..(262): NCBI GI: 42522498 Blast Desc: ThiJ/PfpI family protein [Bdellovibrio bacteriovorus HD100] gi|39575030|emb|CAE78871.1| ThiJ/PfpI family protein [Bdellovibrio bacteriovorus HD100]
  misc_feature (18)..(263): NCBI GI: 77458390 Blast Desc: ThiJ/PfpI [Pseudomonas fluorescens Pf0-1] gi|77382393|gb|ABA73906.1| ThiJ/PfpI family protein [Pseudomonas fluorescens Pf0-1]
  misc_feature (18)..(262): NCBI GI: 70730297 Blast Desc: ThiJ/PfpI family protein, [Pseudomonas fluorescens Pf-5] gi|68344596|gb|AAY92202.1| ThiJ/PfpI family protein, [Pseudomonas fluorescens Pf-5]
  misc_feature (13)..(265): NCBI GI: 45659260 Blast Desc: LIC13443 [Leptospira interrogans serovar Copenhageni str. Fiocruz L1-130] gi|45602506|gb|AAS71983.1| conserved [Leptospira interrogans serovar Copenhageni str. Fiocruz L1-130]
  misc_feature (13)..(265): NCBI GI: 24216999 Blast Desc: ThiJ/PfpI family protein [Leptospira interrogans serovar Lai str. 56601] gi|24198402|gb|AAN51498.1|AE011583_8 ThiJ/PfpI family protein [Leptospira interrogans serovar Lai str.
  misc_feature (17)..(263): NCBI GI: 183983036 Blast Desc: MMAR_3035 [Mycobacterium marinum M] gi|183176362|gb|ACC41472.1| conserved membrane protein [Mycobacterium marinum M]
  misc_feature (17)..(255): NCBI GI: 118617795 Blast Desc: MUL_2275 [Mycobacterium ulcerans Agy99] gi|118569905|gb|ABL04656.1| conserved membrane protein [Mycobacterium ulcerans Agy99]
MEEPQIITPGTSIATPNVIFLMADYGHDPTETAVPYDAFKAAGYTISFATESGKVPRCDKKMLEGITQKLLGAKKDAVTKYKNMQRNEEYLHPLSWSAPNFSLDPYDLVVLPGGHEKSVRQIIESDTVHKLLVDYFPKTKRGLPKQKAVAAVCHGVMVLSESKDAEGRSVIRDCLTTALPTRFEQSAYWGTRAFLGDYYKTFGHGSENVEESVTKVLGNPAQFKVSLNPGPFVVEDEQYNYISARWPGDAELFAEETIKLMESFNKIV

SEQ ID NO: 27398 - DNA, 2150 bp, Muscodor strobelii; identical to SEQ ID NO: 27395
  misc_feature: SGI EST ID NO. CUFF.64826.1
  misc_feature: Variant of the nucleotide sequence at SEQ ID NO 27396

SEQ ID NO: 27399 - DNA, 1563 bp, Muscodor strobelii
  misc_feature: SGI cDNA ID NO. 569385
  misc_feature: Elevated expression when VOC is produced
  misc_feature: Encodes the peptide sequence at SEQ ID NO 27400
atgagcggcgcccaaatgagaccaaagactgctaacaagagtagcgatcacatcgagtttttcggttcacaagttggcggcaagtctgtcatcaattatagctatacagatcccccgtggaaacttgtgttgtgggacacgagatatttcttttactttatttgggccttaccatacatcttatggcccgtgagaccatgtatcggcggtcactttgatgagttgtcatttacgcgtggcaatgtcttctgtattgtaattcatgctattctcgtcgttctccagctagcatttatcatcgctctacctattgcatttgtccttcctgtatacctgtttggcgctgggctgggagtgttcttcttgattaattggctactgtgtcgctgcttgaatggaagcgacatcatctacgagtcagatccacaatatgccccagctctagaggatcaccaacatgagcattggattttcatgaacggcgtggctgtcggcgaggcatggctgaaaagcaatatcaaccgactggctttaacattcaagaggcccgtcactggtgttcacaaccggacaaccggcatcatatttgatgtgatcgaatgtcttatcgagcgcaattttggatatgccacgactgaagtgcgcgcggcttataagatcattaaggagaagctttataatcctcagtacgataaagtcgtcctgattttgcactctcagggtggaattgaaggtggccttgtatgcgattggcttctgcaagagctgccccaagacttgctggctaagcttgaggtttacacttttggttcggcggcgaaccactttaacaatcctcatcggcacgttggttctcaagacgaggagaaaagacacccagaaacaaggaatgcagtgcagaagactgtcactgaagtcccactaaccgattcgcccgttgagatgagggcgccatcactaaagagccaagcatcgaagaagtccaatgcatcgtcagggactgacagacaattcacggtatcagcatgtgatcgcgcacttgggcacgtcgagcactatgctcacaccacggacttcgttgcgctgtggggtctattgcacttcgtgaccaatgtgcgggcctcgaaagaaatgccgcgtttcatcggtcgcgtattcagtcgaacatcttcgcaaggtggccatcagttctgtcagcattatctcaacggtatgtttccgttagcaaagggccctgagggcgagttcacaggctgcgccgaccgcaatgactttatggacagcatcgtcgaacttggccaagagggtacagaggctgaggatgctcgggaaggatttgagaacagctgggccatgctaaatgacgaaggacaggctgcaggaccttctgacgtcgctgtccatggaagctttcatggtgaagaaagccagtttacggagggtagggtgagagtcaaacagctcagtcgactctggctgtatcgcaatggtagaagccctcccgagattccaaagggcttggcgagaggcatggatggagttgtcagaggtaccactatgtaa

SEQ ID NO: 27400 - protein, 520 aa, Muscodor strobelii
  misc_feature: SGI Peptide ID NO. 569385
  misc_feature (19)..(520): NCBI GI: 256732594 Blast Desc: NECHADRAFT_92636 [Nectria haematococca mpVI 77-13-4]
  misc_feature (19)..(520): NCBI GI: 46125225 Blast Desc: FG06990.1 [Gibberella zeae PH-1]
  misc_feature (13)..(520): NCBI GI: 145610889 Blast Desc: MGG_00837 [Magnaporthe grisea 70-15] gi|145018223|gb|EDK02502.1| MGG_00837 [Magnaporthe grisea 70-15]
  misc_feature (9)..(504): NCBI GI: 85094924 Blast Desc: NCU06117 [Neurospora crassa OR74A] gi|28921437|gb|EAA30743.1| conserved [Neurospora crassa OR74A]
  misc_feature (3)..(500): NCBI GI: 171679467 Blast Desc: protein product [Podospora anserina] gi|170939359|emb|CAP64587.1| protein product [Podospora anserina]
  misc_feature (18)..(502): NCBI GI: 119494347 Blast Desc: NFIA_008490 [Neosartorya fischeri NRRL 181] gi|119412231|gb|EAW22172.1| conserved [Neosartorya fischeri NRRL 181]
  misc_feature (18)..(502): NCBI GI: 121700637 Blast Desc: conserved [Aspergillus clavatus NRRL 1] gi|119396726|gb|EAW07157.1| conserved [Aspergillus clavatus NRRL 1]
  misc_feature (18)..(502): NCBI GI: 156039733 Blast Desc: SS1G_12003 [Sclerotinia sclerotiorum 1980] gi|154697740|gb|EDN97478.1| SS1G_12003 [Sclerotinia sclerotiorum 1980]
  misc_feature (20)..(500): NCBI GI: 115397389 Blast Desc: conserved [Aspergillus terreus NIH2624] gi|114192477|gb|EAU34177.1| conserved [Aspergillus terreus NIH2624]
  misc_feature (35)..(500): NCBI GI: 169767020 Blast Desc: [Aspergillus oryzae RIB40] gi|83765836|dbj|BAE55979.1| protein product [Aspergillus oryzae]
  misc_feature: Useful for introducing or modulating the production of volatile compounds
MSGAQMRPKTANKSSDHIEFFGSQVGGKSVINYSYTDPPWKLVLWDTRYFFYFIWALPYILWPVRPCIGGHFDELSFTRGNVFCIVIHAILVVLQLAFIIALPIAFVLPVYLFGAGLGVFFLINWLLCRCLNGSDIIYESDPQYAPALEDHQHEHWIFMNGVAVGEAWLKSNINRLALTFKRPVTGVHNRTTGIIFDVIECLIERNFGYATTEVRAAYKIIKEKLYNPQYDKVVLILHSQGGIEGGLVCDWLLQELPQDLLAKLEVYTFGSAANHFNNPHRHVGSQDEEKRHPETRNAVQKTVTEVPLTDSPVEMRAPSLKSQASKKSNASSGTDRQFTVSACDRALGHVEHYAHTTDFVALWGLLHFVTNVRASKEMPRFIGRVFSRTSSQGGHQFCQHYLNGMFPLAKGPEGEFTGCADRNDFMDSIVELGQEGTEAEDAREGFENSWAMLNDEGQAAGPSDVAVHGSFHGEESQFTEGRVRVKQLSRLWLYRNGRSPPEIPKGLARGMDGVVRGTTM

SEQ ID NO: 27401 - DNA, 1545 bp, Muscodor strobelii
  misc_feature: SGI cDNA ID NO. 569386
  misc_feature: Elevated expression when VOC is produced
  misc_feature: Encodes the peptide sequence at SEQ ID NO 27402
atggctcatgagaatgacgcaaatctggccgttgggccgtcgtctcccgaccatactatggagcatcacgcagtctcaatggacgatgatcgcgctcgccgggtcgtgcgccgtatcgaccgccgcatcatgccgttgcttttcctgatatacatgttcaattttatggacaagacgatcctatctagtgcctctgtattcggacttcgagaagataatcatctagttaatgatcaatattcctgggtttcgagcgttttctacttcggcttcttgctagcatcgtatcctacgactttgcttattgcgcgtttgccaatcggcaagtatcttgctggtaataccttgctctggggtattgtcgtagctttgacagcggtatgttctagttttggtgggctggtcacggtgcgcttctttttggggattttcgaagcgactgtctcgccgtcgttggtcttcatcacttcgacatggtggacaagagatgagatacccgtcaggacagggatatggttcgcggggaactctgtgggcgggattgtatcgtcgctgcttgcgtacggtattggtcatattcaggacaacgttggcccgtggagatggatgttcatcattttgggcatactcactttcttactcggtgttgctgtgcttctattcttacccgattcaattacaactgcaaagttcttatcgcccgaagatagacaatgggccgcagaccgtgtcgtcatcgcaggaacgggacgcacagagaagactgcttggaaatgggctcagatgcgtgagtgcttgcttgatcccaagacatggttgatctggagcattgcgctgttgtgccaaatccccaatggtggaacacagaactacgcaaacctagtcataaagtcttttgggttcacgtcgctccaatcgacattgatcaacattccatactcgatcatcagtattatctcgatttccggtacaggttgggttgcaggacgcttcagatcaatgaactgtctattgatcgcgatcatcgtcttgccgcccattactgggtcagcactcatctcaagacgagatgatattccgcagagcgtgtccctcttgggatacttcctactgtcaacagggccatctgccttaccacttctattatcgcttgtgcaatccaactatcgtggcactacaaagaaaatgacatgtactgcattattgtttcttgcctactgtgtaggcaatattgttgggccgcagctttttatctcagacgaagcaccgacatacgatacggctttccgtgctattcttgtgtgttactcgctggtcattggatttgccttaggcttgaggctctacttacagtacgaaaataggcgaaggcagcgagtagaggggtttgaaggcaatgcgggaacatcgggagcagtgggcggtggcaaggttattgatatgaatggagaggagcgaaatgctgtgaatggactccaattaaggccagaggactatgaagatgtcactgattggaaagcgtttggctttcggtatagattgtag

SEQ ID NO: 27402 - protein, 514 aa, Muscodor strobelii
  misc_feature: SGI Peptide ID NO. 569386
  misc_feature (47)..(414): Pfam Id: PF07690 Pfam Desc: Major Facilitator Superfamily
  misc_feature (28)..(513): NCBI GI: 255936915 Blast Desc: Pc13g10640 [Penicillium chrysogenum Wisconsin 54-1255] gi|211584104|emb|CAP92133.1| Pc13g10640 [Penicillium chrysogenum Wisconsin 54-1255]
  misc_feature (24)..(514): NCBI GI: 256721737 Blast Desc: NECHADRAFT_55419 [Nectria haematococca mpVI 77-13-4]
  misc_feature (13)..(514): NCBI GI: 39940694 Blast Desc: MGG_04893 [Magnaporthe grisea 70-15] gi|145010875|gb|EDJ95531.1| MGG_04893 [Magnaporthe grisea 70-15]
  misc_feature (23)..(514): NCBI GI: 238496969 Blast Desc: allantoate permease, [Aspergillus flavus NRRL3357] gi|220694600|gb|EED50944.1| allantoate permease, [Aspergillus flavus NRRL3357]
  misc_feature (26)..(514): NCBI GI: 169774481 Blast Desc: [Aspergillus oryzae RIB40] gi|83769571|dbj|BAE59706.1| protein product [Aspergillus oryzae]
  misc_feature (22)..(514): NCBI GI: 145251732 Blast Desc: An16g00650 [Aspergillus niger] gi|134082916|emb|CAK46752.1| protein product [Aspergillus niger]
  misc_feature (17)..(514): NCBI GI: 242773550 Blast Desc: pantothenate transporter, [Talaromyces stipitatus ATCC 10500] gi|218721882|gb|EED21300.1| pantothenate transporter, [Talaromyces stipitatus ATCC 10500]
  misc_feature (11)..(514): NCBI GI: 212531619 Blast Desc: allantoate permease, [Penicillium marneffei ATCC 18224] gi|210071330|gb|EEA25419.1| allantoate permease, [Penicillium marneffei ATCC 18224]
  misc_feature (16)..(514): NCBI GI: 256728767 Blast Desc: NECHADRAFT_51034 [Nectria haematococca mpVI 77-13-4]
  misc_feature (14)..(507): NCBI GI: 46110397 Blast Desc: FG02080.1 [Gibberella zeae PH-1]
  misc_feature: Useful for introducing or modulating the production of volatile compounds
MAHENDANLAVGPSSPDHTMEHHAVSMDDDRARRVVRRIDRRIMPLLFLIYMFNFMDKTILSSASVFGLREDNHLVNDQYSWVSSVFYFGFLLASYPTTLLIARLPIGKYLAGNTLLWGIVVALTAVCSSFGGLVTVRFFLGIFEATVSPSLVFITSTWWTRDEIPVRTGIWFAGNSVGGIVSSLLAYGIGHIQDNVGPWRWMFIILGILTFLLGVAVLLFLPDSITTAKFLSPEDRQWAADRVVIAGTGRTEKTAWKWAQMRECLLDPKTWLIWSIALLCQIPNGGTQNYANLVIKSFGFTSLQSTLINIPYSIISIISISGTGWVAGRFRSMNCLLIAIIVLPPITGSALISRRDDIPQSVSLLGYFLLSTGPSALPLLLSLVQSNYRGTTKKMTCTALLFLAYCVGNIVGPQLFISDEAPTYDTAFRAILVCYSLVIGFALGLRLYLQYENRRRQRVEGFEGNAGTSGAVGGGKVIDMNGEERNAVNGLQLRPEDYEDVTDWKAFGFRYRL

SEQ ID NO: 27403 - DNA, 1362 bp, Muscodor strobelii
  misc_feature: SGI EST ID NO. CUFF.64612.0
  misc_feature: Variant of the nucleotide sequence at SEQ ID NO 27401
gttgacgaccatgaagaatcatgttgcgatacagatcatttctcccactgttcgacaccggtcggcatcagtgagcagccaaacgcctctcatcatggctcatgagaatgacgcaaatctggccgttgggccgtcgtctcccgaccatactatggagcatcacgcagtctcaatggacgatgatcgcgctcgccgggtcgtgcgccgtatcgaccgccgcatcatgccgttgcttttcctgatatacatgttcaattttatggacaagacgatcctatctagtgcctctgtattcggacttcgagaagataatcatctagttaatgatcaatattcctgggtttcgagcgttttctacttcggcttcttgctagcatcgtatcctacgactttgcttattgcgcgtttgccaatcggcaagtatcttgctggtaataccttgctctggggtattgtcgtagctttgacagcggtatgttctagttttggtgggctggtcacggtgcgcttctttttggggattttcgaagcgactgtctcgccgtcgttggtcttcatcacttcgacatggtggacaagagatgagatacccgtcaggacagggatatggttcgcggggaactctgtgggcgggattgtatcgtcgctgcttgcgtacggtattggtcatattcaggacaacgttggcccgtggagatggatgttcatcattttgggcatactcactttcttactcggtgttgctgtgcttctattcttacccgattcaattacaactgcaaagttcttatcgcccgaagatagacaatgggccgcagaccgtgtcgtcatcgcaggaacgggacgcacagagaagactgcttggaaatgggctcagatgcgtgagtgcttgcttgatcccaagacatggttgatctggagcattgcgctgttgtgccaaatccccaatggtggaacacagaactacgcaaacctagtcataaagtcttttgggttcacgtcgctccaatcgacattgatcaacattccatactcgatcatcagtattatctcgatttccggtacaggttgggttgcaggacgcttcagatcaatgaactgtctattgatcgcgatcatcgtcttgccgcccattactgggtcagcactcatctcaagacgagatgatattccgcagagcgtgtccctcttgggatacttcctactgtcaacagggccatctgccttaccacttctattatcgcttgtgcaatccaactatcgtggcactacaaagaaaatgacatgtactgcattattgtttcttgcctactgtgtaggcaatattgttgggccgcagctttttatctcagacgaagcacc

SEQ ID NO: 27404 - DNA, 645 bp, Muscodor strobelii
  misc_feature: SGI cDNA ID NO. 569387
  misc_feature: Encodes the peptide sequence at SEQ ID NO 27405
atgcgttggaacctgggggctacgtacctagcggtgctactaagctccgtatctggaggacttgctgcggactcgtctgtcattcacgattccgagacaggtttcacctttacagaatatgccgctgcatatgcgatagggtcaagcgtcacgtttcgcatagcaatccccagcccagctacaggagcctacgacctcgtcttgcagattgtagcgccaatggccgtgggttggacaggaatagcatggggagggcaaatgatctactgtccactcacgattggatggctctctgggaataccggagtggcgtctgtccgtcgtgccacctcgcatacgacgccgtcgctatatactggagccacactccaagttctaagaactggaactcatacgaatgggacacactggcaaataactgccaaatgcagcggatgctcatcgttcgtcggcagcggaacatctaacaaaactctgaatgcaaatggatctaaccgtctcgcctttgcatactctaagacaaagcccagcagtgcgtcaagcgcagcgacgatcaacgtccacgatgtgtacaattactgggatcatgatttttcaggcgccggaaacacgaatttcgctcagcttgtgcagcagaacacgtaa

SEQ ID NO: 27405 - protein, 214 aa, Muscodor strobelii
  misc_feature: SGI Peptide ID NO. 569387
  misc_feature (1)..(212): NCBI GI: 85118770 Blast Desc: NCU01873 [Neurospora crassa OR74A] gi|28927314|gb|EAA36268.1| [Neurospora crassa OR74A]
  misc_feature (1)..(212): NCBI GI: 38636436 Blast Desc: related to cellobiose dehydrogenase [Neurospora crassa]
  misc_feature (1)..(213): NCBI GI: 169595930 Blast Desc: SNOG_00712 [Phaeosphaeria nodorum SN15] gi|111071087|gb|EAT92207.1| SNOG_00712 [Phaeosphaeria nodorum SN15]
  misc_feature (27)..(214): NCBI GI: 116193917 Blast Desc: CHGG_06676 [Chaetomium globosum CBS 148.51] gi|88182589|gb|EAQ90057.1| CHGG_06676 [Chaetomium globosum CBS 148.51]
  misc_feature (21)..(210): NCBI GI: 85098013 Blast Desc: NCU05595 [Neurospora crassa OR74A] gi|28922050|gb|EAA31321.1| [Neurospora crassa OR74A]
  misc_feature (1)..(212): NCBI GI: 171683013 Blast Desc: protein product [Podospora anserina] gi|170941466|emb|CAP67117.1| protein product [Podospora anserina]
  misc_feature (9)..(210): NCBI GI: 116201697 Blast Desc: CHGG_08733 [Chaetomium globosum CBS 148.51] gi|88177251|gb|EAQ84719.1| CHGG_08733 [Chaetomium globosum CBS 148.51]
  misc_feature (1)..(213): NCBI GI: 39975559 Blast Desc: MGG_00074 [Magnaporthe grisea 70-15] gi|145019091|gb|EDK03370.1| MGG_00074 [Magnaporthe grisea 70-15]
  misc_feature (8)..(212): NCBI GI: 171678064 Blast Desc: protein product [Podospora anserina] gi|170937101|emb|CAP61759.1| protein product [Podospora anserina]
  misc_feature (23)..(213): NCBI GI: 189203559 Blast Desc: conserved [Pyrenophora tritici-repentis Pt-1C-BFP] gi|187985214|gb|EDU50702.1| conserved [Pyrenophora tritici-repentis Pt-1C-BFP]
  misc_feature (30)..(206): SWISSPROT Homolog: EC 1.1.99.18 Cellobiose dehydrogenase (acceptor)
MRWNLGATYLAVLLSSVSGGLAADSSVIHDSETGFTFTEYAAAYAIGSSVTFRIAIPSPATGAYDLVLQIVAPMAVGWTGIAWGGQMIYCPLTIGWLSGNTGVASVRRATSHTTPSLYTGATLQVLRTGTHTNGTHWQITAKCSGCSSFVGSGTSNKTLNANGSNRLAFAYSKTKPSSASSAATINVHDVYNYWDHDFSGAGNTNFAQLVQQNT

SEQ ID NO: 27406 - DNA, 1047 bp, Muscodor strobelii
  misc_feature: SGI cDNA ID NO. 569388
  misc_feature: Encodes the peptide sequence at SEQ ID NO 27407
atgcagttgacatctcttgctgccactgtgctgctggcccagaatgccgcagcacagtttaatatgctgcgcttcgcatgctcgcagctggttgtcgaccgtatcgaccccttagtcaacccgggaatgcagtactcgccacatcttcatcagcttgttggcggaaactcgttgaatatgacgatggaccccaccactcacgacctggcgagctccacttgtacctcttgtacattcgcacaggataagtccaactactggactgctgtcatgttcttcaaggcaaagaatggcacatacaagcgtgtaccgcaagttggcaatggtggtccacagggcgacttggttaacaacggcggactggacgtttattacatcccaagcggcaaggtcactgctttcaagaagggtttccgtatgctggctggaaatgctgccaattccgacccaaacaaagtgcaaaaggcgaacatctgccatcgttgctggaattcaccaaacgagaacagcttcgtcggcggcgctccttgcactggctcagataccgttgatattcccaagtccagcacttgcaagatgattcgacagaccatcatcttccccacatgctgggatggcaagaaccttgatagcccagaccaccagagtcacgttgcctacagctcgggatccggtgcgactggaggcggtgcttgcccttcaactcaccctgtcaagcttcctcagattatgtacgagctcatgtggaacgtgacctcattcacgaactcgcccgacttccctaccgatggatccaacccatacatctacagcatgaacttgggtggagctgctgctcacggtgactacgtcttcggctgggagggcgatactctgcagaaggccatggacaacagctgcaacctgaacaccgactgccccaaggctggcattacggcccagaagcccgctcaatacaacgcctgcaccatcaagcagcaatctccagagactgttgacggctggattgcggctctccccatcggctcgccggcgattaaggcatag

SEQ ID NO: 27407 - protein, 348 aa, Muscodor strobelii
  misc_feature: SGI Peptide ID NO. 569388
  misc_feature (36)..(287): Pfam Id: PF09362 Pfam Desc: Domain of function (DUF1996)
  misc_feature (4)..(348): NCBI GI: 164424791 Blast Desc: NCU05358 [Neurospora crassa OR74A] gi|157070663|gb|EAA34113.2| conserved [Neurospora crassa OR74A]
  misc_feature (4)..(348): NCBI GI: 7800931 Blast Desc: conserved [Neurospora crassa]
  misc_feature (6)..(348): NCBI GI: 189202574 Blast Desc: conserved [Pyrenophora tritici-repentis Pt-1C-BFP] gi|187984722|gb|EDU50210.1| conserved [Pyrenophora tritici-repentis Pt-1C-BFP]
  misc_feature (21)..(348): NCBI GI: 169595928 Blast Desc: SNOG_00711 [Phaeosphaeria nodorum SN15] gi|111071086|gb|EAT92206.1| SNOG_00711 [Phaeosphaeria nodorum SN15]
  misc_feature (19)..(348): NCBI GI: 116200307 Blast Desc: CHGG_08309 [Chaetomium globosum CBS 148.51] gi|88179588|gb|EAQ87056.1| CHGG_08309 [Chaetomium globosum CBS 148.51]
  misc_feature (4)..(334): NCBI GI: 171683818 Blast Desc: protein product [Podospora anserina] gi|170941869|emb|CAP67522.1| protein product [Podospora anserina]
  misc_feature (19)..(334): NCBI GI: 145615061 Blast Desc: MGG_05354 [Magnaporthe grisea 70-15] gi|145021983|gb|EDK06003.1| MGG_05354 [Magnaporthe grisea 70-15]
  misc_feature (22)..(340): NCBI GI: 116203171 Blast Desc: CHGG_09470 [Chaetomium globosum CBS 148.51] gi|88177988|gb|EAQ85456.1| CHGG_09470 [Chaetomium globosum CBS 148.51]
  misc_feature (1)..(340): NCBI GI: 39941238 Blast Desc: MGG_05530 [Magnaporthe grisea 70-15] gi|145022203|gb|EDK06223.1| MGG_05530 [Magnaporthe grisea 70-15]
  misc_feature (1)..(344): NCBI GI: 169619878 Blast Desc: SNOG_13137 [Phaeosphaeria nodorum SN15] gi|111058344|gb|EAT79464.1| SNOG_13137 [Phaeosphaeria nodorum SN15]
MQLTSLAATVLLAQNAAAQFNMLRFACSQLVVDRIDPLVNPGMQYSPHLHQLVGGNSLNMTMDPTTHDLASSTCTSCTFAQDKSNYWTAVMFFKAKNGTYKRVPQVGNGGPQGDLVNNGGLDVYYIPSGKVTAFKKGFRMLAGNAANSDPNKVQKANICHRCWNSPNENSFVGGAPCTGSDTVDIPKSSTCKMIRQTIIFPTCWDGKNLDSPDHQSHVAYSSGSGATGGGACPSTHPVKLPQIMYELMWNVTSFTNSPDFPTDGSNPYIYSMNLGGAAAHGDYVFGWEGDTLQKAMDNSCNLNTDCPKAGITAQKPAQYNACTIKQQSPETVDGWIAALPIGSPAIKA

SEQ ID NO: 27408 - DNA, 756 bp, Muscodor strobelii
  misc_feature: SGI EST ID NO. CUFF.64619.0
  misc_feature: Variant of the nucleotide sequence at SEQ ID NO 27406
caagatgattcgacagaccatcatcttccccacatgctgggatggcaagaaccttgatagcccagaccaccagagtcacgttgcctacagctcgggatccggtgcgactggaggcggtgcttgcccttcaactcaccctgtcaagcttcctcagattatgtacgagctcatgtggaacgtgacctcattcacgaactcgcccgacttccctaccgatggatccaacccatacatctacagcatgaacttggggtgagacatcttgacctctggaatttgctttcacaggctaacaattcgtgcttttctagtggagctgctgctcacggtgactacgtcttcggctgggagggcgatactctgcagaaggccatggacaacagctgcaacctgaacaccgactgccccaaggctggcattacggcccagaagcccgctcaatacaacgcctgcaccatcaagcagcaatctccagagactgttgacggctggattgcggctctccccatcggctcgccggcgattaaggcataggagcagacttggcaatgcttcatatcaacatagagatgcttctaacataggccgctgacgatagtagtagttggctgactaaccgaggctgttattctgtttggactcctgagggtcggctggactatatacattcgctttcaaatagtaatcatcagattggctcttttcatcaaatctgcctttgtgtaattagatgctgcatcattataacttctccac

SEQ ID NO: 27409 - DNA, 2397 bp, Muscodor strobelii
  misc_feature: SGI cDNA ID NO. 569389
  misc_feature: Encodes the peptide sequence at SEQ ID NO 27410
atgtatcacgaaatgactcgtttaaacaagaaggtcatgttgatagttctcaattgtacctcgttgcttgctttcttaatcacggcacaagactccaatgaggatcaacgaaagtcgacacaactcgacctgtccccctattacaacaataaagccttcggcacgtatccaggggaagtttctttcgacacactgggacaatcatacccttctcctgtttcctccgattcgccgtcttatacatcaacatcgacgggcatcatctacttgttcccgggttatttaggcccgtcgcgcccagacaatgtgatcagcaacggtcagacgattactatacctgactcttgcaccgagaacgtcttctcggcctccttcctgattgcaggagacgttgaattctccaccgtttcaggaaacgtcactttcgaatatagcgatgggagcaattcgagctacgaaataaggacgcttgcttggtatagctggcttacgctgaataagggagagatcgtgtttccgtatagatttacgaatgatggcattaactggaacacgagtcatgtttttgaacgcactgccgcgttgacaccgggcaagaaattgcagagcatcacactaccagttgtagaggagggcgatagtaggctgcatgtttttgctgtttcgctctggagtgcgagtgggatcgcggtcgatgtgcaaaatgtgaggccgacacagaagtggcttaggaatgacgagcagatcgttgaggttattcttaataacgtgggcgagacatgtgttataggagatggtattagcgttgagatccgagggaaagggttcaatacgacgactcccggcaagatgaagaggctctgtcctggagaccagaaaatggtcaaagttggtgtcatgggagagtctgaagggatgggaatcgtaaaggtggggattgagggagacggaattcacgatagcgtcgacgtcgaaggagttgaaatcgggcttatagaatggaatgaggacttgaaaacacttgcaaagcacgagagccctgattggtataatggtgcgaagtttggaatttttatacattggggtgtttactccgtaacgggttgggggaattcaactccgtatgagagctatgctgaatggttctggtggtattcaactcatcatcccgaagctgaccgctccgacttctacgattatcgccttagaacgtacggtgcgaactggtcctatgacgacacatttcctagttttactgcatcgaaatttgatcctaaagcttgggttgatctttttgcagacgccggggcgcagtactttgttatcacgagtaaacaccatgatggatttgccttgttcgacacaggcgtgacaagcaatcgatcagccttgcactacggacctgaacgcgatcttctaaaagagctgttcgacgcagctgaaacctaccaaccactgctccaccgaggaacttatttctcactaccagagtggttcaatcctgacttcggcccttatggctttgaccaacttccaccatctgaagaccccggtaccagctcctggcccggaatcctcgcacgaaatccatacacgaacgctacagaaccatacacaggccacgtccccgtctctgattttataaccgatgtcatgcttccgcaaatggagacacttgcttcccggtatggaacggagatcatgtggtgtgacatcggggccgcaaacgcgagtgcacgttttgcagcagattggtatactgagactcgtaaggcggaccgacaagttactattaattctcgatgtggcttggcggaggttgcggattttgacacgccagagtacgcgacgtttgctagcgcgcagacgaggaaatgggagagtaatctgggcatggacccgtatagttatgggtacaatagggcgacaaaggacgaggagtatatgaatgctacgcagattaaaaatgggaatctgttgctcgacatcgggccccgtgacgacggcaccatcgtcgaagccgagatcaacaatcttcaagaagccggccgctggattcgtgctcatggcgaagcgatcttcaatacaacttattggtttgtacaaagtgagtttattggcgatggaactgatattagattcacgcaaacagatgatgccttttatatcttgttcctggagaagccgatactggcgggcgggtacataagcttgcctgtggcattgcctatcgtctctggcgatgggctaagcttgttgacgatcgcagggggagagagcttgaaatggagtacatctactaacgaagaaggacagagagtgctgagcatagaggttgatgatgggctgttagatcaagaagagttttgttgggttttcaaggtcacgtatgcctga

SEQ ID NO: 27410 - protein, 798 aa, Muscodor strobelii
  misc_feature: SGI Peptide ID NO. 569389
  misc_feature (322)..(739): Pfam Id: PF01120 Pfam Desc: Alpha-L-fucosidase
  misc_feature (347)..(501): Pfam Id: PF01120 Pfam Desc: Alpha-L-fucosidase
  misc_feature (622)..(729): Pfam Id: PF01120 Pfam Desc: Alpha-L-fucosidase
  misc_feature (38)..(797): NCBI GI: 39975075 Blast Desc: MGG_00316 [Magnaporthe grisea 70-15] gi|145018800|gb|EDK03079.1| MGG_00316 [Magnaporthe grisea 70-15]
  misc_feature (23)..(797): NCBI GI: 242813326 Blast Desc: alpha-L-fucosidase, [Talaromyces stipitatus ATCC 10500] gi|218714483|gb|EED13906.1| alpha-L-fucosidase, [Talaromyces stipitatus ATCC 10500]
  misc_feature (275)..(797): NCBI GI: 145248201 Blast Desc: An13g02110 [Aspergillus niger] gi|134081098|emb|CAK41610.1| protein product [Aspergillus niger]
  misc_feature (239)..(797): NCBI GI: 145611908 Blast Desc: MGG_00042 [Magnaporthe grisea 70-15] gi|145019128|gb|EDK03407.1| MGG_00042 [Magnaporthe grisea 70-15]
  misc_feature (61)..(795): NCBI GI: 256668818 Blast Desc: alpha-L-fucosidase, [Streptomyces sp. AA4]
  misc_feature (363)..(798): NCBI GI: 254401121 Blast Desc: conserved [Streptomyces sviceus ATCC 29083] gi|197710601|gb|EDY54635.1| conserved [Streptomyces sviceus ATCC 29083]
  misc_feature (338)..(795): NCBI GI: 271965890 Blast Desc: Alpha-L-fucosidase [Streptosporangium roseum DSM 43021] gi|270509065|gb|ACZ87343.1| Alpha-L-fucosidase [Streptosporangium roseum DSM 43021]
  misc_feature (527)..(798): NCBI GI: 238583665 Blast Desc: MPER_10430 [Moniliophthora perniciosa FA553] gi|215453584|gb|EEB91244.1| MPER_10430 [Moniliophthora perniciosa FA553]
  misc_feature (347)..(798): NCBI GI: 225707686 Blast Desc: Plasma alpha-L-fucosidase precursor [Osmerus mordax]
  misc_feature (339)..(795): NCBI GI: 256670080 Blast Desc: Alpha-L-fucosidase [Streptomyces sp. AA4]
  misc_feature (339)..(741): SWISSPROT Homolog: EC 3.2.1.51 Alpha-L-fucosidase
MYHEMTRLNKKVMLIVLNCTSLLAFLITAQDSNEDQRKSTQLDLSPYYNNKAFGTYPGEVSFDTLGQSYPSPVSSDSPSYTSTSTGIIYLFPGYLGPSRPDNVISNGQTITIPDSCTENVFSASFLIAGDVEFSTVSGNVTFEYSDGSNSSYEIRTLAWYSWLTLNKGEIVFPYRFTNDGINWNTSHVFERTAALTPGKKLQSITLPVVEEGDSRLHVFAVSLWSASGIAVDVQNVRPTQKWLRNDEQIVEVILNNVGETCVIGDGISVEIRGKGFNTTTPGKMKRLCPGDQKMVKVGVMGESEGMGIVKVGIEGDGIHDSVDVEGVEIGLIEWNEDLKTLAKHESPDWYNGAKFGIFIHWGVYSVTGWGNSTPYESYAEWFWWYSTHHPEADRSDFYDYRLRTYGANWSYDDTFPSFTASKFDPKAWVDLFADAGAQYFVITSKHHDGFALFDTGVTSNRSALHYGPERDLLKELFDAAETYQPLLHRGTYFSLPEWFNPDFGPYGFDQLPPSEDPGTSSWPGILARNPYTNATEPYTGHVPVSDFITDVMLPQMETLASRYGTEIMWCDIGAANASARFAADWYTETRKADRQVTINSRCGLAEVADFDTPEYATFASAQTRKWESNLGMDPYSYGYNRATKDEEYMNATQIKNGNLLLDIGPRDDGTIVEAEINNLQEAGRWIRAHGEAIFNTTYWFVQSEFIGDGTDIRFTQTDDAFYILFLEKPILAGGYISLPVALPIVSGDGLSLLTIAGGESLKWSTSTNEEGQRVLSIEVDDGLLDQEEFCWVFKVTYA

SEQ ID NO: 27411 - DNA, 978 bp, Muscodor strobelii
  misc_feature: SGI cDNA ID NO. 569390
  misc_feature: Encodes the peptide sequence at SEQ ID NO 27412
atgggttctgagagtgatgccctaccaagcaccataggcttcataggtctcggggcaatgggagggcccatggtcaccaaccttgttaaaaagttgcctgccaattcacaaatatgcatccacgatgttgtcgatactgcaatggaagagctcatcgccacatttcccaatgaaatcgtcaaagctgccaatgcgaaagaagtgactgagagatccgaagtcatacttacaatgctccccgaaggcagccacgtcaagtctgtttacctcgacccaaccaccggcatcatcgcagcccttcccggctcctctatgcccaagcttctcatagattcttccacaatcgacaccgctaccaatctgtatgtcaaagagcagctcaccgcctcgtcgcctgatacgtacttctacgacgcgccggtgagcggcggcgtcctcggtgccgtgaacgcaactattgccttcttcctcggttgttctccctcagaccccaatatcccgcgcctaaccactttacttcaaactatgggaagtaaggtgataccatgcggcgggccttcgctaggacttgccgctaagttatctaataattatctctctggtataattacgattgcgtgctcggaggcgatggacatgggaatgcgagcgggcattgaggcagatgtattggcttcagtgtttgcagccggcactgcccagaacaccatctgcgatgttttcaaccctgtgccgggtgtatgccccaaggcgccaccatcaaatgggtatcaaggcggatttcgtatacagctgatgaggaaggatattgggttagccgtggatatggcgaggagactgggtgcgaggaatgtcttgggcgcgagcggtttgggagtgtacacggcagcgtgtgaggcgccagaatgcaaaaatctagactcgagggttgtgtatcggtacttgggaggtaaagaagactgggaaagaaaggagtga

SEQ ID NO: 27412 - protein, 325 aa, Muscodor strobelii
  misc_feature: SGI Peptide ID NO. 569390
  misc_feature (9)..(186): Pfam Id: PF03446 Pfam Desc: NAD binding domain of 6-phosphogluconate dehydrogenase
  misc_feature (6)..(319): NCBI GI: 256731970 Blast Desc: NECHADRAFT_93929 [Nectria haematococca mpVI 77-13-4]
  misc_feature (12)..(324): NCBI GI: 169605369 Blast Desc: SNOG_05709 [Phaeosphaeria nodorum SN15] gi|160706750|gb|EAT86773.2| SNOG_05709 [Phaeosphaeria nodorum SN15]
  misc_feature (11)..(325): NCBI GI: 119196107 Blast Desc: CIMG_02428 [Coccidioides immitis RS]
  misc_feature (5)..(325): NCBI GI: 258569919 Blast Desc: [Uncinocarpus reesii 1704] gi|237904033|gb|EEP78434.1| [Uncinocarpus reesii 1704]
  misc_feature (12)..(324): NCBI GI: 189193391 Blast Desc: 3-hydroxyisobutyrate dehydrogenase, mitochondrial precursor [Pyrenophora tritici-repentis Pt-1C-BFP] gi|187978598|gb|EDU45224.1| 3-hydroxyisobutyrate dehydrogenase,
  misc_feature (10)..(324): NCBI GI: 212538405 Blast Desc: 3-hydroxyisobutyrate dehydrogenase, [Penicillium marneffei ATCC 18224] gi|210069100|gb|EEA23191.1| 3-hydroxyisobutyrate dehydrogenase, [Penicillium marneffei ATCC
  misc_feature (12)..(322): NCBI GI: 255948952 Blast Desc: Pc22g13160 [Penicillium chrysogenum Wisconsin 54-1255] gi|211592260|emb|CAP98604.1| Pc22g13160 [Penicillium chrysogenum Wisconsin 54-1255]
  misc_feature (12)..(324): NCBI GI: 115385515 Blast Desc: [Aspergillus terreus NIH2624] gi|114187751|gb|EAU29451.1| [Aspergillus terreus NIH2624]
  misc_feature (11)..(325): NCBI GI: 240110633 Blast Desc: NAD binding domain of 6-phosphogluconate dehydrogenase family protein [Coccidioides posadasii C735 delta SOWgp]
  misc_feature (78)..(319): NCBI GI: 171676412 Blast Desc: protein product [Podospora anserina] gi|170936272|emb|CAP60931.1| protein product [Podospora anserina]
  misc_feature (11)..(315): SWISSPROT Homolog: EC 1.1.1.31 3-hydroxyisobutyrate dehydrogenase
MGSESDALPSTIGFIGLGAMGGPMVTNLVKKLPANSQICIHDVVDTAMEELIATFPNEIVKAANAKEVTERSEVILTMLPEGSHVKSVYLDPTTGIIAALPGSSMPKLLIDSSTIDTATNLYVKEQLTASSPDTYFYDAPVSGGVLGAVNATIAFFLGCSPSDPNIPRLTTLLQTMGSKVIPCGGPSLGLAAKLSNNYLSGIITIACSEAMDMGMRAGIEADVLASVFAAGTAQNTICDVFNPVPGVCPKAPPSNGYQGGFRIQLMRKDIGLAVDMARRLGARNVLGASGLGVYTAACEAPECKNLDSRVVYRYLGGKEDWERKE

SEQ ID NO: 27413 - DNA, 1794 bp, Muscodor strobelii
  misc_feature: SGI EST ID NO. CUFF.64652.1
  misc_feature: Variant of the nucleotide sequence at SEQ ID NO 27411
agcatagagaaggcacaagcctacgctctccgggtggggccggagaaacaaactgctcctctggcagagaaaaatggccggccgaaagggtatgaacttgaaccgttacgggagtccccgtttcttcagaaacaagagaagcgacgccaggaaacgacattggtgccctgtctttgctctggtcaaaccaatggcactaatattccccgtttgtatatgaatatataattgtcactacctacctcctaccgaggtcctcagtgctttgcctttccgtgttagggttctttgaataggaggtgggtatgtctatagactctcactgccaacactaacatgtcatgttggggtaacgatgactggagtcacggtcagccgacgcgactccatcccgagacaaatccctacgcacatgcagcaacgacacagttcatccggagccaagttaagctcaaacaggtacctctgacgttttgatcaattgtctttccccactcgatagtcgtaattggggaccgttccacctgtatgcacatctacctagggtacccttcaatccactacgattatgtatttgacacggcctcctgcacggtaaagcgttcacatcaacctactacagattgatacaagaaaatatcacatcacatcctgtcgccacacatcttcgtagcatcttgtaggaccgcattcgacgatgggttctgagagtgatgccctaccaagcaccataggcttcataggtctcggggcaatgggagggcccatggtcaccaaccttgttaaaaagttgcctgccaattcacaaatatgcatccacgatgttgtcgatactgcaatggaagagctcatcgccacatttcccaatgaaatcgtcaaagctgccaatgcgaaagaagtgactgagagatccgaagtcatacttacaatgctccccgaaggcagccacgtcaagtctgtttacctcgacccaaccaccggcatcatcgcagcccttcccggctcctctatgcccaagcttctcatagattcttccacaatcgacaccgctaccaatctgtatgtcaaagagcagctcaccgcctcgtcgcctgatacgtacttctacgacgcgccggtgagcggcggcgtcctcggtgccgtgaacgcaactattgccttcttcctcggttgttctccctcagaccccaatatcccgcgcctaaccactttacttcaaactatgggaagtaaggtgataccatgcggcgggccttcgctaggacttgccgctaagttatctaataattatctctctggtataattacgattgcgtgctcggaggcgatggacatgggaatgcgagcgggcattgaggcagatgtattggcttcagtgtttgcagccggcactgcccagaacaccatctgcgatgttttcaaccctgtgccgggtgtatgccccaaggcgccaccatcaaatgggtatcaaggcggatttcgtatacagctgatgaggaaggatattgggttagccgtggatatggcgaggagactgggtgcgaggaatgtcttgggcgcgagcggtttgggagtgtacacggcagcgtgtgaggcgccagaatgcaaaaatctagactcgagggttgtgtatcggtacttgggaggtaaagaagactgggaaagaaaggagtgattgagattcatatacacgattttacacctggaatctgcttgtgacaatcagctgtcttgaggtagcttgcaatgcttatgaaagatatgaaggatagctaccatctcacaatattcctc

SEQ ID NO: 27414 - DNA, 1011 bp, Muscodor strobelii
  misc_feature: SGI cDNA ID NO. 569391
  misc_feature: Encodes the peptide sequence at SEQ ID NO 27415
atgtcgtttcctggcgtcgcttctcttgtttctgaagaaacggggactcccgtaacggttcaagttcataccctttcggccggccatttttctctgccagaggagcagtttgtttctccggccccacccggagagcgtaggcttgtgccttctctatgcttcctagtagagcacctctgtcccgtcacaggccgtacaacccgcattgtattcgaccttggactccggagggatgtccagcggtatgcggagcccattcgccgccatgttgctactcgtcagccgatgacgacagatccggatgtcgtaaagagcttaaaggcaggtggactgacgccggacgatattgattacgttttttactcacatgttcactgggaccatgttggtgagccacgagactttcctcgcagtactttcgtggtcggctacgggtctctagacgtgctacacggaagatcatcagctctacggggaagtcattcgttcttcgaagcagacctcctagacccttctcgaaccatcgagctcccagatccaaacagtgggataaatagagacactagcgccagccgcccgaatacgtcgccacgctcatctacatcgcgtattaatctttcaggaccatggaaacgatttgatgtcctgccatccgtcctagacctcttccaagacggcagtctctatgtcgtcgatgcgcccggtcatctacctggccaccagaatatcctggcgcgaactaaacacagcgacggcagcatttcttgggtttatctcgctggagatgcctgtcatgaccggcgcattgtccgccgagagaaagaaatcagcgagtggcatgacgctcagggtcatttgtgctgtatccatgctgaccgcgcgaaggctgaggagaccattgaagtgattcggactctggaagagaagggagtagaggtgatctttgctcacgacgtagagtgggagaacgatatgagcaataggcaacgattctttgggagtatttcatga

SEQ ID NO: 27415 - protein, 336 aa, Muscodor strobelii
  misc_feature: SGI Peptide ID NO. 569391
  misc_feature (50)..(285): Pfam Id: PF00753 Pfam Desc: Metallo-beta-lactamase superfamily
  misc_feature (19)..(334): NCBI GI: 256732385 Blast Desc: NECHADRAFT_41144 [Nectria haematococca mpVI 77-13-4]
  misc_feature (2)..(336): NCBI GI: 169605371 Blast Desc: SNOG_05710 [Phaeosphaeria nodorum SN15] gi|111065654|gb|EAT86774.1| SNOG_05710 [Phaeosphaeria nodorum SN15]
  misc_feature (19)..(312): NCBI GI: 119196101 Blast Desc: CIMG_02425 [Coccidioides immitis RS]
  misc_feature (85)..(334): NCBI GI: 189193389 Blast Desc: conserved [Pyrenophora tritici-repentis Pt-1C-BFP] gi|187978597|gb|EDU45223.1| conserved [Pyrenophora tritici-repentis Pt-1C-BFP]
  misc_feature (19)..(332): NCBI GI: 115385511 Blast Desc: [Aspergillus terreus NIH2624] gi|114187749|gb|EAU29449.1| [Aspergillus terreus NIH2624]
  misc_feature (20)..(332): NCBI GI: 256723992 Blast Desc: NECHADRAFT_86292 [Nectria haematococca mpVI 77-13-4]
  misc_feature (18)..(328): NCBI GI: 212538395 Blast Desc: PMAA_097750 [Penicillium marneffei ATCC 18224] gi|210069095|gb|EEA23186.1| PMAA_097750 [Penicillium marneffei ATCC 18224]
  misc_feature (20)..(332): NCBI GI: 255956913 Blast Desc: Pc21g22390 [Penicillium chrysogenum Wisconsin 54-1255] gi|211590920|emb|CAP97136.1| Pc21g22390 [Penicillium chrysogenum Wisconsin 54-1255]
  misc_feature (16)..(332): NCBI GI: 171676404 Blast Desc: protein product [Podospora anserina] gi|170936268|emb|CAP60927.1| protein product [Podospora anserina]
  misc_feature (12)..(332): NCBI GI: 256728643 Blast Desc: NECHADRAFT_86140 [Nectria haematococca mpVI 77-13-4]
MSFPGVASLVSEETGTPVTVQVHTLSAGHFSLPEEQFVSPAPPGERRLVPSLCFLVEHLCPVTGRTTRIVFDLGLRRDVQRYAEPIRRHVATRQPMTTDPDVVKSLKAGGLTPDDIDYVFYSHVHWDHVGEPRDFPRSTFVVGYGSLDVLHGRSSALRGSHSFFEADLLDPSRTIELPDPNSGINRDTSASRPNTSPRSSTSRINLSGPWKRFDVLPSVLDLFQDGSLYVVDAPGHLPGHQNILARTKHSDGSISWVYLAGDACHDRRIVRREKEISEWHDAQGHLCCIHADRAKAEETIEVIRTLEEKGVEVIFAHDVEWENDMSNRQRFFGSIS

SEQ ID NO: 27416 - DNA, 906 bp, Muscodor strobelii
  misc_feature: SGI EST ID NO. CUFF.64655.0
  misc_feature: Variant of the nucleotide sequence at SEQ ID NO 27414
cgaccttggactccggagggatgtccagcggtatgcggagcccattcgccgccatgttgctactcgtcagccgatgacgacagatccggatgtcgtaaagagcttaaaggcaggtggactgacgccggacgatattgattacgttttttactcacatgttcactgggaccatgttggtgagccacgagactttcctcgcagtactttcgtggtcggctacgggtctctagacgtgctacacggaagatcatcagctctacggggaagtcattcgttcttcgaagcagacctcctagacccttctcgaaccatcgagctcccagatccaaacagtgggataaatagagacactagcgccagccgcccgaatacgtcgccacgctcatctacatcgcgtattaatctttcaggaccatggaaacgatttgatgtcctgccatccgtcctagacctcttccaagacggcagtctctatgtcgtcgatgcgcccggtcatctacctggccaccagaatatcctggcgcgaactaaacacagcgacggcagcatttcttgggtttatctcgctggagatgcctgtcatgaccggcgcattgtccgccgagagaaagaaatcagcgagtggcatgacgctcagggtcatttgtgctgtatccatgctgaccgcgcgaaggctgaggagaccattgaagtgattcggactctggaagagaagggagtagaggtgatctttgctcacgacgtagagtgggagaacgatatgagcaataggcaacgattctttgggagtatttcatgaggactatatgaatatgtcatttttcacatccactatttagatacctcattattagttcctcgtcctctactaggtatagacttgatatatcgccaattagtgtgccg

SEQ ID NO: 27417 - DNA, 807 bp, Muscodor strobelii
  misc_feature: SGI cDNA ID NO. 569392
  misc_feature: Encodes the peptide sequence at SEQ ID NO 27418
atggcttcagaccaacaaaaggcgcaactgaaagaacagtttgtgacccaaatgggcgacgaagcctttcatagcggctgggaatctctactctcgatagatcccgagttcttctctgcaggcctttcacttgcttcagtgccacgtcgaaaatcccacctatcccgtaaagatcagtcgcttatcgcgcttgcggtcgacagtgctgcgacgcatctctacagcccgggcatccgtgctcacgtgaaggctgcaattgagaagggtgctagcgtaccggaagttttagaggttatcgaactgtcaagcacgttaggtatacacgcgtgcaatattggcgtgccgttgctcgttgaggtattgaaggaagagggaaagtatacggacgagataacaaagccattcaacgagaagcaagaatggctcaagaaggactttacggagaaaagaggttattggcatactttttgggaagactttctacgactcgacccagagttcttcgaagcctacttggaattttcgagtgtgccgtggatcaaggatgtgaagaagaccgagcaaggcgggggggctttggagccgaagatgaaagagctcgtgtattgtgcattcgatgctgcttccacgcacctgtacgttcccggccttaaactacattataagaatgctctaggatacggagccacacctcaagagatactcgaagtgttggagattgccacattgcttagtcttcatacggcacatgtggcagcacccattatacaagagttgacgtctgcttcccgcggttcgacagtctaa

SEQ ID NO: 27418 - protein, 268 aa, Muscodor strobelii
  misc_feature: SGI Peptide ID NO. 569392
  misc_feature (191)..(254): Pfam Id: PF02627 Pfam Desc: Carboxymuconolactone decarboxylase family
  misc_feature (50)..(99): Pfam Id: PF02627 Pfam Desc: Carboxymuconolactone decarboxylase family
  misc_feature (11)..(258): NCBI GI: 212538413 Blast Desc: conserved [Penicillium marneffei ATCC 18224] gi|210069104|gb|EEA23195.1| conserved [Penicillium marneffei ATCC 18224]
  misc_feature (1)..(262): NCBI GI: 148243921 Blast Desc: carboxymuconolactone decarboxylase [Acidiphilium cryptum JF-5] gi|146400484|gb|ABQ29018.1| Carboxymuconolactone decarboxylase [Acidiphilium cryptum JF-5]
  misc_feature (29)..(265): NCBI GI: 170749651 Blast Desc: carboxymuconolactone decarboxylase [Methylobacterium radiotolerans JCM 2831] gi|170656173|gb|ACB25228.1| Carboxymuconolactone decarboxylase [Methylobacterium JCM 2831]
  misc_feature (1)..(197): NCBI GI: 171676410 Blast Desc: protein product [Podospora anserina] gi|170936271|emb|CAP60930.1| protein product [Podospora anserina]
  misc_feature (1)..(263): NCBI GI: 189193387 Blast Desc: carboxymuconolactone decarboxylase [Pyrenophora tritici-repentis Pt-1C-BFP] gi|187978596|gb|EDU45222.1| carboxymuconolactone decarboxylase [Pyrenophora tritici-repentis
  misc_feature (1)..(258): NCBI GI: 169605373 Blast Desc: SNOG_05711 [Phaeosphaeria nodorum SN15] gi|160706751|gb|EAT86775.2| SNOG_05711 [Phaeosphaeria nodorum SN15]
  misc_feature (8)..(257): NCBI GI: 91779116 Blast Desc: gamma-carboxymuconolactone decarboxylase subunit [Burkholderia xenovorans LB400] gi|91691776|gb|ABE34974.1| gamma-carboxymuconolactone decarboxylase subunit [Burkholderia
  misc_feature (1)..(267): NCBI GI: 170695056 Blast Desc: Carboxymuconolactone decarboxylase [Burkholderia graminis C4D1M] gi|170140154|gb|EDT08333.1| Carboxymuconolactone decarboxylase [Burkholderia graminis C4D1M]
  misc_feature (3)..(257): NCBI GI: 186470595 Blast Desc: carboxymuconolactone decarboxylase [Burkholderia phymatum STM815] gi|184196904|gb|ACC74867.1| Carboxymuconolactone decarboxylase [Burkholderia phymatum STM815]
  misc_feature (8)..(257): NCBI GI: 149243542 Blast Desc: carboxymuconolactone decarboxylase [Burkholderia phymatum STM815] gi|184196904|gb|ACC74867.1| Carboxymuconolactone decarboxylase [Burkholderia phymatum STM815]
MASDQQKAQLKEQFVTQMGDEAFHSGWESLLSIDPEFFSAGLSLASVPRRKSHLSRKDQSLIALAVDSAATHLYSPGIRAHVKAAIEKGASVPEVLEVIELSSTLGIHACNIGVPLLVEVLKEEGKYTDEITKPFNEKQEWLKKDFTEKRGYWHTFWEDFLRLDPEFFEAYLEFSSVPWIKDVKKTEQGGGALEPKMKELVYCAFDAASTHLYVPGLKLHYKNALGYGATPQEILEVLEIATLLSLHTAHVAAPIIQELTSASRGSTV

SEQ ID NO: 27419 - DNA, 1461 bp, Muscodor strobelii
  misc_feature: SGI cDNA ID NO. 569393
  misc_feature: Encodes the peptide sequence at SEQ ID NO 27420
atgtcgtccgaattatcagagaaaaaagcagacttcgattatggcgagtcggcgcatattgaatatgggattctaggagacgctgagcggcggaataaggagagagccctagttcgtagactagactgcttcatcgcgccggtgatgatgatgctcatgctcatcagctacctggatcgagggaacattggatttgcggcgacgcaaggcatgacagaggaaattcacctcaaagggtccgagctcaataccgctgtatctgtcttctacgtcttttatatcctcgctgaatttcccacctcgcttctggtcaaacgtctccaatttcaccgtgttataccaactatcacggcatgttggggactcgtctgcctcttcaccgggttggttcggtcattcggccccctcgtcgtaacgcgcatcttgttgggattttttgaaggctgcctgttcccttccatgaccctgttcctatgtaattggtataagcgtgaagagctggcggtgcgggtcgcctttctgttcattgcttcagcgctctctggagctttcgggggccttctagcgtgggccgtgttgagtatggatggcgtcgcaggtttgtcaggatggagatggctctacatcattgagggtcttattactgtcttttgggctgcgtgttgcatatttctagtccctaaaaactatgaaacggcatattttctaaacgaagagcagaagatactcatgagactccgggccgaggagatggaagcttacagcggtggtactgggcactacactagaaaagatatcaaggaagcagccaacgatataaagagctgggttcacggcatcatccaaatcgctgtcgtgactatactctacggtttcggcacatttctgcccatcattattaaacagggttttcactattcgactatccaggcacaatacctggttattccagtgaacctctggggcgctctagtgtacgctgttggcgctgtcttgtctgataagcacgctagtcggtttctcccactaataatctgcgctccatttggcattgccgggtacgccatcctgctctgcaacgttccaccagcagtccagtattttgcaacatacctgattgctaccgcgtgtttcttatgtactggaggtaacatcgcctggctctccggtaactgtgctcccgacggaaaacgagcggctagtattgggattctgcttagcttaaccaacattggtggcgtagtctcgggtcaaatttatcgatccgatgctgcgcctgctttcacgctaggtcacgcatggtccttgggttgtcttgcctttgcatggttcgggtggtggattgtaagatggatctacaaaaggcgtcaagtggccaaagagaaggcgctggccgagggcgtcgtggtgccaccgaatgaacacacggatagagcgccagatttcaaatatcagatatag

SEQ ID NO: 27420 - protein, 486 aa, Muscodor strobelii
  misc_feature: SGI Peptide ID NO. 569393
  misc_feature (49)..(417): Pfam Id: PF07690 Pfam Desc: Major Facilitator Superfamily
  misc_feature (13)..(486): NCBI GI: 169605379 Blast Desc: SNOG_05714 [Phaeosphaeria nodorum SN15] gi|160706753|gb|EAT86778.2| SNOG_05714 [Phaeosphaeria nodorum SN15]
  misc_feature (25)..(485): NCBI GI: 212538415 Blast Desc: high-affinity nicotinic acid transporter, [Penicillium marneffei ATCC 18224] gi|210069105|gb|EEA23196.1| high-affinity nicotinic acid transporter, [Penicillium marneffei ATCC 18224]
  misc_feature (2)..(484): NCBI GI: 19113725 Blast Desc: nicotinic acid plasma membrane transporter () [Schizosaccharomyces pombe] gi|1351714|sp|Q10097.1|YAOI_SCHPO RecName: Full=Uncharacterized transporter C11D3.18C nicotinic ()
  misc_feature (34)..(486): NCBI GI: 164423986 Blast Desc: NCU10368 [Neurospora crassa OR74A] gi|164424027|ref|XP_963279.2| NCU08407 [Neurospora crassa OR74A] gi|157070319|gb|EDO65015.1| conserved [Neurospora crassa OR74A]
  misc_feature (31)..(485): NCBI GI: 19114416 Blast Desc: nicotinic acid plasma membrane transporter () [Schizosaccharomyces pombe] gi|74638860|sp|Q9US44.1|YIZG_SCHPO RecName: Full=Uncharacterized transporter C1002.16c nicotinic ()
  misc_feature (5)..(486): NCBI GI: 156058830 Blast Desc: SS1G_03427 [Sclerotinia sclerotiorum 1980] gi|154701214|gb|EDO00953.1| SS1G_03427 [Sclerotinia sclerotiorum 1980]
  misc_feature (13)..(484): NCBI GI: 259149029 Blast Desc: EC1118_1N26_0023p [Saccharomyces cerevisiae EC1118]
  misc_feature (31)..(486): NCBI GI: 171677231 Blast Desc: protein product [Podospora anserina] gi|170936683|emb|CAP61342.1| protein product [Podospora anserina]
  misc_feature (31)..(484): NCBI GI: 256272486 Blast Desc: C1Q_05655 [Saccharomyces cerevisiae JAY291]
  misc_feature (13)..(484): NCBI GI: 256772646 Blast Desc: high affinity nicotinic acid plasma membrane transporter [Zygosaccharomyces bailii]
MSSELSEKKADFDYGESAHIEYGILGDAERRNKERALVRRLDCFIAPVMMMLMLISYLDRGNIGFAATQGMTEEIHLKGSELNTAVSVFYVFYILAEFPTSLLVKRLQFHRVIPTITACWGLVCLFTGLVRSFGPLVVTRILLGFFEGCLFPSMTLFLCNWYKREELAVRVAFLFIASALSGAFGGLLAWAVLSMDGVAGLSGWRWLYIIEGLITVFWAACCIFLVPKNYETAYFLNEEQKILMRLRAEEMEAYSGGTGHYTRKDIKEAANDIKSWVHGIIQIAVVTILYGFGTFLPIIIKQGFHYSTIQAQYLVIPVNLWGALVYAVGAVLSDKHASRFLPLIICAPFGIAGYAILLCNVPPAVQYFATYLIATACFLCTGGNIAWLSGNCAPDGKRAASIGILLSLTNIGGVVSGQIYRSDAAPAFTLGHAWSLGCLAFAWFGWWIVRWIYKRRQVAKEKALAEGVVVPPNEHTDRAPDFKYQI

SEQ ID NO: 27421 - DNA, 447 bp, Muscodor strobelii
  misc_feature: SGI cDNA ID NO. 569394
  misc_feature: Elevated expression when VOC is produced
  misc_feature: Encodes the peptide sequence at SEQ ID NO 27422
atgagtactgatcccaagttcgatgcgctgcacaagcagctcttcgatgaaggcctcaaaatgcgccgcagcgtcgtgggagactcctacgtcgagcgcgccctcgccaacggctcaaccgagttctcaagggcagggcaggaactcactacggagtggtgctggggctacgcgtggacgcggccaggtcttgagaagaaacagcggagtttgctgaatatcggcatgctcatggccctcaaccgcgggcccgagctggctgtgcatatccgtggggcaaggaacaacggcctctcggagctggagatcagagaggctatcctgcattgtacgacgtactgtggtgttcccgctggcgtagatgctatgaagacggcagagaaggttcttgatgagatggcggagaagggcgagatggccagagagctggggaacaagacgtcataa

SEQ ID NO: 27422 - protein, 148 aa, Muscodor strobelii
  misc_feature: SGI Peptide ID NO. 569394
  misc_feature (44)..(128): Pfam Id: PF02627 Pfam Desc: Carboxymuconolactone decarboxylase family
  misc_feature (1)..(147): NCBI GI: 169605367 Blast Desc: SNOG_05708 [Phaeosphaeria nodorum SN15] gi|160706749|gb|EAT86772.2| SNOG_05708 [Phaeosphaeria nodorum SN15]
  misc_feature (1)..(147): NCBI GI: 189193393 Blast Desc: 4-carboxymuconolactone decarboxylase [Pyrenophora tritici-repentis Pt-1C-BFP] gi|187978599|gb|EDU45225.1| 4-carboxymuconolactone decarboxylase [Pyrenophora Pt-1C-BFP]
  misc_feature (1)..(146): NCBI GI: 256731969 Blast Desc: NECHADRAFT_80894 [Nectria haematococca mpVI 77-13-4]
  misc_feature (1)..(146): NCBI GI: 171676408 Blast Desc: protein product [Podospora anserina] gi|170936270|emb|CAP60929.1| protein product [Podospora anserina]
  misc_feature (1)..(148): NCBI GI: 240110632 Blast Desc: 4-carboxymuconolactone decarboxylase family protein [Coccidioides posadasii C735 delta SOWgp]
  misc_feature (1)..(148): NCBI GI: 119196105 Blast Desc: CIMG_02427 [Coccidioides immitis RS]
  misc_feature (1)..(148): NCBI GI: 212538403 Blast Desc: 4-carboxymuconolactone decarboxylase, [Penicillium marneffei ATCC 18224] gi|210069099|gb|EEA23190.1| 4-carboxymuconolactone decarboxylase, [Penicillium marneffei ATCC
  misc_feature (1)..(144): NCBI GI: 256724078 Blast Desc: NECHADRAFT_86291 [Nectria haematococca mpVI 77-13-4]
  misc_feature (1)..(141): NCBI GI: 115385513 Blast Desc: ATEG_10001 [Aspergillus terreus NIH2624] gi|114187750|gb|EAU29450.1| ATEG_10001 [Aspergillus terreus NIH2624]
  misc_feature (1)..(143): NCBI GI: 121701947 Blast Desc: 4-carboxymuconolactone decarboxylase, [Aspergillus clavatus NRRL 1] gi|119397381|gb|EAW07812.1| 4-carboxymuconolactone decarboxylase, [Aspergillus clavatus NRRL
  misc_feature (12)..(133): SWISSPROT Homolog: EC 4.1.1.44 4-carboxymuconolactone decarboxylase
  misc_feature: Useful for introducing or modulating the production of volatile compounds
MSTDPKFDALHKQLFDEGLKMRRSVVGDSYVERALANGSTEFSRAGQELTTEWCWGYAWTRPGLEKKQRSLLNIGMLMALNRGPELAVHIRGARNNGLSELEIREAILHCTTYCGVPAGVDAMKTAEKVLDEMAEKGEMARELGNKTS

SEQ ID NO: 27423 - DNA, 1018 bp, Muscodor strobelii
  misc_feature: SGI EST ID NO. CUFF.64676.0
  misc_feature: Variant of the nucleotide sequence at SEQ ID NO 27421
cggcaccccacgcggggatggagaagcgagcaagctcatagtgctgtgaacatgtagattaaaacgacggggtaaagcagtgcggagtagaattcccagtccagctataccaatatcatccatattcacattgttcacgcctgagacaatcggcttggagttggatattcatttgcgaaacctcgttaaacgtcttacgatataacccatcccacactcacacctgtatcaccgccatcttcaacccctaaattcaatcacatatacatactcaggttcctccatctctcaaaatgagtactgatcccaagttcgatgcgctgcacaagcagctcttcgatgaaggcctcaaaatgcgccgcagcgtcgtgggagactcctacgtcgagcgcgccctcgccaacggctcaaccgagttctcaagggcagggcaggaactcactacggagtggtgctggggctacgcgtggacgcggccaggtcttgagaagaaacagcggagtttgctgaatatcggcatgctcatggccctcaaccgcgggcccgagctggctgtgcatatccgtggggcaaggaacaacggcctctcggagctggagatcagagaggctatcctgcattgtacgacgtactgtggtgttcccgctggcgtagatgctatgaagacggcagagaaggttcttgatgagatggcggagaagggcgagatggccagagagctggggaacaagacgtcataaagagaaaggctgatagatcagtgtggggagctggagatagctgttcgggtgttttttaggccaatatgaaatgtgaaaacttcatggccagttctagtgtataatggatgttgtaccaggtgcggatagagaggtactatagacgtcagttgtgtctatcaaactttctgaaccaatgtcattcaagtaggcattccgagtacctagaatatttctagatctatatctactttggccgaagctttagagaatgtacgtagactgaatttccatcttaa

SEQ ID NO: 27424 - DNA, 1161 bp, Muscodor strobelii
  misc_feature: SGI cDNA ID NO. 569395
  misc_feature: Encodes the peptide sequence at SEQ ID NO 27425
atggcagcatccactggtcccgatttaccacgcctcatgaaggcacaattcctagatgccttcaataccccttacgcgttgcgctccgtcccgcttccaactcttagctctgagtatgacatcctcatcaaagtggacgccgcctcgtactgtcataccgatgctgttctcgccgcaggacagatgctcccaaatccgccttccctcccacacgtcggatgccatgagtttgccggcactgtcgtagccttgccgtcagagacccgttcctcattccagataggcgaccgagtcggcgtccccggccgctcgtttcatccttgcggcatctgcttcgaatgcgcagccaagcccaacgcgaaggaccccgacgctgacgaggccggctactctgtctattgcccgcactctcacaacaatggcattagtacggacggtggttttagggagtatgccgtcgtggatagccgccaagtggcgcccgtgccggagggcatgtctgctgttgatgcagccttgctcatgtgtgctggagttacgatttacaatgctctgaagcggtgtggcctgaagtcaggggagcgtgtgggtatcatgggctgtggcggaggcttgggtcatctggggctgcaatttgctgtccacatggggctgaacgtcgtgggcgtagacaatgcggatgcaccgctaaaggtagcaaatggtctctctactggggctaggatagttgatgcgagaattcaagaggctcgagatgtggcgactcggcttgggaaagaagatggaaagcttgacagtggggacatgggactggatgcagtcattattctacctgaaagtcagaaggccttcgactacggtgtggcactccttaagaaccacgggaagtgcgttgttgtctcctttcctgagaagggattccatgtttctgctcgcgatgtcgtattcagggatatctcaattgtcggcagccttgtgggcagtaacaagacgttaagggagatgctgcggttcgctgctcaacataacgtcagggcgagtgtcaagacgtttcccctatcgaaattgaacgacttggtgacagagtaccataaaggccagggaggcaaacttgtcattgatatggccctgtctggccaagctgaaaatggcgactcctaa

SEQ ID NO: 27425 - protein, 386 aa, Muscodor strobelii
  misc_feature: SGI Peptide ID NO. 569395
  misc_feature (38)..(162): Pfam Id: PF08240 Pfam Desc: Alcohol dehydrogenase GroES-like domain
  misc_feature (192)..(341): Pfam Id: PF00107 Pfam Desc: Zinc-binding dehydrogenase
  misc_feature (9)..(378): NCBI GI: 169605363 Blast Desc: SNOG_05706 [Phaeosphaeria nodorum SN15] gi|111065650|gb|EAT86770.1| SNOG_05706 [Phaeosphaeria nodorum SN15]
  misc_feature (9)..(377): NCBI GI: 171676406 Blast Desc: protein product [Podospora anserina] gi|170936269|emb|CAP60928.1| protein product [Podospora anserina]
  misc_feature (10)..(375): NCBI GI: 212538399 Blast Desc: alcohol dehydrogenase, [Penicillium marneffei ATCC 18224] gi|210069097|gb|EEA23188.1| alcohol dehydrogenase, [Penicillium marneffei ATCC 18224]
  misc_feature (8)..(374): NCBI GI: 212542873 Blast Desc: alcohol dehydrogenase, [Penicillium marneffei ATCC 18224] gi|210066498|gb|EEA20591.1| alcohol dehydrogenase, [Penicillium marneffei ATCC 18224]
  misc_feature (8)..(374): NCBI GI: 242767830 Blast Desc: quinone oxidoreductase, [Talaromyces stipitatus ATCC 10500] gi|218724642|gb|EED24059.1| quinone oxidoreductase, [Talaromyces stipitatus ATCC 10500]
  misc_feature (9)..(378): NCBI GI: 256724076 Blast Desc: NECHADRAFT_51477 [Nectria haematococca mpVI 77-13-4]
  misc_feature (7)..(377): NCBI GI: 256732386 Blast Desc: NECHADRAFT_41395 [Nectria haematococca mpVI 77-13-4]
  misc_feature (1)..(368): NCBI GI: 242803729 Blast Desc: glycoprotease family protein, [Talaromyces stipitatus ATCC 10500] gi|218717578|gb|EED16999.1| glycoprotease family protein, [Talaromyces stipitatus ATCC 10500]
  misc_feature (12)..(377): NCBI GI: 50086320 Blast Desc: alcohol dehydrogenase [Acinetobacter sp. ADP1] gi|49532296|emb|CAG70008.1| alcohol dehydrogenase [Acinetobacter sp. ADP1]
  misc_feature (9)..(376): NCBI GI: 120611889 Blast Desc: alcohol dehydrogenase [Acidovorax avenae subsp. citrulli AAC00-1] gi|120590353|gb|ABM33793.1| Alcohol dehydrogenase GroES domain protein [Acidovorax citrulli AAC00-1]
  misc_feature (13)..(375): SWISSPROT Homolog: EC 1.1.1.1 Alcohol dehydrogenase
MAASTGPDLPRLMKAQFLDAFNTPYALRSVPLPTLSSEYDILIKVDAASYCHTDAVLAAGQMLPNPPSLPHVGCHEFAGTVVALPSETRSSFQIGDRVGVPGRSFHPCGICFECAAKPNAKDPDADEAGYSVYCPHSHNNGISTDGGFREYAVVDSRQVAPVPEGMSAVDAALLMCAGVTIYNALKRCGLKSGERVGIMGCGGGLGHLGLQFAVHMGLNVVGVDNADAPLKVANGLSTGARIVDARIQEARDVATRLGKEDGKLDSGDMGLDAVIILPESQKAFDYGVALLKNHGKCVVVSFPEKGFHVSARDVVFRDISIVGSLVGSNKTLREMLRFAAQHNVRASVKTFPLSKLNDLVTEYHKGQGGKLVIDMALSGQAENGDS

SEQ ID NO: 27426 - DNA, 559 bp, Muscodor strobelii
  misc_feature: SGI EST ID NO. CUFF.64679.0
  misc_feature: Variant of the nucleotide sequence at SEQ ID NO 27424
ggggagcgtgtgggtatcatgggctgtggcggaggcttgggtcatctggggctgcaatttgctgtccacatggggctgaacgtcgtgggcgtagacaatgcggatgcaccgctaaaggtagcaaatggtctctctactggggctaggatagttgatgcgagaattcaagaggctcgagatgtggcgactcggcttgggaaagaagatggaaagcttgacagtggggacatgggactggatgcagtcattattctacctgaaagtcagaaggccttcgactacggtgtggcactccttaagaaccacgggaagtgcgttgttgtctcctttcctgagaagggattccatgtttctgctcgcgatgtcgtattcagggatatctcaattgtcggcagccttgtgggcagtaacaagacgttaagggagatgctgcggttcgctgctcaacataacgtcagggcgagtgtcaagacgtttcccctatcgaaattgaacgacttggtgacagagtaccataaaggccagggaggcaaacttgtcattgatatggccctgtctg

SEQ ID NO: 27427 - DNA, 1053 bp, Muscodor strobelii
  misc_feature: SGI cDNA ID NO. 569396
  misc_feature: Encodes the peptide sequence at SEQ ID NO 27428
atggcaacggaaaccagttcgcctgtctgcgtgactgtctcagctctcgatgccggccacctcacacttcccgaaagcctcttcatcacggatgcggagcctggaaaaagtgccactgtcccatccctctcgtttctcatcaggcacccatcaccggctgcggcacgcaatagcaatgtgaccaaccttgtgttcgacttaggaatcaagagagatacaaacggatacacagctgaaacgcaagcgcacatagctcagcgacagcccgtcatcactgatccggattgtgccaccagccttcgcaagggcgtgggtcgtgagaaagaagaagacacggtagaagacctcatcgacccgggaaaagaaatagacatagttatcctcagccatgttcactgggaccacacgggcacaccctctgatttctccagcgccacttttgctgtgggctccggcacgctggacctcttgaaaaacggtgctgggcctctgtacccggcagagctattcaatgacgacgaggtacccccatctcgcacggccgagttcccgcccatttccagccggggtagcggtagcaatgaatacgatgccgggccggacgtgccaaagcacacgcctgcttcggcggaaacgctcgccaggctgcccgcctccgccggcaactggtcatggcaacctctcgccggctttacccacgcgctggacttcttcggcgatggcagcctccacatcattgactgccctggacatctgtacggccatgtcaatcttctcgcccgcaccggcccgaagacctacgtctacttgggcggtgactgctgccatgacccaaggataatgagcggggagaggggaatcgccgaatatgacgacggtagaggtgggatacggagcgtgcatgtgaataccagtgtagctagaagcgcattagaccggattggggaattcgtgagggagaagagattgggggcggaggttgaggtggtggtggcacatgacggtgggtggagggaacagaacagacatcggttctggccgggatccctataa

SEQ ID NO: 27428 - protein, 350 aa, Muscodor strobelii
  misc_feature: SGI Peptide ID NO. 569396
  misc_feature (8)..(345): NCBI GI: 256732384 Blast Desc: NECHADRAFT_80893 [Nectria haematococca mpVI 77-13-4]
  misc_feature (6)..(350): NCBI GI: 171676404 Blast Desc: protein product [Podospora anserina] gi|170936268|emb|CAP60927.1| protein product [Podospora anserina]
  misc_feature (9)..(345): NCBI GI: 212538395 Blast Desc: PMAA_097750 [Penicillium marneffei ATCC 18224] gi|210069095|gb|EEA23186.1| PMAA_097750 [Penicillium marneffei ATCC 18224]
  misc_feature (11)..(350): NCBI GI: 169605361 Blast Desc: SNOG_05705 [Phaeosphaeria nodorum SN15] gi|111065649|gb|EAT86769.1| SNOG_05705 [Phaeosphaeria nodorum SN15]
  misc_feature (6)..(350): NCBI GI: 115385511 Blast Desc: [Aspergillus terreus NIH2624] gi|114187749|gb|EAU29449.1| [Aspergillus terreus NIH2624]
  misc_feature (11)..(346): NCBI GI: 256732385 Blast Desc: NECHADRAFT_41144 [Nectria haematococca mpVI 77-13-4]
  misc_feature (11)..(344): NCBI GI: 159127687 Blast Desc: AFUB_039710 [Aspergillus fumigatus A1163]
  misc_feature (11)..(344): NCBI GI: 70999912 Blast Desc: AFUA_3G09460 [Aspergillus fumigatus Af293] gi|66852310|gb|EAL92635.1| AFUA_3G09460 [Aspergillus fumigatus Af293]
  misc_feature (4)..(349): NCBI GI: 169605371 Blast Desc: SNOG_05710 [Phaeosphaeria nodorum SN15] gi|111065654|gb|EAT86774.1| SNOG_05710 [Phaeosphaeria nodorum SN15]
  misc_feature (11)..(349): NCBI GI: 255956913 Blast Desc: Pc21g22390 [Penicillium chrysogenum Wisconsin 54-1255] gi|211590920|emb|CAP97136.1| Pc21g22390 [Penicillium chrysogenum Wisconsin 54-1255]
MATETSSPVCVTVSALDAGHLTLPESLFITDAEPGKSATVPSLSFLIRHPSPAAARNSNVTNLVFDLGIKRDTNGYTAETQAHIAQRQPVITDPDCATSLRKGVGREKEEDTVEDLIDPGKEIDIVILSHVHWDHTGTPSDFSSATFAVGSGTLDLLKNGAGPLYPAELFNDDEVPPSRTAEFPPISSRGSGSNEYDAGPDVPKHTPASAETLARLPASAGNWSWQPLAGFTHALDFFGDGSLHIIDCPGHLYGHVNLLARTGPKTYVYLGGDCCHDPRIMSGERGIAEYDDGRGGIRSVHVNTSVARSALDRIGEFVREKRLGAEVEVVVAHDGGWREQNRHRFWPGSL

SEQ ID NO: 27429 - DNA, 928 bp, Muscodor strobelii
  misc_feature: SGI EST ID NO. CUFF.64685.0
  misc_feature: Variant of the nucleotide sequence at SEQ ID NO 27427
cccgtataggccaaccatgtctgaattgtaatcgtcgttatctcagtttaaagtgcaaaaactattaatgaagaccatagatatggcaacggaaaccagttcgcctgtctgcgtgactgtctcagctctcgatgccggccacctcacacttcccgaaagcctcttcatcacggatgcggagcctggaaaaagtgccactgtcccatccctctcgtttctcatcaggcacccatcaccggctgcggcacgcaatagcaatgtgaccaaccttgtgttcgacttaggaatcaagagagatacaaacggatacacagctgaaacgcaagcgcacatagctcagcgacagcccgtcatcactgatccggattgtgccaccagccttcgcaagggcgtgggtcgtgagaaagaagaagacacggtagaagacctcatcgacccgggaaaagaaatagacatagttatcctcagccatgttcactgggaccacacgggcacaccctctgatttctccagcgccacttttgctgtgggctccggcacgctggacctcttgaaaaacggtgctgggcctctgtacccggcagagctattcaatgacgacgaggtacccccatctcgcacggccgagttcccgcccatttccagccggggtagcggtagcaatgaatacgatgccgggccggacgtgccaaagcacacgcctgcttcggcggaaacgctcgccaggctgcccgcctccgccggcaactggtcatggcaacctctcgccggctttacccacgcgctggacttcttcggcgatggcagcctccacatcattgactgccctggacatctgtacggccatgtcaatcttctcgcccgcaccggcccgaagacctacgtctacttgggcggtgactgctgccatgacccaaggataatgagc

SEQ ID NO: 27430 - DNA, 1008 bp, Muscodor strobelii
  misc_feature: SGI cDNA ID NO. 569397
  misc_feature: Encodes the peptide sequence at SEQ ID NO 27431
atggcttcctcagctgaagatacagtggccttcattggtttgggggttatggggtttcccatggcaaagaatctactcgccggcttagatcctaagaagaagcttctcatctgtgacgtgagcacggaagccttagatcgcttcaaaaaggaggcaaagggcgaagcaactatcgaagtcgtccagaacggctttgaggcaatcaaggccgctaataccgtcatcactatgctcccgggctctgatgccgtgaggactgtgtacctggatgagcaaactggtattcttgccggtgcaattgccgcaacagctggtagtagctcctcgccccagcagaaactgatcatggagtgtggcacaatcgaacaggacaccatcttagcagtcgctaaagccacgcagacaactagcgcctcaaagctttctggaaccctaaccttcgtcgatgctcccgtctcgggtggtcctatgggcgctgtggctggcaatctcaccttcatggtcggctgtgtaccaagtgcagcagatgaagtctttccccgcgtgaaatcataccttcagcatatgggtgatccaaacggcatatttctatgcggcgacgtgggcgcaggcaccgccttcaagatcatcaacaactaccttagtgccatcacctcgctggccgcgtccgaagccctcaacatcggcgtgaaagctggtctcgacccaaaacttctgaccgatgtcatcaatgcaagcggtggacagtgctgggttacgagtaagagcaaccccgtacctggaatacaggcgaatgtgcctagcagcaggggctatgaggggggattcaggatcgagctttgtgcgaaggtattggggatgggaagtagattagcagaaagtgtgggtgctagaacggtgttggataagccgacattgcaggcgtttggggaggctattgcggatgagagatatcggggcaaggatgcgagagttgtttacaagtggttaaatgagagcgatacatga

SEQ ID NO: 27431 - protein, 335 aa, Muscodor strobelii
  misc_feature: SGI Peptide ID NO. 569397
  misc_feature (6)..(200): Pfam Id: PF03446 Pfam Desc: NAD binding domain of 6-phosphogluconate dehydrogenase
  misc_feature (1)..(333): NCBI GI: 256732383 Blast Desc: NECHADRAFT_93927 [Nectria haematococca mpVI 77-13-4]
  misc_feature (3)..(332): NCBI GI: 171676402 Blast Desc: protein product [Podospora anserina] gi|170936267|emb|CAP60926.1| protein product [Podospora anserina]
  misc_feature (3)..(332): NCBI GI: 212538397 Blast Desc: 3-hydroxyisobutyrate dehydrogenase, [Penicillium marneffei ATCC 18224] gi|210069096|gb|EEA23187.1| 3-hydroxyisobutyrate dehydrogenase, [Penicillium marneffei ATCC
  misc_feature (17)..(334): NCBI GI: 169605375 Blast Desc: SNOG_05712 [Phaeosphaeria nodorum SN15] gi|160706752|gb|EAT86776.2| SNOG_05712 [Phaeosphaeria nodorum SN15]
  misc_feature (178)..(334): NCBI GI: 189193385 Blast Desc: 3-hydroxyisobutyrate dehydrogenase, mitochondrial precursor [Pyrenophora tritici-repentis Pt-1C-BFP] gi|187978595|gb|EDU45221.1| 3-hydroxyisobutyrate dehydrogenase,
  misc_feature (1)..(334): NCBI GI: 256728162 Blast Desc: NECHADRAFT_97778 [Nectria haematococca mpVI 77-13-4]
  misc_feature (1)..(330): NCBI GI: 256727381 Blast Desc: [Nectria haematococca mpVI 77-13-4]
  misc_feature (9)..(328): NCBI GI: 255956911 Blast Desc: Pc21g22380 [Penicillium chrysogenum Wisconsin 54-1255] gi|211590919|emb|CAP97135.1| Pc21g22380 [Penicillium chrysogenum Wisconsin 54-1255]
  misc_feature (1)..(330): NCBI GI: 46121813 Blast Desc: FG05284.1 [Gibberella zeae PH-1]
  misc_feature (1)..(330): NCBI GI: 115385515 Blast Desc: [Aspergillus terreus NIH2624] gi|114187751|gb|EAU29451.1| [Aspergillus terreus NIH2624]
  misc_feature (9)..(334): SWISSPROT Homolog: EC 1.1.1.31 3-hydroxyisobutyrate dehydrogenase
MASSAEDTVAFIGLGVMGFPMAKNLLAGLDPKKKLLICDVSTEALDRFKKEAKGEATIEVVQNGFEAIKAANTVITMLPGSDAVRTVYLDEQTGILAGAIAATAGSSSSPQQKLIMECGTIEQDTILAVAKATQTTSASKLSGTLTFVDAPVSGGPMGAVAGNLTFMVGCVPSAADEVFPRVKSYLQHMGDPNGIFLCGDVGAGTAFKIINNYLSAITSLAASEALNIGVKAGLDPKLLTDVINASGGQCWVTSKSNPVPGIQANVPSSRGYEGGFRIELCAKVLGMGSRLAESVGARTVLDKPTLQAFGEAIADERYRGKDARVVYKWLNESDT

SEQ ID NO: 27432 - DNA, 1057 bp, Muscodor strobelii
  misc_feature: SGI EST ID NO. CUFF.64691.0
  misc_feature: Variant of the nucleotide sequence at SEQ ID NO 27430
cggctttgaggcaatcaaggccgctaccaggaatgagaaatacttacctgtccctagaataccgtcatcactatgctcccgggctctgatgccgtgaggactgtgtacctggatgagcaaactggtattcttgccggtgcaattgccgcaacagctggtagtagctcctcgccccagcagaaactgatcatggagtgtggcacaatcgaacaggacaccatcttagcagtcgctaaagccacgcagacaactagcgcctcaaagctttctggaaccctaaccttcgtcgatgctcccgtctcgggtggtcctatgggcgctgtggctggcaatctcaccttcatggtcggctgtgtaccaagtgcagcagatgaagtctttccccgcgtgaaatcataccttcagcatatgggtgatccaaacggcatatttctatgcggcgacgtgggcgcaggcaccgccttcaagatcatcaacaactaccttagtgccatcacctcgctggccgcgtccgaagccctcaacatcggcgtgaaagctggtctcgacccaaaacttctgaccgatgtcatcaatgcaagcggtggacagtgctgggttacgagtaagagcaaccccgtacctggaatacaggcgaatgtgcctagcagcaggggctatgaggggggattcaggatcgagctttgtgcgaaggtattggggatgggaagtagattagcagaaagtgtgggtgctagaacggtgttggataagccgacattgcaggcgtttggggaggctattgcggatgagagatatcggggcaaggatgcgagagttgtttacaagtggttaaatgagagcgatacatgatgtattgctcgtacgagtatattatactcgattaatcttggcatttggagcttctactgctctgcatgcttttgtactagtcagctaacgtcttgctatgagcggtggaagggactataccaagacgaatgcatcccgtcttaatttcctccataatcaaggaatttcatatagaggcagggcctcacgacgtgtaaggctgtac

SEQ ID NO: 27433 - DNA, 1029 bp, Muscodor strobelii
  misc_feature: SGI cDNA ID NO. 569398
  misc_feature: Encodes the peptide sequence at SEQ ID NO 27434
atgccgggacgctacgagcgggtgaatacccaagatgacgagcccgacactcccaccagtccatcgctgcacccccagaggataccgaattcgcctcctccatcattccattcccgcacatcatcgttagaaaggaggcgccagaatgtcaatcccgatctggccgatgctttcgacacagacggcgatgacagcagcgatgacgaagccgacgacaggcaacgcttggtccgcgccaactccatccccgtaacacagaacgccgcaccccaggcatatagcgcatcaacacccgcacggccgcagaacgcgcaagccgcctcgtcggctgctggcaatagcagtgggaacccgaggacgtatggcggtggcattcagtcagatggtgtcttttccaatatgacggccaggccggaacgaggcgagaagatcgtagaggagcagcctccgacgtacgaacaggctgccgcggacgccgcccctccatactgggaaaccaccatcctggcccctggtcttggcggccccgatgaggtatatatcgacggcatgcccgtcggctccatcttcagcttcgtatggaacggcatgatcagtctgtccttccagttcgtcggcttcctgctcacctacctcctgcactcgacacacgccgccaagaatggttcgcgcgccggtctcggcataacgctcatccagtatggattctacatgaaaggtacaagcgacgacggtatgaacggtcaaccttcagacggctatgctcaaccaccagacccgaatagccatgacttcgatcctaacgcggttacgacgagcacgggtgatgggtcttcgagctggagtgacattggtagtagtgaatggatcgcgtacattttgatgattgtgggttggtttgtacttatccggtcggtcagtgattatgtcaaggcgaggagacatgagaagttggtgttgcagagcccggataggggcttgggtattcctattattgccgaaggcgagagccctgcgactgtggtatag

SEQ ID NO: 27434 - protein, 342 aa, Muscodor strobelii
  misc_feature: SGI Peptide ID NO. 569398
  misc_feature (1)..(342): NCBI GI: 85077833 Blast Desc: NCU05077 [Neurospora crassa OR74A] gi|28917110|gb|EAA26830.1| conserved [Neurospora crassa OR74A]
  misc_feature (1)..(342): NCBI GI: 171680390 Blast Desc: protein product [Podospora anserina] gi|170939822|emb|CAP65047.1| protein product [Podospora anserina]
  misc_feature (1)..(342): NCBI GI: 256724416 Blast Desc: NECHADRAFT_73139 [Nectria haematococca mpVI 77-13-4]
  misc_feature (1)..(342): NCBI GI: 261361293 Blast Desc: metal homeostatis protein BSD2 [Verticillium albo-atrum VaMs.102]
  misc_feature (4)..(342): NCBI GI: 238840842 Blast Desc: metal homeostatis protein bsd2 [Microsporum canis CBS 113480]
  misc_feature (4)..(342): NCBI GI: 154294319 Blast Desc: BC1G_13932 [Botryotinia fuckeliana B05.10] gi|150844771|gb|EDN19964.1| BC1G_13932 [Botryotinia fuckeliana B05.10]
  misc_feature (5)..(342): NCBI GI: 212534730 Blast Desc: metal homeostatis protein bsd2 [Penicillium marneffei ATCC 18224] gi|210069920|gb|EEA24010.1| metal homeostatis protein bsd2 [Penicillium marneffei ATCC 18224]
  misc_feature (54)..(342): NCBI GI: 212534732 Blast Desc: metal homeostatis protein bsd2 [Penicillium marneffei ATCC 18224] gi|210069921|gb|EEA24011.1| metal homeostatis protein bsd2 [Penicillium marneffei ATCC 18224]
  misc_feature (70)..(342): NCBI GI: 225560811 Blast Desc: metal homeostatis protein bsd2 [Ajellomyces capsulatus G186AR]
  misc_feature (54)..(342): NCBI GI: 226293442 Blast Desc: metal homeostatis protein bsd2 [Paracoccidioides brasiliensis Pb18]
MPGRYERVNTQDDEPDTPTSPSLHPQRIPNSPPPSFHSRTSSLERRRQNVNPDLADAFDTDGDDSSDDEADDRQRLVRANSIPVTQNAAPQAYSASTPARPQNAQAASSAAGNSSGNPRTYGGGIQSDGVFSNMTARPERGEKIVEEQPPTYEQAAADAAPPYWETTILAPGLGGPDEVYIDGMPVGSIFSFVWNGMISLSFQFVGFLLTYLLHSTHAAKNGSRAGLGITLIQYGFYMKGTSDDGMNGQPSDGYAQPPDPNSHDFDPNAVTTSTGDGSSSWSDIGSSEWIAYILMIVGWFVLIRSVSDYVKARRHEKLVLQSPDRGLGIPIIAEGESPATVV

SEQ ID NO: 27435 - DNA, 1773 bp, Muscodor strobelii
  misc_feature: SGI EST ID NO. CUFF.64866.0
  misc_feature: Variant of the nucleotide sequence at SEQ ID NO 27433
ccccaatccagctgctcatgcggcgcctgtcactcagtggtcccctgcccgcgtgcctgatcccattagagacgcattcgacactcccgtctgcagaccccatctagcacagccccccctattgcccatctggctgtctgccatctcgccgtctttcctttggcttccgaatgaccaattcctaactcctgtcgtccttgttttaggaacagaaggccacgctgcttctgcctcttattcttttctttcgtttttattttcatttcctcgacgcaccttcataccttcagtaaatccgaaacctgcatcttctaacgtaccctctatcggtctctcctttctccgtaaccgccgacctgcgaccgacattccattgccacccaggtgcctagaccgactcttccatcttctatttccatcggccaacgtatcgccatttcgcatcgaaaataattaaattttacgtaccaccgacgtcatcttctttctcgggcttcttgtgaccacgatgccgggacgctacgagcgggtgaatacccaagatgacgagcccgacactcccaccagtccatcgctgcacccccagaggataccgaattcgcctcctccatcattccattcccgcacatcatcgttagaaaggaggcgccagaatgtcaatcccgatctggccgatgctttcgacacagacggcgatgacagcagcgatgacgaagccgacgacaggcaacgcttggtccgcgccaactccatccccgtaacacagaacgccgcaccccaggcatatagcgcatcaacacccgcacggccgcagaacgcgcaagccgcctcgtcggctgctggcaatagcagtgggaacccgaggacgtatggcggtggcattcagtcagatggtgtcttttccaatatgacggccaggccggaacgaggcgagaagatcgtagaggagcagcctccgacgtacgaacaggctgccgcggacgccgcccctccatactgggaaaccaccatcctggcccctggtcttggcggccccgatgaggtatatatcgacggcatgcccgtcggctccatcttcagcttcgtatggaacggcatgatcagtctgtccttccagttcgtcggcttcctgctcacctacctcctgcactcgacacacgccgccaagaatggttcgcgcgccggtctcggcataacgctcatccagtatggattctacatgaaaggtacaagcgacgacggtatgaacggtcaaccttcagacggctatgctcaaccaccagacccgaatagccatgacttcgatcctaacgcggttacgacgagcacgggtgatgggtcttcgagctggagtgacattggtagtagtgaatggatcgcgtacattttgatgattgtgggttggtttgtacttatccggtcggtcagtgattatgtcaaggcgaggagacatgagaagttggtgttgcagagcccggataggggcttgggtattcctattattgccgaaggcgagagccctgcgactgtggtatagggcttgttttgttaaagagcttattttgaggaatacagattagcgattgaacttcttctttataatactcttcggacgcagagtgtgttgagcttggagtccggtgggtagggatatatagcttaatgatagcacccctcttgaactgtgtttgagattttctaggtttatgggtggcatttggtatgtgatgatataatgtgttcttcatctctgtgtgatttgtcctggtcttg

SEQ ID NO: 27436 - DNA, 390 bp, Muscodor strobelii
  misc_feature: SGI cDNA ID NO. 569399
  misc_feature: Reduced expression when VOC is produced
  misc_feature: Encodes the peptide sequence at SEQ ID NO 27437
atgtctcaagcacgctcagtcatccctcaaatcatcaacaacatactgaagtacaaacagagcggccagcgccatctcctccgcgccctcaacaagtggccccgcgacaccatccggcccgaagtccagttccaggaggtcctcatcaagcgcttcgagaagaacgatgtcaagctctccgaggaggacaagctgaagcaggccaacgccctgtactctttgctcgacaaccgctacaagaagacgtatcccatcacgggcactttgatgcagccaaagagcaacccgacctacttcgccgacttaatacgagaactcgaggaggccccgaatcgatcttggctccagagattgactttgagattgaaaggcattgtcaggatacagtaa

SEQ ID NO: 27437 - protein, 129 aa, Muscodor strobelii
  misc_feature: SGI Peptide ID NO. 569399
  misc_feature (24)..(129): NCBI GI: 85077829 Blast Desc: NCU05076 [Neurospora crassa OR74A] gi|28917109|gb|EAA26829.1| [Neurospora crassa OR74A]
  misc_feature (25)..(129): NCBI GI: 156039397 Blast Desc: [Sclerotinia sclerotiorum 1980] gi|154697572|gb|EDN97310.1| [Sclerotinia sclerotiorum 1980]
  misc_feature (19)..(128): NCBI GI: 116179102 Blast Desc: CHGG_00179 [Chaetomium globosum CBS 148.51] gi|88184476|gb|EAQ91944.1| CHGG_00179 [Chaetomium globosum CBS 148.51]
  misc_feature (24)..(127): NCBI GI: 261361292 Blast Desc: conserved [Verticillium albo-atrum VaMs.102]
  misc_feature (24)..(129): NCBI GI: 39942796 Blast Desc: MGG_03478 [Magnaporthe grisea 70-15] gi|145009971|gb|EDJ94627.1| MGG_03478 [Magnaporthe grisea 70-15]
  misc_feature (30)..(129): NCBI GI: 46126993 Blast Desc: FG07874.1 [Gibberella zeae PH-1]
  misc_feature (29)..(129): NCBI GI: 256724536 Blast Desc: [Nectria haematococca mpVI 77-13-4]
  misc_feature (7)..(129): NCBI GI: 171680392 Blast Desc: protein product [Podospora anserina] gi|170939823|emb|CAP65048.1| protein product [Podospora anserina]
  misc_feature (25)..(129): NCBI GI: 242790987 Blast Desc: conserved [Talaromyces stipitatus ATCC 10500] gi|218718257|gb|EED17677.1| conserved [Talaromyces stipitatus ATCC 10500]
  misc_feature (1)..(128): NCBI GI: 255947330 Blast Desc: Pc22g03930 [Penicillium chrysogenum Wisconsin 54-1255] gi|211591449|emb|CAP97681.1| Pc22g03930 [Penicillium chrysogenum Wisconsin 54-1255]
  misc_feature: Useful for introducing or modulating the production of volatile compounds
MSQARSVIPQIINNILKYKQSGQRHLLRALNKWPRDTIRPEVQFQEVLIKRFEKNDVKLSEEDKLKQANALYSLLDNRYKKTYPITGTLMQPKSNPTYFADLIRELEEAPNRSWLQRLTLRLKGIVRIQ

SEQ ID NO: 27438 - DNA, 2324 bp, Muscodor strobelii
  misc_feature: SGI EST ID NO. CUFF.64974.2
  misc_feature: Variant of the nucleotide sequence at SEQ ID NO 27436
gttggacaactacacaattgcctacctaggtatgtaggacagccacacgtgaatcgatggtggtttcacttcaccgagctatcgattgaggtatcatggcaaacctcattgatcgctgtcatcgaagttacagcacctgaagtagcagatactcggatccgaccaagcgtattcgcatctgcgtctgtataaggtagagatgaagaacagttcgaggtaccggtacctgtgcattagatatgccaatcatggccgtccgaatgcttgaactcgatgaatgccaagcgccaagcctgggatgtatcgtagtggggccggaaaagcatccagggtatcgcgagtcgcatttgcagctgtcatgatgatcaattgattttcaatatcgatctcacttgcgcctcgaccagctcccagctcccaacaaacctcacaaatcagatccacgacgatccctctacgctatgtaacacatcacattgtcgattctcacaaccacagcagcgtcctccagagcatcgccatgtctcaagcacgctcagtcatcagcggccagcgccatctcctccgcgccctcaacaagtggccccgcgacaccatccggcccgaagtccagttccaggaggtcctcatcaagcgcttcgagaagaacgatgtcaagctctccgaggaggacaagctgaagcaggccaacgccctgtactctttgctcgacaaccgctacaagaagacgtatcccatcacgggcactttgatgcagccaaagagcaacccgacctacttcgccgacttaatacgagaactcgaggaggccccgaatcgatcttggctccagagattgactttgagattgaaaggcattgtcaggatacagtaatctgtagtgtcacgtatagaatatcgtgtataatgcttgtatcattacctttggctggaataactgatagacaaaaacggtcgggagcgcatacagaacaccacatttgtaataggatatacccacgctccgcaaattataggaactatactcaaaacatagctgtgcaatcaaaatgaagatacctctcctgaacctctccgtcactctatcgatatgatcaatattgtgcatctgtatcatgtagtatacaagtctttatctcttataggggtatctaactcatacattttcctctctgttttcgttccctctgctcttcgctctagatatacctcttctcaggatccaacctatccatgacctccatactcttctcatacatcgagaacacaatcccaccactcatgaccaatctcgcaagcctgggcagcgccccactccaaaacgtcgtgataccctcttgcttaaaaatcagctgcgcacagcgaaagctattcccatacaccgtcttggcttcaatactctgcatcctcgtcttaatcgtatccaagggctgcgtaaccgcaaccgtgatagcgccggccacactcccaatcccaaacgtcccaatcgtgcccagtttctccccgggcgcggtatacgactcagcgagctgcttgagagacgtataactcccgaatctcacagcactattcgcgctctgtcgagcagcagtcgggaccaacccctggaagaacccccgaatccccctctcccgcgcaataatcggcacggcgtgcagaaacccgcgcatccgcggcttcgcgctcttccggtcgtcgatgagcgtcgtctttatgctctctgtcggcgtgacggctagtaagctctcggttacgcctgcaccgaacccggcgattacgtttcgtggccccgagactttcccgttctcgtccgcgagcagacgcttgtattgctcgaaggagacgaaccggattgcggctttggctgagttgccgatgattagtgtcgtgcagccggcgtaccattgtgcgccgaagggcggccaggggagtttctgcccggaagataggttgcggttgagttgcgtgcgtgtcttggcgaattcggctgggtaggttatggcgatttcgatggcgcctgctgatgcgcccgctattatggaccgcagagggcttggcttgtcggctgtgattgtcgacatggtgaatggtgttgtgctgtgcggtcgtggttgtagtggctcaactgaatagtagtggcgtcatcgggttgagccgaccacagtggttggaggcgcactagccggccagccgtgagcttcctgaggccaatgactgttaggaagcttctgccagacctatattgcacggatctgaggatggaggtagagattcgcaaagttgaggtcgatttccaaagttcgtagtctagcggtttaatcaag

SEQ ID NO: 27439 - DNA, 354 bp, Muscodor strobelii
  misc_feature: SGI cDNA ID NO. 569400
  misc_feature: Encodes the peptide sequence at SEQ ID NO 27440
atgtctcaagcacgctcagtcatcagcggccagcgccatctcctccgcgccctcaacaagtggccccgcgacaccatccggcccgaagtccagttccaggaggtcctcatcaagcgcttcgagaagaacgatgtcaagctctccgaggaggacaagctgaagcaggccaacgccctgtactctttgctcgacaaccgctacaagaagacgtatcccatcacgggcactttgatgcagccaaagagcaacccgacctacttcgccgacttaatacgagaactcgaggaggccccgaatcgatcttggctccagagattgactttgagattgaaaggcattgtcaggatacagtaa

SEQ ID NO: 27440 - protein, 117 aa, Muscodor strobelii
  misc_feature: SGI Peptide ID NO. 569400
  misc_feature (12)..(117): NCBI GI: 85077829 Blast Desc: NCU05076 [Neurospora crassa OR74A] gi|28917109|gb|EAA26829.1| [Neurospora crassa OR74A]
  misc_feature (13)..(117): NCBI GI: 156039397 Blast Desc: [Sclerotinia sclerotiorum 1980] gi|154697572|gb|EDN97310.1| [Sclerotinia sclerotiorum 1980]
  misc_feature (4)..(116): NCBI GI: 116179102 Blast Desc: CHGG_00179 [Chaetomium globosum CBS 148.51] gi|88184476|gb|EAQ91944.1| CHGG_00179 [Chaetomium globosum CBS 148.51]
  misc_feature (4)..(115): NCBI GI: 261361292 Blast Desc: conserved [Verticillium albo-atrum VaMs.102]
  misc_feature (4)..(117): NCBI GI: 39942796 Blast Desc: MGG_03478 [Magnaporthe grisea 70-15] gi|145009971|gb|EDJ94627.1| MGG_03478 [Magnaporthe grisea 70-15]
  misc_feature (20)..(117): NCBI GI: 46126993 Blast Desc: FG07874.1 [Gibberella zeae PH-1]
  misc_feature (17)..(117): NCBI GI: 256724536 Blast Desc: [Nectria haematococca mpVI 77-13-4]
  misc_feature (6)..(117): NCBI GI: 171680392 Blast Desc: protein product [Podospora anserina] gi|170939823|emb|CAP65048.1| protein product [Podospora anserina]
  misc_feature (1)..(117): NCBI GI: 242790987 Blast Desc: conserved [Talaromyces stipitatus ATCC 10500] gi|218718257|gb|EED17677.1| conserved [Talaromyces stipitatus ATCC 10500]
  misc_feature (5)..(116): NCBI GI: 255947330 Blast Desc: Pc22g03930 [Penicillium chrysogenum Wisconsin 54-1255] gi|211591449|emb|CAP97681.1| Pc22g03930 [Penicillium chrysogenum Wisconsin 54-1255]
MSQARSVISGQRHLLRALNKWPRDTIRPEVQFQEVLIKRFEKNDVKLSEEDKLKQANALYSLLDNRYKKTYPITGTLMQPKSNPTYFADLIRELEEAPNRSWLQRLTLRLKGIVRIQ

SEQ ID NO: 27441 - DNA, 2324 bp, Muscodor strobelii; identical to SEQ ID NO: 27438
  misc_feature: SGI EST ID NO. CUFF.64974.2
  misc_feature: Variant of the nucleotide sequence at SEQ ID NO 27439

SEQ ID NO: 27442 - DNA, 882 bp, Muscodor strobelii
  misc_feature: SGI cDNA ID NO. 569401
  misc_feature: Reduced expression when VOC is produced
  misc_feature: Encodes the peptide sequence at SEQ ID NO 27443
atgtcgacaatcacagccgacaagccaagccctctgcggtccataatagcgggcgcatcagcaggcgccatcgaaatcgccataacctacccagccgaattcgccaagacacgcacgcaactcaaccgcaacctatcttccgggcagaaactcccctggccgcccttcggcgcacaatggtacgccggctgcacgacactaatcatcggcaactcagccaaagccgcaatccggttcgtctccttcgagcaatacaagcgtctgctcgcggacgagaacgggaaagtctcggggccacgaaacgtaatcgccgggttcggtgcaggcgtaaccgagagcttactagccgtcacgccgacagagagcataaagacgacgctcatcgacgaccggaagagcgcgaagccgcggatgcgcgggtttctgcacgccgtgccgattattgcgcgggagagggggattcgggggttcttccaggggttggtcccgactgctgctcgacagagcgcgaatagtgctgtgagattcgggagttatacgtctctcaagcagctcgctgagtcgtataccgcgcccggggagaaactgggcacgattgggacgtttgggattgggagtgtggccggcgctatcacggttgcggttacgcagcccttggatacgattaagacgaggatgcagagtattgaagccaagacggtgtatgggaatagctttcgctgtgcgcagctgatttttaagcaagagggtatcacgacgttttggagtggggcgctgcccaggcttgcgagattggtcatgagtggtgggattgtgttctcgatgtatgagaagagtatggaggtcatggataggttggatcctgagaagaggtatatctag

SEQ ID NO: 27443 - protein, 293 aa, Muscodor strobelii
  misc_feature: SGI Peptide ID NO. 569401
  misc_feature (197)..(287): Pfam Id: PF00153 Pfam Desc: Mitochondrial carrier protein
  misc_feature (97)..(190): Pfam Id: PF00153 Pfam Desc: Mitochondrial carrier protein
  misc_feature (10)..(93): Pfam Id: PF00153 Pfam Desc: Mitochondrial carrier protein
  misc_feature (9)..(293): NCBI GI: 222090405 Blast Desc: tricarboxylate transporter mitochondrial carrier protein [Chaetomium chiversii]
  misc_feature (9)..(293): NCBI GI: 145616220 Blast Desc: conserved [Magnaporthe grisea 70-15] gi|145009970|gb|EDJ94626.1| conserved [Magnaporthe grisea 70-15]
  misc_feature (9)..(293): NCBI GI: 116179100 Blast Desc: conserved [Chaetomium globosum CBS 148.51] gi|88184475|gb|EAQ91943.1| conserved [Chaetomium globosum CBS 148.51]
  misc_feature (8)..(293): NCBI GI: 261361291 Blast Desc: tricarboxylate transport protein [Verticillium albo-atrum VaMs.102]
  misc_feature (9)..(293): NCBI GI: 164428331 Blast Desc: tricarboxylate transport protein [Neurospora crassa OR74A] gi|157072104|gb|EAA26828.2| tricarboxylate transport protein [Neurospora crassa OR74A]
  misc_feature (8)..(293): NCBI GI: 256724415 Blast Desc: [Nectria haematococca mpVI 77-13-4]
  misc_feature (9)..(293): NCBI GI: 171680394 Blast Desc: protein product [Podospora anserina] gi|170939824|emb|CAP65049.1| protein product [Podospora anserina]
  misc_feature (1)..(293): NCBI GI: 238506128 Blast Desc: mitochondrial tricarboxylate transporter (Ctp), [Aspergillus flavus NRRL3357] gi|220690380|gb|EED46730.1| mitochondrial tricarboxylate transporter (Ctp), [Aspergillus
  misc_feature (1)..(293): NCBI GI: 255945215 Blast Desc: Pc20g08520 [Penicillium chrysogenum Wisconsin 54-1255] gi|211588110|emb|CAP86181.1| Pc20g08520 [Penicillium chrysogenum Wisconsin 54-1255]
  misc_feature (1)..(293): NCBI GI: 189200659 Blast Desc: tricarboxylate transport protein, mitochondrial precursor [Pyrenophora tritici-repentis Pt-1C-BFP] gi|187983765|gb|EDU49253.1| tricarboxylate transport protein,
  misc_feature: Useful for introducing or modulating the production of volatile compounds
MSTITADKPSPLRSIIAGASAGAIEIAITYPAEFAKTRTQLNRNLSSGQKLPWPPFGAQWYAGCTTLIIGNSAKAAIRFVSFEQYKRLLADENGKVSGPRNVIAGFGAGVTESLLAVTPTESIKTTLIDDRKSAKPRMRGFLHAVPIIARERGIRGFFQGLVPTAARQSANSAVRFGSYTSLKQLAESYTAPGEKLGTIGTFGIGSVAGAITVAVTQPLDTIKTRMQSIEAKTVYGNSFRCAQLIFKQEGITTFWSGALPRLARLVMSGGIVFSMYEKSMEVMDRLDPEKRYI

SEQ ID NO: 27444 - DNA, 2503 bp, Muscodor strobelii
  misc_feature: SGI EST ID NO. CUFF.64974.3
  misc_feature: Variant of the nucleotide sequence at SEQ ID NO 27442
cttgattaaaccgctagactacgaactttggaaatcgacctcaactttgcgaatctctacctccatcctcagatccgtgcaatataggtctggcagaagcttcctaacagtcattggcctcaggaagctcacggctggccggctagtgcgcctccaaccactgtggtcggctcaacccgatgacgccactactattcagttgagccactacaaccacgaccgcacagcacaacaccattcaccatgtcgacaatcacagccgacaagccaagccctctgcggtccataatagcgggcgcatcagcaggcgccatcgaaatcgccataacctacccagccgaattcgccaagacacgcacgcaactcaaccgcaacctatcttccgggcagaaactcccctggccgcccttcggcgcacaatggtacgccggctgcacgacactaatcatcggcaactcagccaaagccgcaatccggttcgtctccttcgagcaatacaagcgtctgctcgcggacgagaacgggaaagtctcggggccacgaaacgtaatcgccgggttcggtgcaggcgtaaccgagagcttactagccgtcacgccgacagagagcataaagacgacgctcatcgacgaccggaagagcgcgaagccgcggatgcgcgggtttctgcacgccgtgccgattattgcgcgggagagggggattcgggggttcttccaggggttggtcccgactgctgctcgacagagcgcgaatagtgctgtgagattcgggagttatacgtctctcaagcagctcgctgagtcgtataccgcgcccggggagaaactgggcacgattgggacgtttgggattgggagtgtggccggcgctatcacggttgcggttacgcagcccttggatacgattaagacgaggatgcagagtattgaagccaagacggtgtatgggaatagctttcgctgtgcgcagctgatttttaagcaagagggtatcacgacgttttggagtggggcgctgcccaggcttgcgagattggtcatgagtggtgggattgtgttctcgatgtatgagaagagtatggaggtcatggataggttggatcctgagaagaggtatatctagagcgaagagcagagggaacgaaaacagagaggaaaatgtatgagttagatacccctataagagataaagacttgtatactacatgatacagatgcacaatattgatcatatcgatagagtgacggagaggttcaggagaggtatcttcattttgattgcacagctatgttttgagtatagttcctataatttgcggagcgtgggtatatcctattacaaatgtggtgttctgtatgcgctcccgaccgtttttgtctatcagttattccagccaaaggtaatgatacaagcattatacacgatattctatacgtgacactacagattactgtatcctgacaatgcctttcaatctcaaagtcaatctctggagccaagatcgattcggggcctcctcgagttctcgtattaagtcggcgaagtaggtcgggttgctctttggctgcatcaaagtgcccgtgatgggatactaatttaccatcgcatgtcagcaacttgatcaaccgtagctatgttaaaaagcgtagctggagttatcagcctaccgtcttcttgtagcggttgtcgagcaaagagtacagggcgttggcctgcttcagcttgtcctcctcggagagcttgacatcgttcttctcgaagcgcttgatgaggacctcctggaactggacttcgggccggatggtgtcgcggggccacttgttgagggcgcggaggagatggcgctggccgctctgtttgtacttcagtatgttgttgatgatttgaggcttgcggcacaatcaaaaatcaggtgggttcgatagcttgtgtgtttggcgggtgggcgctacgtacgatgactgagcgtgcttgagacatggcgatgctctggaggacgctgctgtggttgtgagaatcgacaatgtgatgtgttacatagcgtagagggatcgtcgtggatctgatttgtgaggtttgttgggagctgggagctggtcgaggcgcaagtgagatcgatattgaaaatcaattgatcatcatgacagctgcaaatgcgactcgcgataccctggatgcttttccggccccactacgatacatcccaggcttggcgcttggcattcatcgagttcaagcattcggacggccatgattggcatatctaatgcacaggtaccggtacctcgaactgttcttcatctctaccttatacagacgcagatgcgaatacgcttggtcggatccgagtatctgctacttcaggtgctgtaacttcgatgacagcgatcaatgaggtttgccatgatacctcaatcgatagctcggtgaagtgaaaccaccatcgattcacgtgtggctgtcctacatacctaggtaggcaattgtgtagttgtccaac

SEQ ID NO: 27445 - DNA, 774 bp, Muscodor strobelii
  misc_feature: SGI cDNA ID NO. 569402
  misc_feature: Encodes the peptide sequence at SEQ ID NO 27446
atgtcggctcctgctcctccaaggatctgcaagacgtgccatatgccaatcatagatcatgagccggaagcacgtgtgattggacgtcttgataactacatcgctgaggagctattgctcgggcaatggaagaaagacaaagaccgcatcgtctacgctcacgccgagtactatcacaataagagacttggccaccagtatcgcaaagctcgtgtcttcaatctttggggatggcgcggttggagacagacgagacgtatgagagccgatctcagaaggcatcgcgaacaaatgatcatacaatacctggccgttaccgtcgacgcacggcgagcagaagtgtataatggcgaactcccctgcaggcaagcaaccgccgtgtcacaacacctatcccgagacatccgacattccttggaaaagcttcttactctcgacacttgcgaggattcattccgagatgacctcgatacaatctaccgcagacggagaccactgggatatgatagaccagtccacgccgacgcaatggaagcgcgaatggatatattgagagctggaatctttcgcaaaccattcgagaagaatcaaaaggttaccagagcgaagcaaatcgggtttgcggaagtggtgttgccaatcgttgttcgtctcgagggatggaaccagtcgttgcatgtcatccccaaggtctctgagacacgactgtgctcgacgatacatagacaggcttgcttgagacttctcgcaaagacgttgcttgatgtggtctga

SEQ ID NO: 27446 - protein, 257 aa, Muscodor strobelii
  misc_feature: SGI Peptide ID NO. 569402
MSAPAPPRICKTCHMPIIDHEPEARVIGRLDNYIAEELLLGQWKKDKDRIVYAHAEYYHNKRLGHQYRKARVFNLWGWRGWRQTRRMRADLRRHREQMIIQYLAVTVDARRAEVYNGELPCRQATAVSQHLSRDIRHSLEKLLTLDTCEDSFRDDLDTIYRRRRPLGYDRPVHADAMEARMDILRAGIFRKPFEKNQKVTRAKQIGFAEVVLPIVVRLEGWNQSLHVIPKVSETRLCSTIHRQACLRLLAKTLLDVV

SEQ ID NO: 27447 - DNA, 1176 bp, Muscodor strobelii
  misc_feature: SGI EST ID NO. CUFF.64728.0
  misc_feature: Variant of the nucleotide sequence at SEQ ID NO 27445
caaactcgtaaatcagttgcgcacaatgcggattgttataattctgcgagtcctgaccatctcattcttcaatttcaatcggctagtagagaccttcagagtacatccttcacttatcacgttacctttcagagtgtagttatctttggagcgtccagagaccattagaacgtcttgtcggacatccgatgacttatccaaacacgggcagagcaggcaagcgaaagtgatgtgaacatgaaaacatttaccctccagtgttgcatatgcatctgacggacttttcgaactcatgatattactttctaggcgagtaagtgacaggtaggcgacatagcccctactaccttaggtgcttatccgaatttttgaagtgtgccttttacctcttttgctcatgaacatgcggaggaaaacatgcgctgttcatgagcatatgcctacttttggtcattaaacaggctacctcggacagagccaacgtcgattaacgggctcgtagctgctcgtctgcttctatgttgtcgagtaaaggcaagagcaattactccaagttgcactaagctcagagaccatgatatgtcgtccttcttgttctccatctttcactcaaccttctcttctacttcgtcccaactactcatctatagtccactttaatctttttcggccccgaacatagcatcaaatttgaacatgaacctgaatctccaataatcgatactcgatactgtaatgtcggctcctgctcctccaaggatctgcaagacgtgccatatgccaatcatagatcatgagccggaagcacgtgtgattggacgtcttgataactacatcgctgaggagctattgctcgggcaatggaagaaagacaaagaccgcatcgtctacgctcacgccgagtactatcacaataagagacttggccaccagtatcgcaaagctcgtgtcttcaatctttggggatggcgcggttggagacagacgagacgtatgagagccgatctcagaaggcatcgcgaacaaatgatcatacaatacctggccgttaccgtcgacgcacggcgagcagaagtgtataatggcgaactcccctgcaggcaagcaaccgccgtgtcacaacacctatcccgagacatccgacattccttggaaaagcttcttactctcgacact

SEQ ID NO: 27448 - DNA, 789 bp, Muscodor strobelii
  misc_feature: SGI cDNA ID NO. 569403
  misc_feature: Encodes the peptide sequence at SEQ ID NO 27449
atggcctggcgcagctcaggaaccaccaacaccaccctggtatccaacctctacacaaacggcctcatcacccaagacaccgtaaaagccgccttcctagcagtagaccgaggtcactacgcaccaggaaacccctacgaagactcaccgcagcccatcgggcactcagcgaccatctcagcaccacacatgcacgccagcgccgtcgagtccctcctgccattcctcttacccccttcctcccccaaatacggcacaggaagactccggcgcgtgttagatattggaagcggcagtggttacctgacgcatatcctcgccgaagtcgctgggaaggacgccgttgtggtgggtgttgagcatattaaggaactgaaggagttaggtgaggcgaatatgcggaaatctgccgagggaagatcgttacttgagagtggacgggtaaggtttagggttggtgatgggaggaaggggtgggttgagccactggcgactgcttcgagtagcgaacctgggcaggttagggatacgaataatgttggtgggaaggcggaggagagtgatgagcagggttgggatgctattcatgtgggcgctgcggccgtggaactacatgaggagttggtgagccagttgagggctccgggacgactgtttattcctgttgaggagggggtgggcggttggaatcagtatatttgggttgtggataaggatgtgaagggggaggttaggaagaagaagatgtatggggttaggtatgtgcctttgactgatgcgccgaattga

SEQ ID NO: 27449 - protein, 262 aa, Muscodor strobelii
  misc_feature: SGI Peptide ID NO. 569403
  misc_feature (8)..(262): Pfam Id: PF01135 Pfam Desc: Protein-L-isoaspartate(D-aspartate) O-methyltransferase (PCMT)
  misc_feature (8)..(159): Pfam Id: PF01135 Pfam Desc: Protein-L-isoaspartate(D-aspartate) O-methyltransferase (PCMT)
  misc_feature (193)..(262): Pfam Id: PF01135 Pfam Desc: Protein-L-isoaspartate(D-aspartate) O-methyltransferase (PCMT)
  misc_feature (1)..(262): NCBI GI: 171680388 Blast Desc: protein product [Podospora anserina] gi|170939821|emb|CAP65046.1| protein product [Podospora anserina]
  misc_feature (1)..(262): NCBI GI: 46126989 Blast Desc: FG07872.1 [Gibberella zeae PH-1]
  misc_feature (1)..(262): NCBI GI: 256724417 Blast Desc: [Nectria haematococca mpVI 77-13-4]
  misc_feature (1)..(262): NCBI GI: 116179106 Blast Desc: CHGG_00181 [Chaetomium globosum CBS 148.51] gi|88184478|gb|EAQ91946.1| CHGG_00181 [Chaetomium globosum CBS 148.51]
  misc_feature (1)..(252): NCBI GI: 261361294 Blast Desc: protein-L-isoaspartate(D-aspartate) O-methyltransferase [Verticillium albo-atrum VaMs.102]
  misc_feature (1)..(261): NCBI GI: 189194413 Blast Desc: protein-L-isoaspartate(D-aspartate) O-methyltransferase [Pyrenophora tritici-repentis Pt-1C-BFP] gi|187979109|gb|EDU45735.1| protein-L-isoaspartate(D-aspartate)
  misc_feature (1)..(261): NCBI GI: 164428328 Blast Desc: protein-beta-aspartate methyltransferase [Neurospora crassa OR74A] gi|157072103|gb|EAA26831.2| protein-beta-aspartate methyltransferase [Neurospora crassa OR74A]
  misc_feature (19)..(261): NCBI GI: 39942792 Blast Desc: MGG_03476 [Magnaporthe grisea 70-15] gi|145009973|gb|EDJ94629.1| MGG_03476 [Magnaporthe grisea 70-15]
  misc_feature (1)..(261): NCBI GI: 225559540 Blast Desc: L-isoaspartate O-methyltransferase [Ajellomyces capsulatus G186AR]
  misc_feature (1)..(261): NCBI GI: 240279275 Blast Desc: L-isoaspartate O-methyltransferase [Ajellomyces capsulatus H143]
  misc_feature (1)..(259): SWISSPROT Homolog: EC 2.1.1.77 Protein-L-isoaspartate(D-aspartate) O-methyltransferase
MAWRSSGTTNTTLVSNLYTNGLITQDTVKAAFLAVDRGHYAPGNPYEDSPQPIGHSATISAPHMHASAVESLLPFLLPPSSPKYGTGRLRRVLDIGSGSGYLTHILAEVAGKDAVVVGVEHIKELKELGEANMRKSAEGRSLLESGRVRFRVGDGRKGWVEPLATASSSEPGQVRDTNNVGGKAEESDEQGWDAIHVGAAAVELHEELVSQLRAPGRLFIPVEEGVGGWNQYIWVVDKDVKGEVRKKKMYGVRYVPLTDAPN

SEQ ID NO: 27450 - DNA, 1674 bp, Muscodor strobelii
  misc_feature: SGI EST ID NO. CUFF.64734.0
  misc_feature: Variant of the nucleotide sequence at SEQ ID NO 27448
gtagaatcgcatgttgtcctgtgctccaagccaaccccaccatcactcataaagcaaacggtaagtatgacgcaacccgcacacgtttcattgcgcctaagcttctgatgttagcttttacttcaattttattgtcagctcagtgagaagtcgcacacaagcctccacgtgacagaaagagacggctctcgcgttcgtatatgaagaagtgaacctgaagggagtgaagccttgatgaaccaagagacaggactgcgactacatgcttaccgcaacgtctcatcgaatcattcataaatcgccacgccgccatatcaaaagaatcacaaacattttactctcaggctattctatcacgagtagttcccgcaggatcagactatcatcgccaaatccaacaatccgcaacccgtcaatccatcatccacacccgcatccccgcactggcacaaccatacatctaacaacacctcacgctgacaccattgctcacaaatcccaacaccgaatccatcctcccattaacaaccacacacccaaagccacccttgcaaatctcagcacgatggcctggcgcagctcaggaaccaccaacaccaccctggtatccaacctctacacaaacggcctcatcacccaagacaccgtaaaagccgccttcctagcagtagaccgaggtcactacgcaccaggaaacccctacgaagactcaccgcagcccatcgggcactcagcgaccatctcagcaccacacatgcacgccagcgccgtcgagtccctcctgccattcctcttacccccttcctcccccaaatacggcacaggaagactccggcgcgtgttagatattggaagcggcagtggttacctgacgcatatcctcgccgaagtcgctgggaaggacgccgttgtggtgggtgttgagcatattaaggaactgaaggagttaggtgaggcgaatatgcggaaatctgccgagggaagatcgttacttgagagtggacgggtaaggtttagggttggtgatgggaggaaggggtgggttgagccactggcgactgcttcgagtagcgaacctgggcaggttagggatacgaataatgttggtgggaaggcggaggagagtgatgagcagggttgggatgctattcatgtgggcgctgcggccgtggaactacatgaggagttggtgagccagttgagggctccgggacgactgtttattcctgttgaggagggggtgggcggttggaatcagtatatttgggttgtggataaggatgtgaagggggaggttaggaagaagaagatgtatggggttaggtatgtgcctttgactgatgcgccgaattgagagttagaagagggctagaggggagttgtgaaggtgggtttaggggtaggaggttgacgatgggtttgggagttgagattgtgtacgagtgctgtgtatgggatgtgcggtgttccgggattgacagggagattgatgagtttttttattcaggttgaactgaacagtatcagatattactctattcgtttctgagagcttttagatgaacagttaaggggtctgaacaagcacagctaccgaagtcccgtagagattgtgtcgattggaagaccacgaggttcagtatcaagtgaagatctctacgaggcaagaaatac

SEQ ID NO: 27451 - DNA, 1524 bp, Muscodor strobelii
  misc_feature: SGI cDNA ID NO. 569404
  misc_feature: Encodes the peptide sequence at SEQ ID NO 27452
atgctgcacatcttatacgttgccggactttacttcggagtctggctatgtctgcatctctacgagtgcatacaacagcgaactctcctcgcggctgtcgcgctcgagaacggctgtgaagaaccgccattgatcaaaaaccagcgacccttaggcatcgatcgcctggaacagatattcagagctgatgcagaatgtcgcttgccggagctcttactatttcactgtcgacagactggatatacgttaaagcaatgctttcttaacataccagcatatgggactgccgatccggagaatcttgaagctattttctccacgaagttctctgattggtcattcggcccgaggaggaaaatcacgttccctatgttcggcgacgggatttttacgcaagagggtgaagcatggaaacactcgcgagatatgctacgccctcaattcacctacaggcaatatgaagatctgcaagtcttcgaagagcccatctcagatttcctcgcctcactcccagactcagggatcgtcgaccttcagccagtcttcttcggtctaaccctcgacgtcgccaccgcctttctcttcggtgaatcagttcgtagtctcagaccatcgaataatccccaagaacagacttttgccgaagcttttgatacagcgcaaggctatatcgcgactcgctttcgtttaccggatctatattggttgattggcggcaaaacgtggcgggatagctgtgcacaggtccacaggtttgctgatcagattatagatcggaacttgtccaatagtcggagaccggagtctcaaggggatgggcgatacgtgttcttgacatcgctggcaaaggcttgccctgacagggcatcgttacgagggcagatcatcaacatcctcgctgctggccgtgatacgacagcctgtcttttgtcttggactttttttcttctcgtccgacaccccgaagtacttcgaaaactacgacaagaaatcgcaagcttggaggaggaagagttcgggttgaaaagatcagacttacggaatatgcactatctccagaacatattgaaagagagtgagtcttcaccgcctcgcgtcacatcgttaactaacacagcagctcttcgactatatccctccgtacccgtaaacgtacgcaccgccgtcgtagacaccatcctgcccaccggaggaggcgtagatcgcaagtcaccggtattgatccctagggggaccgcggtaaatttcagcgtctatacactccaccgtagagcggacctgtatggcatgaacgcggattgttttcggccagaacggtgggatgaggatctcccgttgtttaaagacaggactacgcagaattacgggtatctgcccttcagcggggggccgaggacgtgtttaggaacgctatcctgggatcaagctgccggaggggggaaggttgagacacttgggactgagaagcagagagtgacgcttgtgctgcagatcgcggagggttgtaaggtggatttaggttag

SEQ ID NO: 27452 - protein, 507 aa, Muscodor strobelii
  misc_feature: SGI Peptide ID NO. 569404
  misc_feature (50)..(506): Pfam Id: PF00067 Pfam Desc: Cytochrome P450
  misc_feature (126)..(469): Pfam Id: PF00067 Pfam Desc: Cytochrome P450
  misc_feature (5)..(506): NCBI GI: 255945701 Blast Desc: Pc20g11290 [Penicillium chrysogenum Wisconsin 54-1255] gi|211588353|emb|CAP86458.1| Pc20g11290 [Penicillium chrysogenum Wisconsin 54-1255]
  misc_feature (23)..(507): NCBI GI: 169786131 Blast Desc: [Aspergillus oryzae RIB40] gi|83776274|dbj|BAE66393.1| protein product [Aspergillus oryzae]
  misc_feature (70)..(507): NCBI GI: 238507073 Blast Desc: cytochrome P450, [Aspergillus flavus NRRL3357] gi|220689451|gb|EED45802.1| cytochrome P450, [Aspergillus flavus NRRL3357]
  misc_feature (32)..(506): NCBI GI: 119488606 Blast Desc: n-alkane-inducible cytochrome P450 [Neosartorya fischeri NRRL 181] gi|119410911|gb|EAW20856.1| n-alkane-inducible cytochrome P450 [Neosartorya fischeri NRRL 181]
  misc_feature (32)..(506): NCBI GI: 159122944 Blast Desc: cytochrome P450 alkane hydroxylase, [Aspergillus fumigatus A1163]
  misc_feature (34)..(506): NCBI GI: 238843824 Blast Desc: n-alkane-inducible cytochrome P450 [Microsporum canis CBS 113480]
  misc_feature (16)..(506): NCBI GI: 255943119 Blast Desc: Pc18g04990 [Penicillium chrysogenum Wisconsin 54-1255] gi|211587061|emb|CAP94723.1| Pc18g04990 [Penicillium chrysogenum Wisconsin 54-1255]
  misc_feature (36)..(507): NCBI GI: 116200125 Blast Desc: CHGG_08218 [Chaetomium globosum CBS 148.51] gi|88179497|gb|EAQ86965.1| CHGG_08218 [Chaetomium globosum CBS 148.51]
  misc_feature (38)..(506): NCBI GI: 258574491 Blast Desc: UREG_00942 [Uncinocarpus reesii 1704] gi|237901693|gb|EEP76094.1| UREG_00942 [Uncinocarpus reesii 1704]
  misc_feature (32)..(506): NCBI GI: 70982576 Blast Desc: cytochrome P450 alkane hydroxylase [Aspergillus fumigatus Af293] gi|66844440|gb|EAL84778.1| cytochrome P450 alkane hydroxylase, [Aspergillus fumigatus Af293]
  misc_feature (90)..(469): SWISSPROT Homolog: EC 1.14.14.1 Unspecific monooxygenase
MLHILYVAGLYFGVWLCLHLYECIQQRTLLAAVALENGCEEPPLIKNQRPLGIDRLEQIFRADAECRLPELLLFHCRQTGYTLKQCFLNIPAYGTADPENLEAIFSTKFSDWSFGPRRKITFPMFGDGIFTQEGEAWKHSRDMLRPQFTYRQYEDLQVFEEPISDFLASLPDSGIVDLQPVFFGLTLDVATAFLFGESVRSLRPSNNPQEQTFAEAFDTAQGYIATRFRLPDLYWLIGGKTWRDSCAQVHRFADQIIDRNLSNSRRPESQGDGRYVFLTSLAKACPDRASLRGQIINILAAGRDTTACLLSWTFFLLVRHPEVLRKLRQEIASLEEEEFGLKRSDLRNMHYLQNILKESESSPPRVTSLTNTAALRLYPSVPVNVRTAVVDTILPTGGGVDRKSPVLIPRGTAVNFSVYTLHRRADLYGMNADCFRPERWDEDLPLFKDRTTQNYGYLPFSGGPRTCLGTLSWDQAAGGGKVETLGTEKQRVTLVLQIAEGCKVDLG

SEQ ID NO: 27453 - DNA, 644 bp, Muscodor strobelii
  misc_feature: SGI EST ID NO. CUFF.64740.0
  misc_feature: Variant of the nucleotide sequence at SEQ ID NO 27451
ttttcttctcgtccgacaccccgaagtacttcgaaaactacgacaagaaatcgcaagcttggaggaggaagagttcgggttgaaaagatcagacttacggaatatgcactatctccagaacatattgaaagagactcttcgactatatccctccgtacccgtaaacgtacgcaccgccgtcgtagacaccatcctgcccaccggaggaggcgtagatcgcaagtcaccggtattgatccctagggggaccgcggtaaatttcagcgtctatacactccaccgtagagcggacctgtatggcatgaacgcggattgttttcggccagaacggtgggatgaggatctcccgttgtttaaagacaggactacgcagaattacgggtatctgcccttcagcggggggccgaggacgtgtttaggaatggattttgctttgactgaagccgcgtatgttattgttcggattcttcagcgctatcctgggatcaagctgccggaggggggaaggttgagacacttgggactgagaagcagagagtgacgcttgtgctgcagatcgcggagggttgtaaggtggatttaggttagctacaagtaatgatgccatgacaattttcagtatcagcagactatgttgaaatcta

SEQ ID NO: 27454 - DNA, 666 bp, Muscodor strobelii
  misc_feature: SGI cDNA ID NO. 569405
  misc_feature: Encodes the peptide sequence at SEQ ID NO 27455
atgcaggggctcaccacttccgccgctagcacgctgtcgcgacagcttgtgcgccgtcagcccctgcccgccgccgctgtcgtcagaatagtcgcgcagcgcacctatgctacgccctcaggccccccgccaccggggttccgcatgcctaagcccaagcgatgggacgacgagcccgagtccaccctcgaccgcgccggacgcttcttcctcatgaccgagatgttccgaggcatgtacgttgccatggagcagtactttcgcccaccatatactatcttctatcccttcgagaaaggaccaatctctccccgattccgtggcgagcatgcattgagacgatacccctcgggcgaagagcggtgcattgcgtgcaagctctgtgaagctatctgcccggcgcaggctatcactatcgaagcagaggagcgagcggatggctcgagaaggacaacgcgctacgacatcgacatgaccaagtgcatctactgtggattctgccaagagtcatgcccagtcgatgctatcgtcgagtcgcctaatgccgagtatgccacagagacgagagaagagctactgtacaacaaggagaagctgttggccaatggagacaagtgggagcccgagttagcggccaatatcagagccgatgccccttataggtaa

SEQ ID NO: 27455 - protein, 221 aa, Muscodor strobelii
  misc_feature: SGI Peptide ID NO. 569405
  misc_feature (154)..(177): Pfam Id: PF00037 Pfam Desc: 4Fe-4S binding domain
  misc_feature (115)..(138): Pfam Id: PF00037 Pfam Desc: 4Fe-4S binding domain
  misc_feature (1)..(221): NCBI GI: 171680662 Blast Desc: protein product [Podospora anserina] gi|170939958|emb|CAP65184.1| protein product [Podospora anserina]
  misc_feature (14)..(221): NCBI GI: 85076501 Blast Desc: NADH:ubiquinone oxidoreductase 21.3c kD subunit [Neurospora crassa OR74A] gi|3929361|sp|Q12644.1|NDUS8_NEUCR RecName: Full=NADH-ubiquinone oxidoreductase 23 kDa subunit, of I
  misc_feature (24)..(221): NCBI GI: 46126979 Blast Desc: NUIM_NEUCR NADH-ubiquinone oxidoreductase 23 kDa subunit, mitochondrial precursor (Complex I-23KD) (CI-23KD) [Gibberella zeae PH-1]
  misc_feature (4)..(221): NCBI GI: 116178838 Blast Desc: NADH-ubiquinone oxidoreductase 23 kDa subunit [Chaetomium globosum CBS 148.51] gi|88184344|gb|EAQ91812.1| NADH-ubiquinone oxidoreductase 23 kDa subunit [Chaetomium CBS
  misc_feature (37)..(221): NCBI GI: 242766902 Blast Desc: NADH-quinone oxidoreductase, 23 kDa subunit, [Talaromyces stipitatus ATCC 10500] gi|218724458|gb|EED23875.1| NADH-quinone oxidoreductase, 23 kDa subunit, [Talaromyces ATCC
  misc_feature (11)..(221): NCBI GI: 212528252 Blast Desc: NADH-quinone oxidoreductase, 23 kDa subunit, [Penicillium marneffei ATCC 18224] gi|210073681|gb|EEA27768.1| NADH-quinone oxidoreductase, 23 kDa subunit, [Penicillium ATCC
  misc_feature (14)..(221): NCBI GI: 256724420 Blast Desc: [Nectria haematococca mpVI 77-13-4]
  misc_feature (41)..(221): NCBI GI: 258576549 Blast Desc: NADH-ubiquinone oxidoreductase 23 kDa subunit [Uncinocarpus reesii 1704] gi|237902722|gb|EEP77123.1| NADH-ubiquinone oxidoreductase 23 kDa subunit [Uncinocarpus 1704]
  misc_feature (17)..(221): NCBI GI: 121702465 Blast Desc: NADH-quinone oxidoreductase, 23 kDa subunit, [Aspergillus clavatus NRRL 1] gi|119397640|gb|EAW08071.1| NADH-quinone oxidoreductase, 23 kDa subunit, [Aspergillus NRRL 1]
  misc_feature (12)..(221): NCBI GI: 145616212 Blast Desc: MGG_03483 [Magnaporthe grisea 70-15] gi|145009964|gb|EDJ94620.1| MGG_03483 [Magnaporthe grisea 70-15]
  misc_feature (14)..(221): SWISSPROT Homolog: EC 1.6.5.3 NADH dehydrogenase (ubiquinone)
  misc_feature (14)..(221): SWISSPROT Homolog: EC 1.6.99.3 NADH dehydrogenase
MQGLTTSAASTLSRQLVRRQPLPAAAVVRIVAQRTYATPSGPPPPGFRMPKPKRWDDEPESTLDRAGRFFLMTEMFRGMYVAMEQYFRPPYTIFYPFEKGPISPRFRGEHALRRYPSGEERCIACKLCEAICPAQAITIEAEERADGSRRTTRYDIDMTKCIYCGFCQESCPVDAIVESPNAEYATETREELLYNKEKLLANGDKWEPELAANIRADAPYR

SEQ ID NO: 27456 - DNA, 1296 bp, Muscodor strobelii
  misc_feature: SGI EST ID NO. CUFF.64891.0
  misc_feature: Variant of the nucleotide sequence at SEQ ID NO 27454
gggtagcccatgccgtggccaattacggggttggtagaccagttcgcagagctgtggccaatgacggacggtcctttgtcatagagcgcctgggctccactgaaaacgcccaagtttggatcatgacctcaaagctgtattgaacactcgcctcctgcagcaattgagctccgtcgtcgaccctctcccctccatccaccctctggacacccccaattgcacttcaccatgcaggggctcaccacttccgccgctagcacgctgtcgcgacagcttgtgcgccgtcagcccctgcccgccgccgctgtcgtcagaatagtcgcgcagcgcacctatgctacgccctcaggccccccgccaccggggttccgcatgcctaagcccaagcgatgggacgacgagcccgagtccaccctcgaccgcgccggacgcttcttcctcatgaccgagatgttccgaggcatgtacgttgccatggagcagtactttcgcccaccatatactatcttctatcccttcgagaaagtccgtactggttacattcaaccatcacctaccgatgcccgtatcgaccgccaaccctatcataatattacgacaccctagcgaggttggatcgttactagcattatcacagcggctgatatatgatattcatagggaccaatctctccccgattccgtggcgagcatgcattgagacgatacccctcgggcgaagagcggtgcattgcgtgcaagctctgtgaagctatctgcccggcgcaggctatcactatcgaagcagaggagcgagcggatggctcgagaaggacaacgcgctacgacatcgacatgaccaagtgcatctactgtggattctgccaagagtcatgcccagtcgatgctatcgtcgagtcgcctaatgccgagtatgccacagagacgagagaagagctactgtacaacaaggagaagctgttggccaatggagacaagtgggagcccgagttagcggccaatatcagagccgatgccccttataggtaatgtgtcgcggttaggaacgaaaagagagaaagagagctgctcgttggcctgtacatatatcattagagaactacaataagcaactttcatttgtggcgtaatcgatgtattaagggccatatctcgtggtcttgattatacccactattcgccctatattcattgcgagccgtccctctagctgtggattgccaagcttagtgcttgacctcccatactcacatacttttgatatttcttgcaattggacaagttattagaatgtca

SEQ ID NO: 27457 - DNA, 417 bp, Muscodor strobelii
  misc_feature: SGI cDNA ID NO. 569406
  misc_feature: Reduced expression when VOC is produced
  misc_feature: Encodes the peptide sequence at SEQ ID NO 27458
atgtaccgaactgccatcctccgatcggccgccatggcctctcgcatggctgcgcgccccgttgcccgctccgctttcgtcgcacccagagctgctgctgctttcacccccgtaaccaagattgccgccattcccgccatccgcatgtactccgccgccagtggcttaaagcaggaggaggttgagggccgcattatgggcatcctgaacggtttcgacaaggtcaacgaccctagcaacatcaagcccacggcacacttctccaacgatctcggtctcgacagcttggacacagttgaggttgttatggccatagaagaggagttcagtatcgagatccccgataaggacgccgatgccatccacagtgttaaccaggctgttgagtacatcctgagccaacccgatgccaactaa

SEQ ID NO: 27458 - protein, 138 aa, Muscodor strobelii
  misc_feature: SGI Peptide ID NO. 569406
  misc_feature (63)..(131): Pfam Id: PF00550 Pfam Desc: Phosphopantetheine attachment site
  misc_feature (1)..(137): NCBI GI: 46126975 Blast Desc: FG07865.1 [Gibberella zeae PH-1]
  misc_feature (1)..(138): NCBI GI: 171680660 Blast Desc: protein product [Podospora anserina] gi|170939957|emb|CAP65183.1| protein product [Podospora anserina]
  misc_feature (1)..(138): NCBI GI: 256724421 Blast Desc: NECHADRAFT_102223 [Nectria haematococca mpVI 77-13-4]
  misc_feature (9)..(138): NCBI GI: 39942808 Blast Desc: MGG_03484 [Magnaporthe grisea 70-15] gi|145009963|gb|EDJ94619.1| MGG_03484 [Magnaporthe grisea 70-15]
  misc_feature (1)..(138): NCBI GI: 169599787 Blast Desc: SNOG_02719 [Phaeosphaeria nodorum SN15] gi|111068330|gb|EAT89450.1| SNOG_02719 [Phaeosphaeria nodorum SN15]
  misc_feature (1)..(138): NCBI GI: 67539068 Blast Desc: AN5704.2 [Aspergillus nidulans FGSC A4] gi|40743607|gb|EAA62797.1| AN5704.2 [Aspergillus nidulans FGSC A4] gi|259484820|tpe|CBF81369.1| TPA: acyl carrier protein, FGSC
  misc_feature (6)..(138): NCBI GI: 85076497 Blast Desc: NADH:ubiquinone oxidoreductase 9.6kD subunit [Neurospora crassa OR74A] gi|113199|sp|P11943.2|ACPM_NEUCR RecName: Full=Acyl carrier protein, mitochondrial; Short=ACP; 9.6
  misc_feature (1)..(138): NCBI GI: 261206242 Blast Desc: conserved [Ajellomyces dermatitidis SLH14081] gi|239592917|gb|EEQ75498.1| conserved [Ajellomyces dermatitidis SLH14081] gi|239610911|gb|EEQ87898.1| conserved [Ajellomyces
  misc_feature (1)..(138): NCBI GI: 156039525 Blast Desc: SS1G_11899 [Sclerotinia sclerotiorum 1980] gi|154697636|gb|EDN97374.1| SS1G_11899 [Sclerotinia sclerotiorum 1980]
  misc_feature (1)..(138): NCBI GI: 226281883 Blast Desc: PAAG_07867 [Paracoccidioides brasiliensis Pb01]
  misc_feature: Useful for introducing or modulating the production of volatile compounds
MYRTAILRSAAMASRMAARPVARSAFVAPRAAAAFTPVTKIAAIPAIRMYSAASGLKQEEVEGRIMGILNGFDKVNDPSNIKPTAHFSNDLGLDSLDTVEVVMAIEEEFSIEIPDKDADAIHSVNQAVEYILSQPDAN

SEQ ID NO: 27459 - DNA, 949 bp, Muscodor strobelii
  misc_feature: SGI EST ID NO. CUFF.64765.0
  misc_feature: Variant of the nucleotide sequence at SEQ ID NO 27457
tatcgctggagctcttccaacctatctcgacctctctaaataatccatctcgactttactctctcacgaccaccaccacaactagcgtcttacgcctttccgtcacttcacaactcaaccatcctcatcaattgggcacttcataccgccagaatgtaccgaactgccatcctccgatcggccgccatggcctctcgcatggctgcgcgccccgttgcccgctccgctttcgtcgcacccagagctgctgctgctttcacccccgtaaccaagattgccgccattcccgccatccgcatgtactccgccgccagtggcttaaagcaggaggaggttgagggccgcattatgggcatcctgaacggtttcgacaaggtcaacgaccctagcaacatcaagcccacggcacacttctccaacgatctcggtctcgacagcttggacacagttgaggttgttatggccatagaagaggagttcagtatcgagatccccgataaggacgccgatgccatccacagtgttaaccaggctgttgagtacatcctgagccaacccgatgccaactaaacacctcacctttgtacattaaaaatatcacgccaattgtacattcgccgctccgtacctagattagatgggattccactgcaatgagcaagttggcgtgtcaaacatacggataccatgagctgaagcagaccaatgtgatggggaaatgctctgcaggggagagtcgcgaaggacgacaaccatggcgttgggatgaaaatctacaggtcgatatcccaaagcccttgtacaactgtatagatctttgtcctttaattattgaaactcatcaccatctctgtgtcgtgtcattgagcaacgttgttctaatcatggcccttcgagtactcatccatatccaagcctgatatcagtcgcaactctcaatataattatt

SEQ ID NO: 27460 - DNA, 2433 bp, Muscodor strobelii
  misc_feature: SGI cDNA ID NO. 569407
  misc_feature: Encodes the peptide sequence at SEQ ID NO 27461
atgagtctatcgcgccgcgatgggagcccaaacagctcctttgatcagcagggcacagtcgactggggtcaaatcgcatcgcgcaccgtctcgttcactatcgatgtcctctcacggctctctgctgccaatgtagatccttacacttttgaggtcggtcgcttgctctgcggcaaattcatgatgtctcaagcaggaaaacaaaatatcgacacagcactctcacggttgcaatgcttcaagctaccgggcacattgctttggttcgggttcggcacgcgtcacattgttcgtcaactcgcaacaactgacaatggcttcagctgtgttgccatatgtggtgcactctccgactactaccatgaagatgttggagcagagatcctaagtgagttgacggcactctatatcccatctggggaaattatgagtccttccatcagcgaatggaagaacttgatcagatcggcctcgggcatctttgcatcgtcgcctttcggtacccttatagaggagctcttgcaactggatccccgcctatggaatatggaggacacagagtcaactcatgatttccatgatacgaggatcgaccgacgcggctgctccacacccgagtcgattgcagcgtcgctgcaggctgttgcgttggtgacacaaggcaggctagaaaacatcacgattaccggaaccaatgatattgggtggttggctgcattatgtgaatggcaattcggattatccatagtgattgaggacgctgatgggaagcacctctacccaaatgaccgagatggacggaattaccaagtaaagtttcgctttctcgttaggacagcggctgaaccacaaccaaaagcttcccacgacctagaaattgcttcgcgcacttttgtattaagagacgcgacggagctattccgacatcgtcgaccagacgatgcgctggtgtctaacacgggtcgacttccttgggataaatgcctgtctcgaacattcggaagtgacttccatagacttcttaaacgagatccaactacgatgtccactattttcggctgcgcagcacggcttcttcagggtttcgctatttcagagcctggtccagcaactgcttccgtgcgtgggctttggaacacctccaactctgcattatacgggcgcggatttattatagcccttgtcgagactttcccggagctggcaagtttgcaacctctagtcgatcagacgttcaacgtttctttgcatgaagcacgatcaacctacgagaatcacatttcgcgtctggctgcgagttgtaactgtcgcgtatttcagccaggtcctgatcacccacgctctccaggattgccgcggaaatgtgatgtggttataatggaaactattatgacacttacacttattctctctaggggcgtgatcgaggaagggctgttaccaaaaagaagcgggatcgagtatttctacgcccgccagagagactcacgcttactactcaatcaacgggatatcctattcaataagcaggatagggaccctaatcaagagggcgaactagaagttgaagagtactgggattttgctccattcagcctcatctgcaagccacccggacctgaggatattcgaggggatatcctgagagcaataatacatctcttcgcaggtcgtggcccagctaatgcgaacacgggcttcaaagactcatctgctgcagcatctgatgggattgtagttcattcgcagatgctgtcttatcctgagaggagcctggaggtcgccggcaacgtttttgtggcagcagggtgcattgagtaccgaagcagacctttcggcaacatcagtgacaacatggatacggaatcctcgttgttcactgagggatctagcattgcagagcagatcatgaactcgatcaggcgatacgactccgtcagcacaaagatcaaagaaactgcccagggcctccgatcgcacatcgtgctgagtacggcggtgccaagtgtctttcccgatctccctttagaaccctgccgactggccgtcgacattgcgaaggcgcgtgggtgggtgagctgtcaaacaatatgtgatcctagtgtgaagcgcatcaacctagctgacggcaagtggtttgacgtatttggacgacaagttcgtgttgttaaaggtcctgatctggccatccttgccagtttcttctttttccaagcgatgtacgatgtctacacggggatattaagcgagaactgctgcttagcatgcagcattgtggagggagcaaaagtagaatccgcagcccgctggttcaaggatgaatacttagcaggtgacgcaaagtgcctcgtcttgtgccctgagtctgcacgccatgaggtcgtgatgccgtacccaagaaacaggacagaaacccctacgcagacaagttga

SEQ ID NO: 27461 - protein, 810 aa, Muscodor strobelii
  misc_feature: SGI Peptide ID NO. 569407
  misc_feature (11)..(334): NCBI GI: 242770721 Blast Desc: ankyrin repeat-containing protein, [Talaromyces stipitatus ATCC 10500] gi|218725233|gb|EED24650.1| ankyrin repeat-containing protein, [Talaromyces stipitatus ATCC 10500]
  misc_feature (17)..(499): NCBI GI: 115399424 Blast Desc: [Aspergillus terreus NIH2624] gi|114192184|gb|EAU33884.1| [Aspergillus terreus NIH2624]
  misc_feature (32)..(437): NCBI GI: 261358171 Blast Desc: [Verticillium albo-atrum VaMs.102]
MSLSRRDGSPNSSFDQQGTVDWGQIASRTVSFTIDVLSRLSAANVDPYTFEVGRLLCGKFMMSQAGKQNIDTALSRLQCFKLPGTLLWFGFGTRHIVRQLATTDNGFSCVAICGALSDYYHEDVGAEILSELTALYIPSGEIMSPSISEWKNLIRSASGIFASSPFGTLIEELLQLDPRLWNMEDTESTHDFHDTRIDRRGCSTPESIAASLQAVALVTQGRLENITITGTNDIGWLAALCEWQFGLSIVIEDADGKHLYPNDRDGRNYQVKFRFLVRTAAEPQPKASHDLEIASRTFVLRDATELFRHRRPDDALVSNTGRLPWDKCLSRTFGSDFHRLLKRDPTTMSTIFGCAARLLQGFAISEPGPATASVRGLWNTSNSALYGRGFIIALVETFPELASLQPLVDQTFNVSLHEARSTYENHISRLAASCNCRVFQPGPDHPRSPGLPRKCDVVIMETIMTLTLILSRGVIEEGLLPKRSGIEYFYARQRDSRLLLNQRDILFNKQDRDPNQEGELEVEEYWDFAPFSLICKPPGPEDIRGDILRAIIHLFAGRGPANANTGFKDSSAAASDGIVVHSQMLSYPERSLEVAGNVFVAAGCIEYRSRPFGNISDNMDTESSLFTEGSSIAEQIMNSIRRYDSVSTKIKETAQGLRSHIVLSTAVPSVFPDLPLEPCRLAVDIAKARGWVSCQTICDPSVKRINLADGKWFDVFGRQVRVVKGPDLAILASFFFFQAMYDVYTGILSENCCLACSIVEGAKVESAARWFKDEYLAGDAKCLVLCPESARHEVVMPYPRNRTETPTQTS

SEQ ID NO: 27462 - DNA, 904 bp, Muscodor strobelii
  misc_feature: SGI EST ID NO. CUFF.64756.0
  misc_feature: Variant of the nucleotide sequence at SEQ ID NO 27460
ttaccggaaccaatgatattgggtggttggctgcattatgtgaatggcaattcggattatccatagtgattgaggacgctgatgggaagcacctctacccaaatgaccgagatggacggaattaccaagtaaagtttcgctttctcgttaggacagcggctgaaccacaaccaaaagcttcccacgacctagaaattgcttcgcgcacttttgtattaagagacgcgacggagctattccgacatcgtcgaccagacgatgcgctggtgtctaacacgggtcgacttccttgggataaatgcctgtctcgaacattcggaagtgacttccatagacttcttaaacgagatccaactacgatgtccactattttcggctgcgcagcacggcttcttcagggtttcgctatttcagagcctggtccagcaactgcttccgtgcgtgggctttggaacacctccaactctgcattatacgggcgcggatttattatagcccttgtcgagactttcccggagctggcaagtttgcaacctctagtcgatcagacgttcaacgtttctttgcatgaagcacgatcaacctacgagaatcacatttcgcgtctggctgcgagttgtaactgtcgcgtatttcagccaggtcctgatcacccacgctctccaggattgccgcggaaatgtgatgtggttataatggaaactattatgacacttacacttattctctctaggggcgtgatcgaggaagggctgttaccaaaaagaagcgggatcgagtatttctacgcccgccagagagactcacgcttactactcaatcaacgggatatcctattcaataagcaggatagggaccctaatcaagagggcgaactagaagttgaagagtactgggattttgc

SEQ ID NO: 27463 - DNA, 705 bp, Muscodor strobelii
  misc_feature: SGI cDNA ID NO. 569408
  misc_feature: Encodes the peptide sequence at SEQ ID NO 27464
atgtcgggacgagcaaatgccccaggtgccaactcgcgtggtcgaggcggcaaattcaagaaattcactagaggtggcgggaagcatttctcgcgcgatctccgacctcttgacgccgatggcaacgaaattagcatgtggagcgcagatgcccagaaaaaggacagcgacgacgatgacgacagcgaggaggactctgaagacgactcagaggaggattccgatgatgacgctggtccatcccaacaacagcaggagctaacccgtgaggagcgcaaggcccagaagaaggcccagaaagacgcagccgcagccaagaagaacaagcaagtccaagttggcgacctaccaagcgaagactcagatgaggactcagatgatggcatgcccgccaaccccaaccactccaaggccgctcgaaaacagactcaggctgccccctcccaccagtcactcgaggcgcagcaagccaaggagcgctatcgcaggctgcacgaggctggcaagacagacgaggccaaggctgatatggcccgtctcagactgatccgagagaagcgagaagccgatgctgctcgcaaacaggcagagaaggaggagcgcgatgctcaggaggccgagcgaaaggccgagagagaagccaaggaggccaagaaacgggaggccgcacttggaaagcaacctgtcaagaagggaaagaaataa

SEQ ID NO: 27464 - protein, 234 aa, Muscodor strobelii
  misc_feature: SGI Peptide ID NO. 569408
  misc_feature (5)..(227): NCBI GI: 85094863 Blast Desc: NCU06101 [Neurospora crassa OR74A] gi|28921421|gb|EAA30727.1| [Neurospora crassa OR74A]
  misc_feature (5)..(221): NCBI GI: 256732907 Blast Desc: NECHADRAFT_78675 [Nectria haematococca mpVI 77-13-4]
  misc_feature (13)..(234): NCBI GI: 212544944 Blast Desc: conserved [Penicillium marneffei ATCC 18224] gi|210065595|gb|EEA19689.1| conserved [Penicillium marneffei ATCC 18224]
  misc_feature (8)..(224): NCBI GI: 46123933 Blast Desc: FG06344.1 [Gibberella zeae PH-1]
  misc_feature (13)..(225): NCBI GI: 119195357 Blast Desc: [Coccidioides immitis RS] gi|240104956|gb|EER23149.1| 28 kDa heat- and acid-stable phosphoprotein, [Coccidioides posadasii C735 delta SOWgp]
  misc_feature (1)..(233): NCBI GI: 261361203 Blast Desc: conserved [Verticillium albo-atrum VaMs.102]
  misc_feature (13)..(224): NCBI GI: 255945203 Blast Desc: Pc20g08460 [Penicillium chrysogenum Wisconsin 54-1255] gi|211588104|emb|CAP86175.1| Pc20g08460 [Penicillium chrysogenum Wisconsin 54-1255]
  misc_feature (18)..(234): NCBI GI: 154310053 Blast Desc: BC1G_06947 [Botryotinia fuckeliana B05.10] gi|150851735|gb|EDN26928.1| BC1G_06947 [Botryotinia fuckeliana B05.10]
  misc_feature (13)..(210): NCBI GI: 71000705 Blast Desc: conserved [Aspergillus fumigatus Af293] gi|66852671|gb|EAL92996.1| conserved [Aspergillus fumigatus Af293]
  misc_feature (13)..(224): NCBI GI: 258566459 Blast Desc: [Uncinocarpus reesii 1704] gi|237907675|gb|EEP82076.1| [Uncinocarpus reesii 1704]
MSGRANAPGANSRGRGGKFKKFTRGGGKHFSRDLRPLDADGNEISMWSADAQKKDSDDDDDSEEDSEDDSEEDSDDDAGPSQQQQELTREERKAQKKAQKDAAAAKKNKQVQVGDLPSEDSDEDSDDGMPANPNHSKAARKQTQAAPSHQSLEAQQAKERYRRLHEAGKTDEAKADMARLRLIREKREADAARKQAEKEERDAQEAERKAEREAKEAKKREAALGKQPVKKGKK

SEQ ID NO: 27465 - DNA, 1350 bp, Muscodor strobelii
  misc_feature: SGI EST ID NO. CUFF.64768.0
  misc_feature: Variant of the nucleotide sequence at SEQ ID NO 27463
cagaacgccacaatagcaaagcaggacactggaaccctttgatactaccccgccatccaatctgattcaggtcctgactgttttgttggttggcgataatctgtaaatctctacaataggctttccgttgtcctacttaggctctttctgctgagcatttaatcttcgcgcatattcatttgcgctttataagcagagcatttatacttcgacctttcgtctctgtcgccccggcgcaaagacttgcgatacagaagtatactacacgatcccaccatcaaataccccgtcaaattccccagttccatagtcatcatgtcgggacgagcaaatgccccaggtgccaactcgcgtggtcgaggcggcaaattcaagaaattcactagaggtggcgggaagcatttctcgcgcgatctccgacctcttgacgccgatggcaacgaaattagcatgtggagcgcagatgcccagaaaaaggacagcgacgacgatgacgacagcgaggaggactctgaagacgactcagaggaggattccgatgatgacgctggtccatcccaacaacagcaggagctaacccgtgaggagcgcaaggcccagaagaaggcccagaaagacgcagccgcagccaagaagaacaagcaagtccaagttggcgacctaccaagcgaagactcagatgaggactcagatgatggcatgcccgccaaccccaaccactccaaggccgctcgaaaacagactcaggctgccccctcccaccgtcgacgatgctgccgaaggcgtgagcaagatgtcggtgaacaagagcaacatgagccgaaaggagcgagagtcactcgaggcgcagcaagccaaggagcgctatcgcaggctgcacgaggctggcaagacagacgaggccaaggctgatatggcccgtctcagactgatccgagagaagcgagaagccgatgctgctcgcaaacaggcagagaaggaggagcgcgatgctcaggaggccgagcgaaaggccgagagagaagccaaggaggccaagaaacgggaggccgcacttggaaagcaacctgtcaagaagggaaagaaataaagaggcatttctcttgttgcgtgtaccagagctattcacattgcattgcataccaggagtagcgccgtgcatatcccatacttgcagctttgtgcgtacgaatagatattactactaccctgctaagttcttcccggttactcttgcttgatgaactcgctggaaatgaggctgggatgaggctcttagcgacaccagtaaatatgatattattaaacatcgatattgcatatgcgactcgtcgtgtaagtctaaaggcc

SEQ ID NO: 27466 - DNA, 1041 bp, Muscodor strobelii
  misc_feature: SGI cDNA ID NO. 569409
  misc_feature: Encodes the peptide sequence at SEQ ID NO 27467
atggcgcggcaacgcaaacccacaaaagcccaaccaaagcgcaaagatgacgggccacccgtaccatacaagcgaccagccgaagtgctcgaacccatgctggagacattagacgagaagcacgtatacatcttccacatcgaccacaaacccgcatccttcaagcggaaaacattcatcatcccagttctaatgaacatctctatcattggcctattctgtttccgcatgtggtacatcacgccgtactacttcaagttactacagtccgtcatggggacatggaacgagacgaccatcttcgtcgaagaagtcgagtggtccgacatcctctgggaagtggggaatcgcgccttcacgttcttatttgatttcttgcttttcgtgttcctatggccttggccgctggatttctgctttgcgcaggaacacgggaatcccgtgtcctggcgtcgtgctatcgggtttcgggatcgagaggttgtcgtgcgacggagtcgtaagtggagtgagacgatgggggatgtggtgactgatggtgaagatggattgaacgtctcacgctcgttctttctctcgagggttcagactgcgactagccctatggttcttggtgataagacggggtacgtgctcatggatggggactgggacttggactgggcggctatggtcgatgctacgactatggtcgataagaagatggcggcgatcgaggcgttcaagcttgttgtgttgctgcatcatgaggattgggggtggttgtgtgttgatctgaagaatgatgagaggaacgaggatggaccgcgcagacaggtctttgcgttccgggatgcacttacggcgattgggaaggaagatttgttctttagatgggttgagattgtgcagtttgagtcttcgcagcctgggggctttgggccggagaaacaggagcaggttgctaaggatatcagggagatgttccttaaagaaggtgtggactttgatcagttctggaaggatagtgttgggacggattctgcgttgggattgcagtga

SEQ ID NO: 27467 - protein, 346 aa, Muscodor strobelii
  misc_feature: SGI Peptide ID NO. 569409
  misc_feature (1)..(338): NCBI GI: 256732454 Blast Desc: NECHADRAFT_92452 [Nectria haematococca mpVI 77-13-4]
  misc_feature (19)..(345): NCBI GI: 85094867 Blast Desc: NCU06102 [Neurospora crassa OR74A] gi|28921422|gb|EAA30728.1| conserved [Neurospora crassa OR74A]
  misc_feature (14)..(339): NCBI GI: 46123939 Blast Desc: FG06347.1 [Gibberella zeae PH-1]
  misc_feature (29)..(344): NCBI GI: 116203701 Blast Desc: CHGG_09734 [Chaetomium globosum CBS 148.51] gi|88175862|gb|EAQ83330.1| CHGG_09734 [Chaetomium globosum CBS 148.51]
  misc_feature (20)..(345): NCBI GI: 39973993 Blast Desc: MGG_00857 [Magnaporthe grisea 70-15] gi|145018201|gb|EDK02480.1| MGG_00857 [Magnaporthe grisea 70-15]
  misc_feature (30)..(345): NCBI GI: 154310019 Blast Desc: BC1G_06930 [Botryotinia fuckeliana B05.10] gi|150851718|gb|EDN26911.1| BC1G_06930 [Botryotinia fuckeliana B05.10]
  misc_feature (30)..(345): NCBI GI: 156039193 Blast Desc: SS1G_11733 [Sclerotinia sclerotiorum 1980] gi|154697470|gb|EDN97208.1| SS1G_11733 [Sclerotinia sclerotiorum 1980]
  misc_feature (30)..(345): NCBI GI: 189205322 Blast Desc: conserved [Pyrenophora tritici-repentis Pt-1C-BFP] gi|187986095|gb|EDU51583.1| conserved [Pyrenophora tritici-repentis Pt-1C-BFP]
  misc_feature (79)..(345): NCBI GI: 171679409 Blast Desc: protein product [Podospora anserina] gi|170939330|emb|CAP64558.1| protein product [Podospora anserina]
  misc_feature (3)..(332): NCBI GI: 169609689 Blast Desc: SNOG_07937 [Phaeosphaeria nodorum SN15] gi|160701896|gb|EAT84213.2| SNOG_07937 [Phaeosphaeria nodorum SN15]
MARQRKPTKAQPKRKDDGPPVPYKRPAEVLEPMLETLDEKHVYIFHIDHKPASFKRKTFIIPVLMNISIIGLFCFRMWYITPYYFKLLQSVMGTWNETTIFVEEVEWSDILWEVGNRAFTFLFDFLLFVFLWPWPLDFCFAQEHGNPVSWRRAIGFRDREVVVRRSRKWSETMGDVVTDGEDGLNVSRSFFLSRVQTATSPMVLGDKTGYVLMDGDWDLDWAAMVDATTMVDKKMAAIEAFKLVVLLHHEDWGWLCVDLKNDERNEDGPRRQVFAFRDALTAIGKEDLFFRWVEIVQFESSQPGGFGPEKQEQVAKDIREMFLKEGVDFDQFWKDSVGTDSALGLQ

SEQ ID NO: 27468 - DNA, 1315 bp, Muscodor strobelii
  misc_feature: SGI EST ID NO. CUFF.64771.0
  misc_feature: Variant of the nucleotide sequence at SEQ ID NO 27466
cacacgtcccaaacaccgaattttgcccaatatctcaacctcacaacaccacacccggatgatcggtctcaatcagacgcaaaataagaactacatttgcacaggaaatcttcaacatggcgcggcaacgcaaacccacaaaagcccaaccaaagcgcaaagatgacgggccacccgtaccatacaagcgaccagccgaagtgctcgaacccatgctggagacattagacgagaagcacgtatacatcttccacatcgaccacaaacccgcatccttcaagcggaaaacattcatcatcccagttctaatgaacatctctatcattggcctattctgtttccgcatgtggtacatcacgccgtactacttcaagttactacagtccgtcatggggacatggaacgagacgaccatcttcgtcgaagaagtcgagtggtccgacatcctctgggaagtggggaatcgcgccttcacgttcttatttgatttcttgcttttcgtgttcctatggccttggccgctggatttctgctttgcgcaggaacacgggaatcccgtgtcctggcgtcgtgctatcgggtttcgggatcgagaggttgtcgtgcgacggagtcgtaagtggagtgagacgatgggggatgtggtgactgatggtgaagatggattgaacgtctcacgctcgttctttctctcgagggttcagactgcgactagccctatggttcttggtgataagacggggtacgtgctcatggatggggactgggacttggactgggcggctatggtcgatgctacgactatggtcgataagaagatggcggcgatcgaggcgttcaagcttgttgtgttgctgcatcatgaggattgggggtggttgtgtgttgatctgaagaatgatgagaggaacgaggatggaccgcgcagacaggtctttgcgttccgggatgcacttacggcgattgggaaggaagatttgttctttagatgggttgagattgtgcagtttgagtcttcgcagcctgggggctttgggccggagaaacaggagcaggttgctaaggatatcagggagatgttccttaaagaaggtgtggactttgatcagttctggaaggatagtgttgggacggattctgcgttgggattgcagtgatatttgatatgtcacttcagagctcgaacagcgagtcgattcgacgggtgcatagaaattcaaaataagacatgggcatgatcattgattctatcatttcatagctttgtgattcgagactattacggacgagttgtatgactattgctctatgtaac

SEQ ID NO: 27469 - DNA, 3645 bp, Muscodor strobelii
  misc_feature: SGI cDNA ID NO. 569410
  misc_feature: Reduced expression when VOC is produced
  misc_feature: Encodes the peptide sequence at SEQ ID NO 27470
atgttgagagggaggttcgcaaagcagcagagcaacatttgcacattctgtcaataccgcctatcgcaacagcgtcctccgcagcgatctcgccctttctcatcgtcaccatgctcctcaaatagcgaccccccaggcctgcgaccccccagctctgccatacccggtgcccagagtaatgatggctggggcgtatcatccagcccggggttgggcagacggcccggtctgagtgcgacctcctccgacagcagtggcagctggggcgcaactcccatgccgtccgtccgtccgccgcccaagctgccgcccaaggtagcagagctcgaagatggttccaaacgcgctgccggctcctttctgcctgcaaccccgagagcaggagggttcggactacggccccgcccactcacggcccaagaagcaccgaccgctgctgagactcctcgctccgaacaagcacagtattccgtccagaagctcagatggatgagagacgaggagaaactcgcccatcttgaccccgctgagcgtcggcagatcttgctgaaaaagatggccgcttcttccaaaactcgctcacatgagcgcaaccaatttcgtgttggtggaagcagagctgccccaaatggcatgaagcctttccaatcagaatctaactcactgatcattgaacgtaatgaacctggcaataatgcggaatatggaggttcacactcgcttcatagagatcggatgagagcggcacggcatagacacccagatgcacccccagcccactacagaactccgcagtcattgccctcgattggtcgaagccagcaagagttgggatccgattccaccatcaaatttcacgatagtccaaagtcataccaggaccgtctttctcagagcaacgaaatacaaaatgaccagtatttcaggaggacagctcataacggaccaagcaaggaaagtctcaatgaatttcccgagaccctatttcaaaaatccgccgccagagatttgccgaagcccccgtccgactttcaaaatcgaagaagaaaaattatgccggatgagatttacccttctagtcttagtaatctggcacaagagtccgagttctggtccaacggcggccaatctcgagattccatgaaaaatccaaccccgacacccatcccagacacggttcaaccatttggcgctcccgctcaaagatcgagagctcctactccggagtccagctcttcctctgagtggggtgctgatttcgcacagggcccgatggccagacagcgcaatccgctgcaggaatggaatcaactctcgagaataccaaaaccatccaccgcgacggccgaaaataccgccgcaaatgcgaccaacagtaccgaacaatgggacaaaatgatgaagagcttcggagctgagaagaaacccacaaccacccacattcctgtagcatcagaggatgcattccttcccctggcaggttttcaacggccgtcgcctaccaatcgtgatgccagtgctggcgaatctcatattcgagataaatcaccgcaggcagtaacacagactacgaatagtaggcatgacaaaggtcggtacgaaaaggcggaccgggtccgggatcaacgccaagaaggatttggacgcgataataaatctggcaaaggaggtcgcggaaaacgctcgggaggccggcgcgatgaagatgattgggaaaaggaagatacgtatgacgattatctggagaagcgtcgagagagagaagagcgcaaagcccagcgggaagccgaacgaacatcacccaaaccgatcatgctgccagaacttatcggagtgacggctttggcaaatgctctgaagatcaaacctgatgatttcttagaacaactcggcgagctcggcttcgagggagtgtcgttggatagtctcatggcaggtgaaacagccgcgctcgttgcgcaggaatacgggtacgaaccgacggtagaggctggcgaaagccaagatctcaaaccgcttcctcctcccgaagacccctccgtgctcccttcgcgaccacctgtcgtgaccatcatgggtcacgtagatcacggcaagactactcttctcgattatctacgtcaatcgtctgtcgcggcacaggaacatggcggcatcactcagcacatcggtgctttctccgtgaagctctcatcggggaaaccgatcactttcctcgacacccccggccacgctgcgttcctcgagatgcgacagcgcggcgccaatgtcaccgatatcgtggttctcgtcgtggctgccgatgacagtgtcaagccgcaaactctagaggcccttaagcatgcccgtgcttccaaggttcctatcatcgtcgctattaccaaggtcgacaaggagggcgctcgcattgatgccgttaaggctgatctggctggagcgggtcttgagattgaagattttggcggtgatgttcaagtggtgtgtgtcagtggcaaaacaggcgagggcatggaagacctcgaagagaacattcttacactatctgaaatcctggatcatcgcgctgagactgacggtcaagccgaaggttggattctcgaaagcagcttgaagccttcgggcaaggtagccactgttctcgtcaagcgtggtactctcagaaccggcgaccatattgccgcgggtctcacatgggctaagatccgacatctgcgcaacgaagcaggtgtagaaatcaccgaagcaccgcctgggacgccagtcgagatattcggctggagagatctccccgccgcaggagagcaggtcatccaagctcccgatgaggacagggccaaaaaggcagtatcataccgtgagggtctagcagcacgcgaaaaagacgccacagaccacacggcgatctccgagtcgcgccgagctctcgaagcccagcgcgcccgcgaaaaggaagataatgccgagaaagcaggctggggcgccggcgtgcacgagaccctgcctgcagaagaaaacggcgccaagattgtaaacttcgtcgtgaaaggcgacgtccacggctccgtcgaagcagtaacggccgcaatccaagaactaggaaaccacgaggtgaaaccccgggttctgcgctccgcaacaggagccatcacggaatttgacatcgagcacgcggcagtgtcgaattctataatgttgaacttcgggactacgaccccgccacatgttcagcgcatggctgaggaacagaatgtgaagattctggaccatactattatttaccggttggtggatgaggtgaaagagaacatgagcaagtatctcgctcccacgctcaccacccgcgtcacgggtgatgcggaggtgctacagattttccctatcaatgttagagggaggaaatacaaaaatattgctggatgtagggtgagaaatgggctggttactaattcgggatcgttccggattttgaggaacggggcgactgtttttgatggaaaactagaaaccctaatgcaaggcaaaaaggaagcgacagagatccgcaagggcaacgagtgcggtctgggattcctcgatttccaggatttcaaggtaggggatcagatacaggcttatgaggaggttaagaccgccagacacttgtaa

SEQ ID NO: 27470 - protein, 1214 aa, Muscodor strobelii
  misc_feature: SGI Peptide ID NO. 569410
  misc_feature (874)..(937): Pfam Id: PF03144 Pfam Desc: Elongation factor Tu domain 2
  misc_feature (684)..(850): Pfam Id: PF00009 Pfam Desc: Elongation factor Tu GTP binding domain
  misc_feature (607)..(659): Pfam Id: PF04760 Pfam Desc: Translation initiation factor IF-2, N-terminal region
  misc_feature (687)..(797): Pfam Id: PF01926 Pfam Desc: GTPase of function
  misc_feature (580)..(1214): NCBI GI: 85094871 Blast Desc: NCU11301 [Neurospora crassa OR74A] gi|28921423|gb|EAA30729.1| conserved [Neurospora crassa OR74A]
  misc_feature (566)..(1214): NCBI GI: 145610863 Blast Desc: MGG_11482 [Magnaporthe grisea 70-15] gi|145018202|gb|EDK02481.1| MGG_11482 [Magnaporthe grisea 70-15]
  misc_feature (547)..(1214): NCBI GI: 261361204 Blast Desc: translation initiation factor IF-2 [Verticillium albo-atrum VaMs.102]
  misc_feature (558)..(1214): NCBI GI: 46123941 Blast Desc: FG06348.1 [Gibberella zeae PH-1]
  misc_feature (530)..(1214): NCBI GI: 256732905 Blast Desc: NECHADRAFT_99904 [Nectria haematococca mpVI 77-13-4]
  misc_feature (417)..(1214): NCBI GI: 156039195 Blast Desc: SS1G_11734 [Sclerotinia sclerotiorum 1980] gi|154697471|gb|EDN97209.1| SS1G_11734 [Sclerotinia sclerotiorum 1980]
  misc_feature (593)..(1214): NCBI GI: 171679411 Blast Desc: protein product [Podospora anserina] gi|170939331|emb|CAP64559.1| protein product [Podospora anserina]
  misc_feature (531)..(1214): NCBI GI: 116203703 Blast Desc: CHGG_09735 [Chaetomium globosum CBS 148.51] gi|88175863|gb|EAQ83331.1| CHGG_09735 [Chaetomium globosum CBS 148.51]
  misc_feature (593)..(1214): NCBI GI: 121702479 Blast Desc: mitochondrial translation initiation factor, [Aspergillus clavatus NRRL 1] gi|119397647|gb|EAW08078.1| mitochondrial translation initiation factor, [Aspergillus NRRL 1]
  misc_feature (556)..(1214): NCBI GI: 70991104 Blast Desc: mitochondrial translation initiation factor [Aspergillus fumigatus Af293] gi|66848033|gb|EAL88363.1| mitochondrial translation initiation factor, [Aspergillus Af293]
  misc_feature: Useful for introducing or modulating the production of volatile compounds
MLRGRFAKQQSNICTFCQYRLSQQRPPQRSRPFSSSPCSSNSDPPGLRPPSSAIPGAQSNDGWGVSSSPGLGRRPGLSATSSDSSGSWGATPMPSVRPPPKLPPKVAELEDGSKRAAGSFLPATPRAGGFGLRPRPLTAQEAPTAAETPRSEQAQYSVQKLRWMRDEEKLAHLDPAERRQILLKKMAASSKTRSHERNQFRVGGSRAAPNGMKPFQSESNSLIIERNEPGNNAEYGGSHSLHRDRMRAARHRHPDAPPAHYRTPQSLPSIGRSQQELGSDSTIKFHDSPKSYQDRLSQSNEIQNDQYFRRTAHNGPSKESLNEFPETLFQKSAARDLPKPPSDFQNRRRKIMPDEIYPSSLSNLAQESEFWSNGGQSRDSMKNPTPTPIPDTVQPFGAPAQRSRAPTPESSSSSEWGADFAQGPMARQRNPLQEWNQLSRIPKPSTATAENTAANATNSTEQWDKMMKSFGAEKKPTTTHIPVASEDAFLPLAGFQRPSPTNRDASAGESHIRDKSPQAVTQTTNSRHDKGRYEKADRVRDQRQEGFGRDNKSGKGGRGKRSGGRRDEDDWEKEDTYDDYLEKRREREERKAQREAERTSPKPIMLPELIGVTALANALKIKPDDFLEQLGELGFEGVSLDSLMAGETAALVAQEYGYEPTVEAGESQDLKPLPPPEDPSVLPSRPPVVTIMGHVDHGKTTLLDYLRQSSVAAQEHGGITQHIGAFSVKLSSGKPITFLDTPGHAAFLEMRQRGANVTDIVVLVVAADDSVKPQTLEALKHARASKVPIIVAITKVDKEGARIDAVKADLAGAGLEIEDFGGDVQVVCVSGKTGEGMEDLEENILTLSEILDHRAETDGQAEGWILESSLKPSGKVATVLVKRGTLRTGDHIAAGLTWAKIRHLRNEAGVEITEAPPGTPVEIFGWRDLPAAGEQVIQAPDEDRAKKAVSYREGLAAREKDATDHTAISESRRALEAQRAREKEDNAEKAGWGAGVHETLPAEENGAKIVNFVVKGDVHGSVEAVTAAIQELGNHEVKPRVLRSATGAITEFDIEHAAVSNSIMLNFGTTTPPHVQRMAEEQNVKILDHTIIYRLVDEVKENMSKYLAPTLTTRVTGDAEVLQIFPINVRGRKYKNIAGCRVRNGLVTNSGSFRILRNGATVFDGKLETLMQGKKEATEIRKGNECGLGFLDFQDFKVGDQIQAYEEVKTARHL

SEQ ID NO: 27471 - DNA, 4053 bp, Muscodor strobelii
  misc_feature: SGI EST ID NO. CUFF.64777.0
  misc_feature: Variant of the nucleotide sequence at SEQ ID NO 27469
tttttggagactgacgagagttgaacgagtgataagttgttatcatcaacagcgcaacctccgactcgagcaccacactcctttctcctacactcctttgcggctcgattattttatacacgcatggtgcgcattcttcggcaaggaatcactgcaggatgttgagagggaggttcgcaaagcagcagagcaacatttgcacattctgtcaataccgcctatcgcaacagcgtcctccgcagcgatctcgccctttctcatcgtcaccatgctcctcaaatagcgaccccccaggcctgcgaccccccagctctgccatacccggtgcccagagtaatgatggctggggcgtatcatccagcccggggttgggcagacggcccggtctgagtgcgacctcctccgacagcagtggcagctggggcgcaactcccatgccgtccgtccgtccgccgcccaagctgccgcccaaggtagcagagctcgaagatggttccaaacgcgctgccggctcctttctgcctgcaaccccgagagcaggagggttcggactacggccccgcccactcacggcccaagaagcaccgaccgctgctgagactcctcgctccgaacaagcacagtattccgtccagaagctcagatggatgagagacgaggagaaactcgcccatcttgaccccgctgagcgtcggcagatcttgctgaaaaagatggccgcttcttccaaaactcgctcacatgagcgcaaccaatttcgtgttggtggaagcagagctgccccaaatggcatgaagcctttccaatcagaatctaactcactgatcattgaacgtaatgaacctggcaataatgcggaatatggaggttcacactcgcttcatagagatcggatgagagcggcacggcatagacacccagatgcacccccagcccactacagaactccgcagtcattgccctcgattggtcgaagccagcaagagttgggatccgattccaccatcaaatttcacgatagtccaaagtcataccaggaccgtctttctcagagcaacgaaatacaaaatgaccagtatttcaggaggacagctcataacggaccaagcaaggaaagtctcaatgaatttcccgagaccctatttcaaaaatccgccgccagagatttgccgaagcccccgtccgactttcaaaatcgaagaagaaaaattatgccggatgagatttacccttctagtcttagtaatctggcacaagagtccgagttctggtccaacggcggccaatctcgagattccatgaaaaatccaaccccgacacccatcccagacacggttcaaccatttggcgctcccgctcaaagatcgagagctcctactccggagtccagctcttcctctgagtggggtgctgatttcgcacagggcccgatggccagacagcgcaatccgctgcaggaatggaatcaactctcgagaataccaaaaccatccaccgcgacggccgaaaataccgccgcaaatgcgaccaacagtaccgaacaatgggacaaaatgatgaagagcttcggagctgagaagaaacccacaaccacccacattcctgtagcatcagaggatgcattccttcccctggcaggttttcaacggccgtcgcctaccaatcgtgatgccagtgctggcgaatctcatattcgagataaatcaccgcaggcagtaacacagactacgaatagtaggcatgacaaaggtcggtacgaaaaggcggaccgggtccgggatcaacgccaagaaggatttggacgcgataataaatctggcaaaggaggtcgcggaaaacgctcgggaggccggcgcgatgaagatgattgggaaaaggaagatacgtatgacgattatctggagaagcgtcgagagagagaagagcgcaaagcccagcgggaagccgaacgaacatcacccaaaccgatcatgctgccagaacttatcggagtgacggctttggcaaatgctctgaagatcaaacctgatgatttcttagaacaactcggcgagctcggcttcgagggagtgtcgttggatagtctcatggcaggtgaaacagccgcgctcgttgcgcaggaatacgggtacgaaccgacggtagaggctggcgaaagccaagatctcaaaccgcttcctcctcccgaagacccctccgtgctcccttcgcgaccacctgtcgtgaccatcatgggtcacgtagatcacggcaagactactcttctcgattatctacgtcaatcgtctgtcgcggcacaggaacatggcggcatcactcagcacatcggtgctttctccgtgaagctctcatcggggaaaccgatcactttcctcgacacccccggccacgctgcgttcctcgagatgcgacagcgcggcgccaatgtcaccgatatcgtggttctcgtcgtggctgccgatgacagtgtcaagccgcaaactctagaggcccttaagcatgcccgtgcttccaaggttcctatcatcgtcgctattaccaaggtcgacaaggagggcgctcgcattgatgccgttaaggctgatctggctggagcgggtcttgagattgaagattttggcggtgatgttcaagtggtgtgtgtcagtggcaaaacaggcgagggcatggaagacctcgaagagaacattcttacactatctgaaatcctggatcatcgcgctgagactgacggtcaagccgaaggttggattctcgaaagcagcttgaagccttcgggcaaggtagccactgttctcgtcaagcgtggtactctcagaaccggcgaccatattgccgcgggtctcacatgggctaagatccgacatctgcgcaacgaagcaggtgtagaaatcaccgaagcaccgcctgggacgccagtcgagatattcggctggagagatctccccgccgcaggagagcaggtcatccaagctcccgatgaggacagggccaaaaaggcagtatcataccgtgagggtctagcagcacgcgaaaaagacgccacagaccacacggcgatctccgagtcgcgccgagctctcgaagcccagcgcgcccgcgaaaaggaagataatgccgagaaagcaggctggggcgccggcgtgcacgagaccctgcctgcagaagaaaacggcgccaagattgtaaacttcgtcgtgaaaggcgacgtccacggctccgtcgaagcagtaacggccgcaatccaagaactaggaaaccacgaggtgaaaccccgggttctgcgctccgcaacaggagccatcacggaatttgacatcgagcacgcggcagtgtcgaattctataatgttgaacttcgggactacgaccccgccacatgttcagcgcatggctgaggaacagaatgtgaagattctggaccatactattatttaccggttggtggatgaggtgaaagagaacatgagcaagtatctcgctcccacgctcaccacccgcgtcacgggtgatgcggaggtgctacagattttccctatcaatgttagagggaggaaatacaaaaatattgctggatgtagggtgagaaatgggctggttactaattcgggatcgttccggattttgaggaacggggcgactgtttttgatggaaaactagaaaccctaatgcaaggcaaaaaggaagcgacagagatccgcaagggcaacgagtgcggtctgggattcctcgatttccaggatttcaaggtaggggatcagatacaggcttatgaggaggttaagaccgccagacacttgtaacactctcgtacattatagagaagggagaagggaaaactgtacattagggtaaggattgtgagataggagtgtaagatactatgtatcagtataaggacgggtatataaagaaaggtcaaggtccttgcatatagatcgtagctatagatcatatactatacatacacatataccctcttggctcttaggacggagttagagggcctgagttgtattatatcttataagcaattccggtcatcaatacgct

SEQ ID NO: 27472 - DNA, 1950 bp, Muscodor strobelii
  misc_feature: SGI cDNA ID NO. 569411
  misc_feature: Encodes the peptide sequence at SEQ ID NO 27473
atggaggccgcatctgctcgtgcagccgcgagagatcgctggggcgagatgggcttcccacggccatcgcagctccagcgctttatcgcgagcgcatgcagccccgagaactatgagcctaacctggcgctcaacctcgagatctcggacctcatcaacagcaagaagggctcggccccgcgcgaagccgccgtctccattgtcaaccatgtcaactcgcgcaaccccaacgtcggcctgttggccctcaacctgctcgacatctgcgtcaagaactgcggctaccccttccacctgcagatcagcaccaaggagttcctcaacgagcttgtcagacgcttccccgagcggcccccgttccgctacacccgcgtccagtctaagatcctggaggccatagaggaatggcgaagcaccatctgcgagacgagccgctacaaggaggacctgggcttcatccgtgatatgcaccggctgctgagctacaagggctaccatttccccgaggtcaggaaggacgatgccgctgtcttgaaccccagcgacaatctgaaatccgccgaggagatggaagaggaggagaaggaagcccaatccgccaagctccaggagctcatccgtcgcggtgcgcccgaggatctgcaagaagccaaccgccttatgaagatcatggccggctacgacacgaggactaaaaccgactatcgtgccaaggccgcagaggaagtcggcaagatcctagccaaggctcgccttctcgaagagagactagcagctctacaaccgggagaggccgtgaccgacggagatgtcttcgaggaattggcctcttccctgcagagtgcgcaacccaagatccaaaagatgtgcgaggaagagtcggatgaccacgaagcagtcgccaagttgttcgaaatcaacgacagtatacaccgcactgtcgagaggtggaagctggtcaagaagggtgacgttgagggggcagaaaagctggcgcaaggagcccctttgcctacgccatccacgaattcaggaaaaggcaaagccccggctgcggcagccaacgagctctccctgatagatttcgacgcggacgcaagcgccaatggcacgacaaccgaagccgggtcctcatctcagacgggaggagtggaaaatgatctgttgggtttgtccttgggagacgacagtttcggacagggaggtggcatatccctcgggtttggggcaaattcaaatatcccagggcctgcgcttctgtcttccatgacacagaacagcactgcaaaagggccttcgccaacacccacgcctcctcctttctcttcctcgttctctgcattcgcctcaaaaccgtcagcatctcagtcaagcacgcctcagcccccgttaggtcaatactcagcgttcaaccaacctccggcgcaaacaagcgaccccttcgcggccctcgcatcaccgcaattttcatccaaatctaccacaccccaacctccagcacccgctcctgctccagccgctgcaaatgatgacgacgagtggtccttctcatcagctttaccggcagaagcaccatcactaccccagcaacacaacgccaccatcaaggagggcccattgcaaatcgctatggatgcccgcagggcacccctatctcccaacgctcttagcttagcattcgcattcaccaacacgactccacaaccaatagatcagatacattttcaactcgctgtgacgaaaggctacgagcttcaactccaaccgcaaacaggccgtgcattaaaaccgatggagcagaacggcgtgaggcaggcgatccaggtctggcatgcgggggataagtcgaggaaagtggacagcgcgaaattaaggtggagggttagctatacgcttgctggtgaggagaagcaggagacggggcaggtgccggagtttagcattgcgtag

SEQ ID NO: 27473 - protein, 649 aa, Muscodor strobelii
  misc_feature: SGI Peptide ID NO. 569411
  misc_feature (525)..(647): Pfam Id: PF02883 Pfam Desc: Adaptin C-terminal domain
  misc_feature (231)..(330): Pfam Id: PF03127 Pfam Desc: GAT domain
  misc_feature (20)..(164): Pfam Id: PF00790 Pfam Desc: VHS domain
  misc_feature (548)..(647): Pfam Id: PF02883 Pfam Desc: Adaptin C-terminal domain
  misc_feature (1)..(649): NCBI GI: 85094878 Blast Desc: NCU11302 [Neurospora crassa OR74A] gi|28921425|gb|EAA30731.1| NCU11302 [Neurospora crassa OR74A]
  misc_feature (1)..(649): NCBI GI: 256732904 Blast Desc: NECHADRAFT_68037 [Nectria haematococca mpVI 77-13-4]
  misc_feature (1)..(648): NCBI GI: 171679415 Blast Desc: protein product [Podospora anserina] gi|170939333|emb|CAP64561.1| protein product [Podospora anserina]
  misc_feature (1)..(649): NCBI GI: 145610871 Blast Desc: MGG_00852 [Magnaporthe grisea 70-15] gi|145018207|gb|EDK02486.1| MGG_00852 [Magnaporthe grisea 70-15]
  misc_feature (1)..(609): NCBI GI: 156039205 Blast Desc: conserved [Sclerotinia sclerotiorum 1980] gi|154697476|gb|EDN97214.1| conserved [Sclerotinia sclerotiorum 1980]
  misc_feature (17)..(627): NCBI GI: 154309999 Blast Desc: conserved [Botryotinia fuckeliana B05.10] gi|150851708|gb|EDN26901.1| conserved [Botryotinia fuckeliana B05.10]
  misc_feature (9)..(649): NCBI GI: 169769026 Blast Desc: [Aspergillus oryzae RIB40] gi|83766841|dbj|BAE56981.1| protein product [Aspergillus oryzae]
  misc_feature (9)..(649): NCBI GI: 226281870 Blast Desc: VHS domain-containing protein [Paracoccidioides brasiliensis Pb01]
  misc_feature (9)..(649): NCBI GI: 238501458 Blast Desc: VHS domain protein [Aspergillus flavus NRRL3357] gi|220692200|gb|EED48547.1| VHS domain protein [Aspergillus flavus NRRL3357]
  misc_feature (9)..(649): NCBI GI: 255942813 Blast Desc: Pc18g03360 [Penicillium chrysogenum Wisconsin 54-1255] gi|211586908|emb|CAP94560.1| Pc18g03360 [Penicillium chrysogenum Wisconsin 54-1255]
MEAASARAAARDRWGEMGFPRPSQLQRFIASACSPENYEPNLALNLEISDLINSKKGSAPREAAVSIVNHVNSRNPNVGLLALNLLDICVKNCGYPFHLQISTKEFLNELVRRFPERPPFRYTRVQSKILEAIEEWRSTICETSRYKEDLGFIRDMHRLLSYKGYHFPEVRKDDAAVLNPSDNLKSAEEMEEEEKEAQSAKLQELIRRGAPEDLQEANRLMKIMAGYDTRTKTDYRAKAAEEVGKILAKARLLEERLAALQPGEAVTDGDVFEELASSLQSAQPKIQKMCEEESDDHEAVAKLFEINDSIHRTVERWKLVKKGDVEGAEKLAQGAPLPTPSTNSGKGKAPAAAANELSLIDFDADASANGTTTEAGSSSQTGGVENDLLGLSLGDDSFGQGGGISLGFGANSNIPGPALLSSMTQNSTAKGPSPTPTPPPFSSSFSAFASKPSASQSSTPQPPLGQYSAFNQPPAQTSDPFAALASPQFSSKSTTPQPPAPAPAPAAANDDDEWSFSSALPAEAPSLPQQHNATIKEGPLQIAMDARRAPLSPNALSLAFAFTNTTPQPIDQIHFQLAVTKGYELQLQPQTGRALKPMEQNGVRQAIQVWHAGDKSRKVDSAKLRWRVSYTLAGEEKQETGQVPEFSIA

SEQ ID NO: 27474 - DNA, 2453 bp, Muscodor strobelii
  misc_feature: SGI EST ID NO. CUFF.64854.0
  misc_feature: Variant of the nucleotide sequence at SEQ ID NO 27472
cccaaatgccccctgaaggactgcacaagcccccctggcgccgccgcttcgcctcggaagcagtattgagtggtattgactatcgcaacaagcggccaaaggtgggatgcttcgagatgccgtgctccgacctagtagcttaagctgttgtactatctcccctttttttcttgcctgcctggccaaaacctacacgtatcatattgcgagtcaatcgcaaagtctggcagaggttgacagaggtagtcgatcaaattcctcctgtcttctatctggctagcgttgcgttcatacctgtaatatcccgcttggctaccaccaccactcactgtcaccgcctgccccggtatccgtcccggcctccactccttcacgatggaggccgcatctgctcgtgcagccgcgagagatcgctggggcgagatgggcttcccacggccatcgcagctccagcgctttatcgcgagcgcatgcagccccgagaactatgagcctaacctggcgctcaacctcgagatctcggacctcatcaacagcaagaagggctcggccccgcgcgaagccgccgtctccattgtcaaccatgtcaactcgcgcaaccccaacgtcggcctgttggccctcaacctgctcgacatctgcgtcaagaactgcggctaccccttccacctgcagatcagcaccaaggagttcctcaacgagcttgtcagacgcttccccgagcggcccccgttccgctacacccgcgtccagtctaagatcctggaggccatagaggaatggcgaagcaccatctgcgagacgagccgctacaaggaggacctgggcttcatccgtgatatgcaccggctgctgagctacaagggctaccatttccccgaggtcaggaaggacgatgccgctgtcttgaaccccagcgacaatctgaaatccgccgaggagatggaagaggaggagaaggaagcccaatccgccaagctccaggagctcatccgtcgcggtgcgcccgaggatctgcaagaagccaaccgccttatgaagatcatggccggctacgacacgaggactaaaaccgactatcgtgccaaggccgcagaggaagtcggcaagatcctagccaaggctcgccttctcgaagagagactagcagctctacaaccgggagaggccgtgaccgacggagatgtcttcgaggaattggcctcttccctgcagagtgcgcaacccaagatccaaaagatgtgcgaggaagagtcggatgaccacgaagcagtcgccaagttgttcgaaatcaacgacagtatacaccgcactgtcgagaggtggaagctggtcaagaagggtgacgttgagggggcagaaaagctggcgcaaggagcccctttgcctacgccatccacgaattcaggaaaaggcaaagccccggctgcggcagccaacgagctctccctgatagatttcgacgcggacgcaagcgccaatggcacgacaaccgaagccgggtcctcatctcagacgggaggagtggaaaatgatctgttgggtttgtccttgggagacgacagtttcggacagggaggtggcatatccctcgggtttggggcaaattcaaatatcccagggcctgcgcttctgtcttccatgacacagaacagcactgcaaaagggccttcgccaacacccacgcctcctcctttctcttcctcgttctctgcattcgcctcaaaaccgtcagcatctcagtcaagcacgcctcagcccccgttaggtcaatactcagcgttcaaccaacctccggcgcaaacaagcgaccccttcgcggccctcgcatcaccgcaattttcatccaaatctaccacaccccaacctccagcacccgctcctgctccagccgctgcaaatgatgacgacgagtggtccttctcatcagctttaccggcagaagcaccatcactaccccagcaacacaacgccaccatcaaggagggcccattgcaaatcgctatggatgcccgcagggcacccctatctcccaacgctcttagcttagcattcgcattcaccaacacgactccacaaccaatagatcagatacattttcaactcgctgtgacgaaaggctacgagcttcaactccaaccgcaaacaggccgtgcattaaaaccgatggagcagaacggcgtgaggcaggcgatccaggtctggcatgcgggggataagtcgaggaaagtggacagcgcgaaattaaggtggagggttagctatacgcttgctggtgaggagaagcaggagacggggcaggtgccggagtttagcattgcgtagaactgacgcgagatgtgatgtagagagttgaatgatatgatgaatagattccccgtgaaagcagatgatgcaatgccttgcgtaaatgcagtgctagattgctgtgatgtgattgcttttagtgcgag

SEQ ID NO: 27475 - DNA, 1245 bp, Muscodor strobelii
  misc_feature: SGI cDNA ID NO. 569412
  misc_feature: Encodes the peptide sequence at SEQ ID NO 27476
atggttcgccacaaaaaagacttccgtcgtggcggaggaaagcattcccagcgcggtggcggtcgtccgagacccacccgtgataacgaagatggtggtgaatctgcaggctccgataccgagcaggtccctttcaaggctgcctgctgggacttgaaccattgcgatcctaagagatgttccggcaagaagcttatccgacttggactcatgcgagacctgcatctcggccagcgtcacaatggtgtgatcataacccccaacggaaaacacaccttgtcgcctgccgacagcgagctaatggatcaatatggtgctgcggtggttgagtgttcatgggcacgcactcaagaagtccagtggagcaaggttggtggcaaatgtgagcgtctgctgccatatcttgtcgctgccaacaccgtcaactacgggaagccataccgcctgaactgcgtcgaggctttggctgcctctttctacatatgtggacatcctgactgggccgagcaagttctacgtcccttcaactacggcgaatcattcctcgccatcaactccaaacttctcaaaaagtatgctgcttgcaccgatgaggcttccatcaaggagtgtgaaaaggcatggcttgaacgcctcgagagggaacatgccgagagtagagaaaatgacgatggcgatcgatgggcgggtgggaacttgaaccgcagaacactagaagagtcagattccgacgaaggtgaagaggatgatgatggtagtgagaatggaaaggatggcaaagacgaggacaacgaaagcatagacggtatatatcttggcaagaagcctatacagtggcctaaacctggtgaaggcgtcggagaggcgagccaaacacaaaagccgaaggggccattcgacctaacagacgatgaggacgatgaggcagaaatggaagagatcaggcgaatggtcttgaagtcaaagccattcgccgaacccagcgatgcggacaagaaaccaaagccacaggccattcccccgtcgcaaccacagagatatcatgttgagtcggacatggagccggattccgataacggcgagtattctgacgctgaagccgacgacgcattcgataacatcatcgatgcaacgccgattaccgataggaccggattggcgaagctagagagagaaagggccagggccgccatcacgactaagacattcacggctggtggcgcctcagctcccaagaggtggtga

SEQ ID NO: 27476 - protein, 414 aa, Muscodor strobelii
  misc_feature: SGI Peptide ID NO. 569412
  misc_feature (83)..(210): Pfam Id: PF04034 Pfam Desc: Domain of function (DUF367)
  misc_feature (45)..(79): Pfam Id: PF04068 Pfam Desc: metal-binding domain in RNase L inhibitor, RLI
  misc_feature (1)..(414): NCBI GI: 116203705 Blast Desc: CHGG_09736 [Chaetomium globosum CBS 148.51] gi|88175864|gb|EAQ83332.1| CHGG_09736 [Chaetomium globosum CBS 148.51]
  misc_feature (1)..(411): NCBI GI: 46123943 Blast Desc: FG06349.1 [Gibberella zeae PH-1]
  misc_feature (45)..(413): NCBI GI: 256732453 Blast Desc: NECHADRAFT_16258 [Nectria haematococca mpVI 77-13-4]
  misc_feature (1)..(414): NCBI GI: 261361206 Blast Desc: DUF367 domain-containing protein [Verticillium albo-atrum VaMs.102]
  misc_feature (1)..(412): NCBI GI: 85094874 Blast Desc: NCU06104 [Neurospora crassa OR74A] gi|28921424|gb|EAA30730.1| conserved [Neurospora crassa OR74A]
  misc_feature (45)..(413): NCBI GI: 39974005 Blast Desc: MGG_00851 [Magnaporthe grisea 70-15] gi|145018208|gb|EDK02487.1| MGG_00851 [Magnaporthe grisea 70-15]
  misc_feature (1)..(414): NCBI GI: 171679413 Blast Desc: protein product [Podospora anserina] gi|170939332|emb|CAP64560.1| protein product [Podospora anserina]
  misc_feature (1)..(414): NCBI GI: 154310001 Blast Desc: BC1G_06921 [Botryotinia fuckeliana B05.10] gi|150851709|gb|EDN26902.1| BC1G_06921 [Botryotinia fuckeliana B05.10]
  misc_feature (1)..(414): NCBI GI: 156039203 Blast Desc: SS1G_11738 [Sclerotinia sclerotiorum 1980] gi|154697475|gb|EDN97213.1| SS1G_11738 [Sclerotinia sclerotiorum 1980]
  misc_feature (1)..(414): NCBI GI: 242766849 Blast Desc: RLI and DUF367 domain protein [Talaromyces stipitatus ATCC 10500] gi|218724448|gb|EED23865.1| RLI and DUF367 domain protein [Talaromyces stipitatus ATCC 10500]
MVRHKKDFRRGGGKHSQRGGGRPRPTRDNEDGGESAGSDTEQVPFKAACWDLNHCDPKRCSGKKLIRLGLMRDLHLGQRHNGVIITPNGKHTLSPADSELMDQYGAAVVECSWARTQEVQWSKVGGKCERLLPYLVAANTVNYGKPYRLNCVEALAASFYICGHPDWAEQVLRPFNYGESFLAINSKLLKKYAACTDEASIKECEKAWLERLEREHAESRENDDGDRWAGGNLNRRTLEESDSDEGEEDDDGSENGKDGKDEDNESIDGIYLGKKPIQWPKPGEGVGEASQTQKPKGPFDLTDDEDDEAEMEEIRRMVLKSKPFAEPSDADKKPKPQAIPPSQPQRYHVESDMEPDSDNGEYSDAEADDAFDNIIDATPITDRTGLAKLERERARAAITTKTFTAGGASAPKRW

SEQ ID NO: 27477 - DNA, 1718 bp, Muscodor strobelii
  misc_feature: SGI EST ID NO. CUFF.64856.0
  misc_feature: Variant of the nucleotide sequence at SEQ ID NO 27475
gggcacttatgtcattgctgcttatctgcataaacaccatcttgcgagcaccagagccattattgtcttctcgaggcagaccccgccagtccggcaccagactttctttgggagctgcggccatcacggaactgccccgcgatgttgaatcgtaaataaattattgatgcgcgcatcatcgttgctctgcaaagcttcaatcattctttgaactccgctcaatcgcgcaaatcacccaaatcggaccctaaaccattactcccagattttctcataccagacaccaaattgatcagacacaagctcagcatggttcgccacaaaaaagacttccgtcgtggcggaggaaagcattcccagcgcggtggcggtcgtccgagacccacccgtgataacgaagatggtggtgaatctgcaggctccgataccgagcaggtccctttcaaggctgcctgctgggacttgaaccattgcgatcctaagagatgttccggcaagaagcttatccgacttggactcatgcgagacctgcatctcggccagcgtcacaatggtgtgatcataacccccaacggaaaacacaccttgtcgcctgccgacagcgagctaatggatcaatatggtgctgcggtggttgagtgttcatgggcacgcactcaagaagtccagtggagcaaggttggtggcaaatgtgagcgtctgctgccatatcttgtcgctgccaacaccgtcaactacgggaagccataccgcctgaactgcgtcgaggctttggctgcctctttctacatatgtggacatcctgactgggccgagcaagttctacgtcccttcaactacggcgaatcattcctcgccatcaactccaaacttctcaaaaagtatgctgcttgcaccgatgaggcttccatcaaggagtgtgaaaaggcatggcttgaacgcctcgagagggaacatgccgagagtagagaaaatgacgatggcgatcgatgggcgggtgggaacttgaaccgcagaacactagaagagtcagattccgacgaaggtgaagaggatgatgatggtagtgagaatggaaaggatggcaaagacgaggacaacgaaagcatagacggtatatatcttggcaagaagcctatacagtggcctaaacctggtgaaggcgtcggagaggcgagccaaacacaaaagccgaaggggccattcgacctaacagacgatgaggacgatgaggcagaaatggaagagatcaggcgaatggtcttgaagtcaaagccattcgccgaacccagcgatgcggacaagaaaccaaagccacaggccattcccccgtcgcaaccacagagatatcatgttgagtcggacatggagccggattccgataacggcgagtattctgacgctgaagccgacgacgcattcgataacatcatcgatgcaacgccgattaccgataggaccggattggcgaagctagagagagaaagggccagggccgccatcacgactaagacattcacggctggtggcgcctcagctcccaagaggtggtgaataaatcacttctgttgacccaatcccttacgttcgtttgcgaaatcgttctgaagtatatctgcgcgtactaatgccgttgttgattaaggtgagcacaaccccctggcgtagaaaaattcacatgttgaggccaaatatcctgaatataagatatatgttcg

SEQ ID NO: 27478 - DNA, 1086 bp, Muscodor strobelii
  misc_feature: SGI cDNA ID NO. 569413
  misc_feature: Encodes the peptide sequence at SEQ ID NO 27479
atgtctcaaatcccttcgacgcaaacagcagctacggttcccaaacttggcggtggtgtgaaattcgttcacgactatcctgtcccaaagccaggccacaacgaagttctggcaaaggttctctatagcggagtatgccagagtgatctacacacgcaagctggaacagccgccggaccagacggctcgcccataactgccatcaaactcccacacgtgggcgggcacgaaggcgtagggcgcatcatcgcccttggaccaggtgttgacgacgatattaagctcggtacgttcgtgggtataagattcgcgtcgcgaatctgtcgacgatgcgagttctgtcttgcgggcaaggaacagcactgtatcaagagcacgaatcatctgcatcacgaagatgggagctttcaggagtatatcgcgctggatgcgggttatttgactattctgcctgacgatatcgaccctgctgcgattggccctgtgctttgtgctgggttgactacttataaggctgtgaagaatgccaatgtaaaggcgggcgatactgtcgtcgtcgtcggtgctggtggcggtttaggtcatctcgctgtccaatacgctcgcgcccaaggcgcaatagtaatcggcgtagacggcggcgcagccaaaggcgacttcatcaagtctatcggcgcgactgaatatcttgatttcacgcaagagcctgatctcacgaacagagtcatagagctgacgaatggtggtgcgaatgttgttatcgtcacggcagctagtgtcaaggctttttctcaggctgctgatatgctgaaagttggtggtactttgagctgtgttgggatcccgcctgaaaaggggtacttgcagacgcctattagtgctatcgtgatcaagggcctgcacatcacgggcaatcttgttggctcgctcaaggaatgcctggaagcagtagatttggttcggaggggagtcgtgaaacctaagattactattcgtccttttgaggatttgcctgctatctatgatgagttggagaagggagagatttctggccgtattgttttgaagattgcgaaagatgagtag

SEQ ID NO: 27479 - protein, 361 aa, Muscodor strobelii
  misc_feature: SGI Peptide ID NO. 569413
  misc_feature (33)..(150): Pfam Id: PF08240 Pfam Desc: Alcohol dehydrogenase GroES-like domain
  misc_feature (180)..(322): Pfam Id: PF00107 Pfam Desc: Zinc-binding dehydrogenase
  misc_feature (3)..(359): NCBI GI: 255932655 Blast Desc: Pc12g10630 [Penicillium chrysogenum Wisconsin 54-1255] gi|211582503|emb|CAP80690.1| Pc12g10630 [Penicillium chrysogenum Wisconsin 54-1255]
  misc_feature (4)..(359): NCBI GI: 169769999 Blast Desc: [Aspergillus oryzae RIB40] gi|83767328|dbj|BAE57467.1| protein product [Aspergillus oryzae]
  misc_feature (3)..(359): NCBI GI: 159129000 Blast Desc: alcohol dehydrogenase, [Aspergillus fumigatus A1163]
  misc_feature (4)..(359): NCBI GI: 242764252 Blast Desc: alcohol dehydrogenase, [Talaromyces stipitatus ATCC 10500] gi|218723928|gb|EED23345.1| alcohol dehydrogenase, [Talaromyces stipitatus ATCC 10500]
  misc_feature (3)..(359): NCBI GI: 145243796 Blast Desc: An11g04150 [Aspergillus niger] gi|134079092|emb|CAK40647.1| protein product [Aspergillus niger]
  misc_feature (3)..(359): NCBI GI: 70989483 Blast Desc: alcohol dehydrogenase [Aspergillus fumigatus Af293] gi|66847222|gb|EAL87553.1| alcohol dehydrogenase, [Aspergillus fumigatus Af293]
  misc_feature (6)..(359): NCBI GI: 115399264 Blast Desc: conserved [Aspergillus terreus NIH2624] gi|114192104|gb|EAU33804.1| conserved [Aspergillus terreus NIH2624]
  misc_feature (3)..(329): NCBI GI: 119480115 Blast Desc: alcohol dehydrogenase [Neosartorya fischeri NRRL 181] gi|119408240|gb|EAW18189.1| alcohol dehydrogenase [Neosartorya fischeri NRRL 181]
  misc_feature (1)..(269): NCBI GI: 67523209 Blast Desc: AN2061.2 [Aspergillus nidulans FGSC A4] gi|40745737|gb|EAA64893.1| AN2061.2 [Aspergillus nidulans FGSC A4] gi|259487429|tpe|CBF86100.1| TPA: alcohol dehydrogenase, FGSC
  misc_feature (4)..(210): NCBI GI: 238487660 Blast Desc: alcohol dehydrogenase, [Aspergillus flavus NRRL3357] gi|220699947|gb|EED56286.1| alcohol dehydrogenase, [Aspergillus flavus NRRL3357]
  misc_feature (3)..(355): SWISSPROT Homolog: EC 1.1.1.1 Alcohol dehydrogenase
MSQIPSTQTAATVPKLGGGVKFVHDYPVPKPGHNEVLAKVLYSGVCQSDLHTQAGTAAGPDGSPITAIKLPHVGGHEGVGRIIALGPGVDDDIKLGTFVGIRFASRICRRCEFCLAGKEQHCIKSTNHLHHEDGSFQEYIALDAGYLTILPDDIDPAAIGPVLCAGLTTYKAVKNANVKAGDTVVVVGAGGGLGHLAVQYARAQGAIVIGVDGGAAKGDFIKSIGATEYLDFTQEPDLTNRVIELTNGGANVVIVTAASVKAFSQAADMLKVGGTLSCVGIPPEKGYLQTPISAIVIKGLHITGNLVGSLKECLEAVDLVRRGVVKPKITIRPFEDLPAIYDELEKGEISGRIVLKIAKDE

SEQ ID NO: 27480 - DNA, 2185 bp, Muscodor strobelii
  misc_feature: SGI EST ID NO. CUFF.64780.0
  misc_feature: Variant of the nucleotide sequence at SEQ ID NO 27478
gcgcatacacggtggtcctgatggtgatactaagccgtggactgattcataccccacatgtctgatctatatatgcagcagctactacattgcagctcctacccctgctatagcttggttgaagctgaacctcgcatcataacgacatgcatacctcgctactatactaccacctagaaagcatgaagcttgctcgtgaccaacggatcctttcaacccagcttgttctgacccccacctccgatgaaggagatcttccgtggcatggcaccctatctcgttgtcacattatgcccttgtcttgaattcggagcgactatatatggaaccaaatctatggatcttcattcggagagcttgaagcatcgtacaccaacacttcgcagcacttaacactagcgcccgcaatggaactttgggggtcaagattacccagttcgccgctttacaagtgaccggaattgtcactggcttgtttcgaagctaaaatatgcagtagcttggtcgaatgtggggaaccccgacagaaaccgtaatcatcgtgactttttctaatgcatcatccttctaccggaagctatatccctacaagaacccccatgaccctgcatgatgcgaggatctagcttctacgaagaagccttccaagcttttgttatctcattgaaatcggctccagaatggaagaattttgtttagcaggtgtacacctgcattaatgagctgccaaaagaaagtcttagtcttcggagaccaccagcccgcagatctagaatcaaactataatcggcattccgggtatgcggggaaccaagtcgagagagagcatcgtgacccggggccgggaggactcgattgcatagcatcccaagcagtggcacgaagtgttgtagatgagataaaagtaagagatggggggtagcaagtcgtagctgtggtaggggtctaggagctttctctttgtcatataaatcatgggatgcgatcatgaggaggtggcgtttcatatgcttctttcaacaacatctcataaaccttcactccgaatatgtctcaaatcccttcgacgcaaacagcagctacggttcccaaacttggcggtggtgtgaaattcgttcacgactatcctgtcccaaagccaggccacaacgaagttctggcaaaggttctctatagcggagtatgccagagtgatctacacacgcaagctggaacagccgccggaccagacggctcgcccataactgccatcaaactcccacacgtgggcgggcacgaaggcgtagggcgcatcatcgcccttggaccaggtgttgacgacgatattaagctcggtacgttcgtgggtataagattcgcgtcgcgaatctgtcgacgatgcgagttctgtcttgcgggcaaggaacagcactgtatcaagagcacgaatcatctgcatcacgaagatgggagctttcaggagtatatcgcgctggatgcgggttatttgactattctgcctgacgatatcgaccctgctgcgattggccctgtgctttgtgctgggttgactacttataaggctgtgaagaatgccaatgtaaaggcgggcgatactgtcgtcgtcgtcggtgctggtggcggtttaggtcatctcgctgtccaatacgctcgcgcccaaggcgcaatagtaatcggcgtagacggcggcgcagccaaaggcgacttcatcaagtctatcggcgcgactgaatatcttgatttcacgcaagagcctgatctcacgaacagagtcatagagctgacgaatggtggtgcgaatgttgttatcgtcacggcagctagtgtcaaggctttttctcaggctgctgatatgctgaaagttggtggtactttgagctgtgttgggatcccgcctgaaaaggggtacttgcagacgcctattagtgctatcgtgatcaagggcctgcacatcacgggcaatcttgttggctcgctcaaggaatgcctggaagcagtagatttggttcggaggggagtcgtgaaacctaagattactattcgtccttttgaggatttgcctgctatctatgatgagttggagaagggagagatttctggccgtattgttttgaagattgcgaaagatgagtagaatgcgagggtatgctggctaggatataataatacgaagatgatctccaag

SEQ ID NO: 27481 - DNA, 4449 bp, Muscodor strobelii
  misc_feature: SGI cDNA ID NO. 569414
  misc_feature: Encodes the peptide sequence at SEQ ID NO 27482
atgcgtctcgaggccctcgtgggcttcctcggggccactggtctcgtaggcctatcttcggcccagcaatatggcggctcaccaagcacctcaccaggcggatctggatctaatcctggctcaggcccaggtaccggatctcctggttctggtccgggcagcggatctcctggctctaatccaggaagcggatctggccctggatctggttcgggacccggaagcggatctggtcttacatgccctttcgctcagcccaccaccgtctttgtgactgtcactcctgctgttgttcccactgtcgtttctgtcatctccacaatcaccgttgccgctccctcactctcaggtggtaaccctggccagggtggcactggatctgcacctcccggttcatcatatcttccctctggtaatggtccccagtctggagccccaggtggcatctccactgtcagcgttcctggtcctgcttctcagagtaataatgcaccttggtcaaccgatttccttactcttactctacctccggcacccggtcaggcaacttcaaacattgtcacatacactctcgtctccccactgggctccaaatcttcaggatacaactcaggcacccagcaaccaacatctggcgttgccactgtcccaggcgaaggtggttctaatggtccgactggcccaagcaatccatcatctctgcccactggcccctctggcccctctggccctaatggtccgtccggcccaaccggccctcctgtggctatctcaacagtgacagttccaggtggtgccccttcttctcttatctcttccactctgaccatcgccactgtccccaactctggtccctcgggaaatccaaacaacccaggcaacaaccctactggcactgatgctcccgcatacacccttactgtcaccagtggtgcttatggcggagccagtcctaccggccctggtgggcaaggcggagcatcaccaactctttctggacctgccggcctttcctcaccgtttgagagccagaacccttggagcccactcagtgtttcgtattcacccacaggaagttccgttggtcccaatggaggttcgggaggaggtcaaccattaccaactctcactatcactcttcccggcggatttccaactgggtctaatggtggtgctggcgagagcacgtcgccacaagcaatcactttgaccgtcccccagcaatctggtcctgaacaatccggtcttcctggtgctggatccgagactggtggtccagtgcctggtactttgacgctcactgtcccccaaggaggttcatctgccggcccgcaaggacctggaggcagctcacctctgcctacactcacagtcactttgcctggtcaatcgactcctgcaaatggtggcgagcccaccggaaatggaccacttccaaccgtcactatgactactcctgggccatctgcgactggtggtgaccaaggatcagagaccacgccatgccagaccttcactatcacagtcccggtaggctctcccaatggcggtggtggtgcaggttcagcaggaaaccagccacttcaaaccttcaccatcacagttcctttcgagtctcccaatggcagcggcggtgcaggcccagggccgcttcaaactctcactgtcacagttccatccggtaatggtccatcaggcaatggtccatcaggcaatggtccatcaagcaatagtccatctggtactgggcctttgggatcgcccaacggttcaggtggaagcacggacttaggtgcatctcagccacttcagactctcacccttacagttcctttgggcaatggtccatcaggtaacggtccatccgcgactggtccctcaggtagtggtctctcaggcacaggtccatttggtactaacccatcagccactggcccttcaggcaccggtccctcaggtggaagcacggattcaggtgcctctcagccacctcaaactgtcaccgtcacagttccttcaggtaatggtccttcgggcgctggtacgtcaggcagcggcccctcgggtaatggtccttctgcaactgattcctggggcaacaacccatctggcactggttcatcaggtaatggtccttcgggatctcccaatggtggaggtgaaagtacgagcccagctgcatctcagctaccccagactgtcaccattacagcacccgcatcttcaggcaacaatggcggatctggcagccaaaccgcaccccagacggtcacagtcaccgctccaggaggatcaccgagcaactctcccggtacaggcccagaaggcacttcgtcatgcgaagaaggcgagtcacccacaggaggtcctggctctccttcatccggatcttcgtcacctcagtcctctggtggtaattcaccatcatctggtccctggtcacctcagtctggtggttcctccccatcatctggtccttcatcgccccaatcgcctgacgggtcctctccatcatctggcccctggtcccctcagtctgccggcggtcagaatcctcagtctggcagtccttctaatggtgctggaactccttcacagtcaggcggtgacaatgagccactcaccatcacattcacagccactggaacttcaccaagcaacactggaggtccaggctcgggtccaggctccggttcaggctctggttcaggcccccaaggtacttcctcgtgcgatgaaagtgagtctggcccgcagaatactggtaacccaggcggtcaaagtggcgaaccatccggtagtccctggactccccaatccgccggcggccaaggtgatcagtcaggttctccatctaccggttctggttccagtcctcagcaaacatcatccgactcaggaggctcgccttttcctatcgtcacactgaccctgtctgacctgagtttccaaccgagtgcgactggcaacgcaggtcctacgcagaccagctctggatctccgactagcgggtcaggaccaaatggatctggaagcaactcttctcccggatcttctggaccctctacatctggcccagcatccgattccaccccaagcggcgcgtacggggcgccagctccttccttttctgtcagtgagtcgactattggtcccgagtcatctggtaatgccggaccagccaccaatgctggaccaacctcgactcccacttcatcgtcttccgatccttcggactctggttcttcacgaggcccattctcgtctctccctagcagtggttggaatttctctacgtctgcctctcagcaagcacctgcagctactaccacaccggatgcagactcaggttcgagcgagacatcttcatgcactgacacgacgaacaagcctggtgcatcgatctcgactcccgtgcctccctctgtatctccaccgtctacagactgttcgtcgatgtcgactctcgtaatctcaacgttgacattttcctggtgtgctgaccttgcaccttcggcaaccaccgggtcaagcacccagccagaaaccgggccaaaaaccggaagcaacactggtggctcttcatctcctccatcttcagccccaggtggctacgagttcggcacagctcaacaagaggagagagctgctcctactgccgagccttctctgccttcaaccttcgccactgttgttgttcgttccagctcgagccaggacgtcactacagagagctcaaccacagttcccgacgaatactgtggcggagcagcagatcacggagagttcacctttcattatgatgacttcccaatttcgactacctctgaggccgaggatgatgacgttcagtcagggccaatttccactccatatcatcgcttctggtattcgaatggatttgacgtcgtttccggtgccgatttgtattcaccctcgtcaggcaatcaaatgatccggttcacccctccttacaattccaacagctcggctgatatggcttccaacactgcaagcattgacgttggtcctcagaaactcggccactgtttcgcctttgacttcctcggcattagtcttggctgcgattctacctatgcaccctgtgctttcactttcacaggcctgaactccaacccaggtgaggctgagacggcagttgtatcgatgaacgtcaatatcccagcttgttctaccgggaagtgtgcactgacccctgtcaacgtctctaacttcaatggagtgacggcggtccatgtcacactcaaagtgaatggcgaagatagaacttggtgggcggatgatcttgtacttggctggacccaggatgattgcgatatcggtgcgtgccgcgcccgtattccgaacacagtcaccgaggagacttggactggcactgttcgccaagtcgctggcaaattggccaccctgttgggtttccgtggatga

SEQ ID NO: 27482 - protein, 1482 aa, Muscodor strobelii
  misc_feature: SGI Peptide ID NO. 569414
  misc_feature (1245)..(1482): NCBI GI: 261358926 Blast Desc: conserved [Verticillium albo-atrum VaMs.102]
  misc_feature (1206)..(1457): NCBI GI: 85079824 Blast Desc: NCU05054 [Neurospora crassa OR74A] gi|28917492|gb|EAA27192.1| NCU05054 [Neurospora crassa OR74A]
  misc_feature (1234)..(1458): NCBI GI: 171680572 Blast Desc: protein product [Podospora anserina] gi|170939913|emb|CAP65139.1| protein product [Podospora anserina]
  misc_feature (1278)..(1469): NCBI GI: 46127113 Blast Desc: FG07934.1 [Gibberella zeae PH-1]
MRLEALVGFLGATGLVGLSSAQQYGGSPSTSPGGSGSNPGSGPGTGSPGSGPGSGSPGSNPGSGSGPGSGSGPGSGSGLTCPFAQPTTVFVTVTPAVVPTVVSVISTITVAAPSLSGGNPGQGGTGSAPPGSSYLPSGNGPQSGAPGGISTVSVPGPASQSNNAPWSTDFLTLTLPPAPGQATSNIVTYTLVSPLGSKSSGYNSGTQQPTSGVATVPGEGGSNGPTGPSNPSSLPTGPSGPSGPNGPSGPTGPPVAISTVTVPGGAPSSLISSTLTIATVPNSGPSGNPNNPGNNPTGTDAPAYTLTVTSGAYGGASPTGPGGQGGASPTLSGPAGLSSPFESQNPWSPLSVSYSPTGSSVGPNGGSGGGQPLPTLTITLPGGFPTGSNGGAGESTSPQAITLTVPQQSGPEQSGLPGAGSETGGPVPGTLTLTVPQGGSSAGPQGPGGSSPLPTLTVTLPGQSTPANGGEPTGNGPLPTVTMTTPGPSATGGDQGSETTPCQTFTITVPVGSPNGGGGAGSAGNQPLQTFTITVPFESPNGSGGAGPGPLQTLTVTVPSGNGPSGNGPSGNGPSSNSPSGTGPLGSPNGSGGSTDLGASQPLQTLTLTVPLGNGPSGNGPSATGPSGSGLSGTGPFGTNPSATGPSGTGPSGGSTDSGASQPPQTVTVTVPSGNGPSGAGTSGSGPSGNGPSATDSWGNNPSGTGSSGNGPSGSPNGGGESTSPAASQLPQTVTITAPASSGNNGGSGSQTAPQTVTVTAPGGSPSNSPGTGPEGTSSCEEGESPTGGPGSPSSGSSSPQSSGGNSPSSGPWSPQSGGSSPSSGPSSPQSPDGSSPSSGPWSPQSAGGQNPQSGSPSNGAGTPSQSGGDNEPLTITFTATGTSPSNTGGPGSGPGSGSGSGSGPQGTSSCDESESGPQNTGNPGGQSGEPSGSPWTPQSAGGQGDQSGSPSTGSGSSPQQTSSDSGGSPFPIVTLTLSDLSFQPSATGNAGPTQTSSGSPTSGSGPNGSGSNSSPGSSGPSTSGPASDSTPSGAYGAPAPSFSVSESTIGPESSGNAGPATNAGPTSTPTSSSSDPSDSGSSRGPFSSLPSSGWNFSTSASQQAPAATTTPDADSGSSETSSCTDTTNKPGASISTPVPPSVSPPSTDCSSMSTLVISTLTFSWCADLAPSATTGSSTQPETGPKTGSNTGGSSSPPSSAPGGYEFGTAQQEERAAPTAEPSLPSTFATVVVRSSSSQDVTTESSTTVPDEYCGGAADHGEFTFHYDDFPISTTSEAEDDDVQSGPISTPYHRFWYSNGFDVVSGADLYSPSSGNQMIRFTPPYNSNSSADMASNTASIDVGPQKLGHCFAFDFLGISLGCDSTYAPCAFTFTGLNSNPGEAETAVVSMNVNIPACSTGKCALTPVNVSNFNGVTAVHVTLKVNGEDRTWWADDLVLGWTQDDCDIGACRARIPNTVTEETWTGTVRQVAGKLATLLGFRG

SEQ ID NO: 27483 - DNA, 888 bp, Muscodor strobelii
  misc_feature: SGI cDNA ID NO. 569415
  misc_feature: Elevated expression when VOC is produced
  misc_feature: Encodes the peptide sequence at SEQ ID NO 27484
atggcttccgacgtacgaacacctcttctccctatacgcgctctcgaggggccgtattcttacatttctcgagggttaattgcagcctcttaccctcttcgcggcatctactacttcctacatcatcccgccttttatcctctgttcctcagccgattgctccctctgtccctcatctccgtccttgtgtattttattctcttcacctttacattcctgcctcagtttgcctttttggctatctttcacggtcgggcggcatggttcaatgcagtcgtgctggtacttggagaaggactggtcatcatccagggcctattcgagggtttctttgtcgatgaatgtcgcgttgatgtctttgatgccacactcattcaggaagactgcgaaaacctcgttgcatggcatcggcttctgcaaccagatgaacccaatccggtgaagaagcttggaaagccaacaagcgctgcagtctatcaaccatggagtctcattcaaattgttgagctcatcttctttctgccactcaatcttatcccatacgtgggtacaccagccttcattatcatcaccggtgcaagattgggaacttttgcgcattatcgctggttcgaattgcgcggcttgaataaaaaggagcgaaagcaagctattcggggtcgacgttgggagtacacatggtttgggacctgtgccatgatactggagttaatacccatcttgtcatttttctttctccttacttcgactgcgggttctgcgatgtgggctgctaaattagagaagcttgcacgtgcaatgcctgaggcccctacgcaacctatagagcatggtcctgagcatggcgatgttgaccctccacctccttacgtggacaatcctgtatag

SEQ ID NO: 27484 - protein, 295 aa, Muscodor strobelii
  misc_feature: SGI Peptide ID NO. 569415
  misc_feature (22)..(295): NCBI GI: 261358927 Blast Desc: conserved [Verticillium albo-atrum VaMs.102]
  misc_feature (13)..(295): NCBI GI: 256721854 Blast Desc: NECHADRAFT_54512 [Nectria haematococca mpVI 77-13-4]
  misc_feature (3)..(295): NCBI GI: 116178908 Blast Desc: CHGG_00082 [Chaetomium globosum CBS 148.51] gi|88184379|gb|EAQ91847.1| CHGG_00082 [Chaetomium globosum CBS 148.51]
  misc_feature (22)..(295): NCBI GI: 171680576 Blast Desc: protein product [Podospora anserina] gi|170939915|emb|CAP65141.1| protein product [Podospora anserina]
  misc_feature (12)..(295): NCBI GI: 85079820 Blast Desc: NCU05053 [Neurospora crassa OR74A] gi|28917491|gb|EAA27191.1| conserved [Neurospora crassa OR74A]
  misc_feature (24)..(295): NCBI GI: 156050645 Blast Desc: SS1G_07910 [Sclerotinia sclerotiorum 1980] gi|154692310|gb|EDN92048.1| SS1G_07910 [Sclerotinia sclerotiorum 1980]
  misc_feature (16)..(208): NCBI GI: 145616242 Blast Desc: MGG_03464 [Magnaporthe grisea 70-15] gi|145009987|gb|EDJ94643.1| MGG_03464 [Magnaporthe grisea 70-15]
  misc_feature (68)..(284): NCBI GI: 46127111 Blast Desc: FG07933.1 [Gibberella zeae PH-1]
  misc_feature (31)..(269): NCBI GI: 225679017 Blast Desc: conserved [Paracoccidioides brasiliensis Pb03] gi|226288067|gb|EEH43580.1| conserved [Paracoccidioides brasiliensis Pb18]
  misc_feature (31)..(269): NCBI GI: 226281895 Blast Desc: conserved [Paracoccidioides brasiliensis Pb01]
  misc_feature: Useful for introducing or modulating the production of volatile compounds
MASDVRTPLLPIRALEGPYSYISRGLIAASYPLRGIYYFLHHPAFYPLFLSRLLPLSLISVLVYFILFTFTFLPQFAFLAIFHGRAAWFNAVVLVLGEGLVIIQGLFEGFFVDECRVDVFDATLIQEDCENLVAWHRLLQPDEPNPVKKLGKPTSAAVYQPWSLIQIVELIFFLPLNLIPYVGTPAFIIITGARLGTFAHYRWFELRGLNKKERKQAIRGRRWEYTWFGTCAMILELIPILSFFFLLTSTAGSAMWAAKLEKLARAMPEAPTQPIEHGPEHGDVDPPPPYVDNPV

SEQ ID NO: 27485 - DNA, 3942 bp, Muscodor strobelii
  misc_feature: SGI EST ID NO. CUFF.64823.0
  misc_feature: Variant of the nucleotide sequence at SEQ ID NO 27483
cgcgtcaaccgcgttaggcatcgcctcctcgggtggcagaacgaggttttgcttgcgcaagacgcctgcccgcaatcatcctggccaaaggcttgatccactggtggaccagagtgccaccatccagacggacattcgctaaggcaccttgtcaagtcaacagccaggtccaatcaactccgaattgatcttcattcatgtcgctgcatgtgtgttcgtgtctttgctcgctgtcccgtcccttttgctgtgaatacagcttcattctgtgactgcctcggtatacgaacgcgccttcgagtgggattgcggcgatgatcgtggcgcgtcaattcccaggatcctgaccgacctatttcccctcaatgtcttagtcccagagtgctcttcgagtccgccattatcctgagtcaggcgacaacgcgtcacaaagagaacaacacaaggtcccattgacctcgattacagacgttgacttgccacacacagagactccgattagttgtgcattctcgagcgccgcaccctcgacattcggaagtgttgggggccgagacgcgatccggacaccgttgtcgcatagacgcgacgtcaacgctccggacctgatcagcactcgtgtcttataccagcagccatgccagacatgtcgcagctggcccacctctcagatgcgccgcatggctacgtctcatcttcccagtcgcaacctccatctagcagccagagactaccatacaacgactcgagcaacgattcccaagccacaacatctaccgcgaatgatgcagaccgtgtcttcacaccccctgagagcgacagcgaaggcagtcttcagcatgggaacggcaatgcttctagtcaggagtcccagctcatgcagctctccaatctggccgcccagcagcagaagatggccatatctcaggacgatatggaagtcaatggggggtcttcaaggaagaggatggcggacggtctcgtgaaacacacgcgccataactccagcacatcgcccatacggttagggcattcaaggaacacaagcactgtcagtgtcgcatcgacaacaggcagtcgcatcagcgagctgtccgccgagttgaaagctaaattatcctatgctatggtcaaagtaaatcacgggtggcaaagccattccatagacgaagtcgaatcactagcatcccaagcggcctcgcccacctctagcacgtcgaccttgcatgggaggcatggctcatctgcaagtccacggatgccattttctgggtttcgtcaagccgcgtcgaatccttccagtactgctactagccctgcagtgcagcagccgcccggtcgtatctacgaatctttctggagggacgccgctttcagagctcccaacgcgacgacatcgcctgtcattcaagggccgtcgttggcgcctcctgcgtccatccaaccacggcagccaatgcataataatcctcgtcgcaattccaatgccagatatacacccgcatacctatcccattcacatcatgcttcacctcatactccagctcaaccaagtccgctgcaaggcactcccaacctgtcgcataccccgaatgttgatccaatactcttttctccaccccagaatcttcgcgagcaggaggctttggaaacattgctgttcatgagcagcccaggtaactcggccaacctcaaacatacatttcctacgtcgcacgtgtcgcaaccgcgaagtactacgagaacagctcttcctacatcgcggcttaatcaaataagcgacgtccatagtccagggcgaaagcatatggcagctgggcggtcgcaggtccaccaacagacgaagcgcgtagagtttgagagaggaacgaaccaatacggcgagatagttgttgatgaacactatgggtcgccgagaggtatgccgcgtcggaaaacaatcagtggccatgcgccacggccctcactttcgcttcctgccggactcagcggaccaacgcgaccacggcctacattgcaagatgacgacattcagcgcatgatcgaccgggcggctgcagatgatagctcagattccgatggagagattcaactacctacaagcagtcgtcggaacggtgcaggcgttggcgtctgacagtgtgacaccgaaccacagacatttggaactccatatacatgtcaggttattcccatatttgtcgactagccacagtctcagctgcctgtcttcgttagttggcttctgaaaaacagcgtgctcctacatttacgatcatgaagcattgagaacggtttggtgtaacagcattggtggttgccatgattttaaggagcattgggcgcggtatatcaaggatcatgatcgaaatttgaaacgaagatagtgctaggtatatggcactattgccaatacagatttctagcgaccaggctgattcagtgccggcgactcacatctcgatgacgtgttatagctgattcgataatatcattagagtgtgaccaagtacagtgaatgatcaagtgcatagtgaaagcctgcgagttaaagattacgcgggtggcccaacttcacatcgacaagcgatgttatttctatcattacaactgtctgcggaacagtgatacggtcctcaagaatgcccaaatcgcagctggtttccagctgccaggtgactggttcggcggccaagctcgcccagtttctgtgctgtcagcagtagagcacatgccattccgtgggatgccaccacaactacaactcaggtggagccaatacttggccagtgttaggctacagcaatcaattgataccagcatctgccctacctgcctcttgtcagagcacccattcttgcaaggacaaaaaagacaatgagatggcttccgacgtacgaacacctcttctccctatacgcgctctcgaggggccgtattcttacatttctcgagggttaattgcagcctcttaccctcttcgcggcatctactacttcctacatcatcccgccttttatcctctgttcctcagccgattgctccctctgtccctcatctccgtccttgtgtattttattctcttcacctttacattcctgcctcagtttgcctttttggctatctttcacggtcgggcggcatggttcaatgcagtcgtgctggtacttggagaaggactggtcatcatccagggcctattcgagggtttctttgtcgatgaatgtcgcgttgatgtctttgatgccacactcattcaggaagactgcgaaaacctcgttgcatggcatcggcttctgcaaccagatgaacccaatccggtgaagaagcttggaaagccaacaagcgctgcagtctatcaaccatggagtctcattcaaattgttgagctcatcttctttctgccactcaatcttatcccatacgtgggtacaccagccttcattatcatcaccggtgcaagattgggaacttttgcgcattatcgctggttcgaattgcgcggcttgaataaaaaggagcgaaagcaagctattcggggtcgacgttgggagtacacatggtttgggacctgtgccatgatactggagttaatacccatcttgtcatttttctttctccttacttcgactgcgggttctgcgatgtgggctgctaaattagagaagcttgcacgtgcaatgcctgaggcccctacgcaacctatagagcatggtcctgagcatggcgatgttgaccctccacctccttacgtggacaatcctgtatagttacttgtcttgttggatgctctaggcccacaattagacgcgagacgtcattaagttggtcttcaatatactatatttgctacactcgcaacccttgttgctgagggaaaaaatcatgcgtattttggtagtgattcaacccttgataacattttcgcaccaatgcaacaat

SEQ ID NO: 27486 - DNA, 1500 bp, Muscodor strobelii
  misc_feature: SGI cDNA ID NO. 569416
  misc_feature: Encodes the peptide sequence at SEQ ID NO 27487
atgccagacatgtcgcagctggcccacctctcagatgcgccgcatggctacgtctcatcttcccagtcgcaacctccatctagcagccagagactaccatacaacgactcgagcaacgattcccaagccacaacatctaccgcgaatgatgcagaccgtgtcttcacaccccctgagagcgacagcgaaggcagtcttcagcatgggaacggcaatgcttctagtcaggagtcccagctcatgcagctctccaatctggccgcccagcagcagaagatggccatatctcaggacgatatggaagtcaatggggggtcttcaaggaagaggatggcggacggtctcgtgaaacacacgcgccataactccagcacatcgcccatacggttagggcattcaaggaacacaagcactgtcagtgtcgcatcgacaacaggcagtcgcatcagcgagctgtccgccgagttgaaagctaaattatcctatgctatggtcaaagtaaatcacgggtggcaaagccattccatagacgaagtcgaatcactagcatcccaagcggcctcgcccacctctagcacgtcgaccttgcatgggaggcatggctcatctgcaagtccacggatgccattttctgggtttcgtcaagccgcgtcgaatccttccagtactgctactagccctgcagtgcagcagccgcccggtcgtatctacgaatctttctggagggacgccgctttcagagctcccaacgcgacgacatcgcctgtcattcaagggccgtcgttggcgcctcctgcgtccatccaaccacggcagccaatgcataataatcctcgtcgcaattccaatgccagatatacacccgcatacctatcccattcacatcatgcttcacctcatactccagctcaaccaagtccgctgcaaggcactcccaacctgtcgcataccccgaatgttgatccaatactcttttctccaccccagaatcttcgcgagcaggaggctttggaaacattgctgttcatgagcagcccaggtaactcggccaacctcaaacatacatttcctacgtcgcacgtgtcgcaaccgcgaagtactacgagaacagctcttcctacatcgcggcttaatcaaataagcgacgtccatagtccagggcgaaagcatatggcagctgggcggtcgcaggtccaccaacagacgaagcgcgtagagtttgagagaggaacgaaccaatacggcgagatagttgttgatgaacactatgggtcgccgagaggtatgccgcgtcggaaaacaatcagtggccatgcgccacggccctcactttcgcttcctgccggactcagcggaccaacgcgaccacggcctacattgcaagatgacgacattcagcgcatgatcgaccgggcggctgcagatgatagctcagattccgatggagagattcaactacctacaagcagtcgtcggaacggtgcaggcgttggcgtctga

SEQ ID NO: 27487 - protein, 499 aa, Muscodor strobelii
  misc_feature: SGI Peptide ID NO. 569416
  misc_feature (155)..(179): Pfam Id: PF08528 Pfam Desc: Whi5 like
  misc_feature (23)..(499): NCBI GI: 116197152 Blast Desc: CHGG_05174 [Chaetomium globosum CBS 148.51] gi|88181087|gb|EAQ88555.1| CHGG_05174 [Chaetomium globosum CBS 148.51]
  misc_feature (8)..(497): NCBI GI: 39960300 Blast Desc: MGG_09363 [Magnaporthe grisea 70-15] gi|145014313|gb|EDJ98881.1| MGG_09363 [Magnaporthe grisea 70-15]
  misc_feature (17)..(497): NCBI GI: 85092399 Blast Desc: NCU04927 [Neurospora crassa OR74A] gi|28920780|gb|EAA30139.1| [Neurospora crassa OR74A]
  misc_feature (40)..(495): NCBI GI: 171676810 Blast Desc: protein product [Podospora anserina] gi|170936472|emb|CAP61129.1| protein product [Podospora anserina]
  misc_feature (107)..(497): NCBI GI: 261360053 Blast Desc: conserved [Verticillium albo-atrum VaMs.102]
  misc_feature (28)..(497): NCBI GI: 46111163 Blast Desc: FG02463.1 [Gibberella zeae PH-1]
  misc_feature (38)..(497): NCBI GI: 256726044 Blast Desc: NECHADRAFT_94347 [Nectria haematococca mpVI 77-13-4]
  misc_feature (37)..(491): NCBI GI: 156031243 Blast Desc: SS1G_14043 [Sclerotinia sclerotiorum 1980] gi|154699445|gb|EDN99183.1| SS1G_14043 [Sclerotinia sclerotiorum 1980]
  misc_feature (40)..(273): NCBI GI: 154317715 Blast Desc: [Botryotinia fuckeliana B05.10] gi|150844383|gb|EDN19576.1| [Botryotinia fuckeliana B05.10]
  misc_feature (109)..(354): NCBI GI: 169605701 Blast Desc: SNOG_05875 [Phaeosphaeria nodorum SN15] gi|160706817|gb|EAT86939.2| SNOG_05875 [Phaeosphaeria nodorum SN15]
MPDMSQLAHLSDAPHGYVSSSQSQPPSSSQRLPYNDSSNDSQATTSTANDADRVFTPPESDSEGSLQHGNGNASSQESQLMQLSNLAAQQQKMAISQDDMEVNGGSSRKRMADGLVKHTRHNSSTSPIRLGHSRNTSTVSVASTTGSRISELSAELKAKLSYAMVKVNHGWQSHSIDEVESLASQAASPTSSTSTLHGRHGSSASPRMPFSGFRQAASNPSSTATSPAVQQPPGRIYESFWRDAAFRAPNATTSPVIQGPSLAPPASIQPRQPMHNNPRRNSNARYTPAYLSHSHHASPHTPAQPSPLQGTPNLSHTPNVDPILFSPPQNLREQEALETLLFMSSPGNSANLKHTFPTSHVSQPRSTTRTALPTSRLNQISDVHSPGRKHMAAGRSQVHQQTKRVEFERGTNQYGEIVVDEHYGSPRGMPRRKTISGHAPRPSLSLPAGLSGPTRPRPTLQDDDIQRMIDRAAADDSSDSDGEIQLPTSSRRNGAGVGV

SEQ ID NO: 27488 - DNA, 3942 bp, Muscodor strobelii; identical to SEQ ID NO: 27485
  misc_feature: SGI EST ID NO. CUFF.64823.0
  misc_feature: Variant of the nucleotide sequence at SEQ ID NO 27486

SEQ ID NO: 27489 - DNA, 513 bp, Muscodor strobelii
  misc_feature: SGI cDNA ID NO. 569417
  misc_feature: Encodes the peptide sequence at SEQ ID NO 27490
atgtcgtatcctataaaccacatcgggctcacggtcccagaccttgccgccgcgacaaagtggtatatcgagatcctttgcttccaaatcctgacaccatcgactgtgtccgtccgagacgctaatggcaacgatgatccactcatgaaatccgcgttgacactcttcccgcctgaattgcaaaagatatcaactgcattcttaacgtccggaaatggcgtaggccttgaactgttcgagtttgatccgaaaatcaccgaggataccaaggcgaaccttgctcgagactacaaacgcggtggtgtcttccacttcgccgtcactgtgccggattttgacacaacactggaaaaggcgattcgtgcgggtgcgacgaggatcggtgacggctttgagactatgggagccaagatacagtacattgcagatccttggggaaatacagttgagctattgtcggtcagttttgagaggttgctggctaacagggggcaagtcgagccgcctgaataa

SEQ ID NO: 27490 - protein, 170 aa, Muscodor strobelii
  misc_feature: SGI Peptide ID NO. 569417
  misc_feature (4)..(151): Pfam Id: PF00903 Pfam Desc: Glyoxalase/Bleomycin resistance protein/Dioxygenase superfamily
  misc_feature (57)..(151): Pfam Id: PF00903 Pfam Desc: Glyoxalase/Bleomycin resistance protein/Dioxygenase superfamily
  misc_feature (4)..(31): Pfam Id: PF00903 Pfam Desc: Glyoxalase/Bleomycin resistance protein/Dioxygenase superfamily
  misc_feature (1)..(164): NCBI GI: 256668018 Blast Desc: dioxygenase superfamily protein [Streptomyces sp. AA4]
  misc_feature (5)..(157): NCBI GI: 99080053 Blast Desc: glyoxalase/bleomycin resistance protein/dioxygenase [Ruegeria sp. TM1040] gi|99036333|gb|ABF62945.1| Glyoxalase/bleomycin resistance protein/dioxygenase [Ruegeria sp.
  misc_feature (2)..(150): NCBI GI: 256724474 Blast Desc: [Nectria haematococca mpVI 77-13-4]
  misc_feature (4)..(159): NCBI GI: 242798995 Blast Desc: glyoxalase/bleomycin resistance family protein [Talaromyces stipitatus ATCC 10500] gi|218716628|gb|EED16049.1| glyoxalase/bleomycin resistance family protein [Talaromyces ATCC
  misc_feature (1)..(157): NCBI GI: 87120153 Blast Desc: similar to dioxygenase superfamily protein [Marinomonas sp. MED121] gi|86164855|gb|EAQ66124.1| similar to dioxygenase superfamily protein [Marinomonas sp. MED121]
  misc_feature (5)..(157): NCBI GI: 254464627 Blast Desc: glyoxalase/bleomycin resistance protein/dioxygenase [Rhodobacterales bacterium Y4I] gi|206685535|gb|EDZ46017.1| glyoxalase/bleomycin resistance protein/dioxygenase bacterium
  misc_feature (2)..(157): NCBI GI: 119773416 Blast Desc: glyoxalase/bleomycin resistance protein/dioxygenase [Shewanella amazonensis SB2B] gi|119765916|gb|ABL98486.1| glyoxalase/bleomycin resistance protein/dioxygenase [Shewanella
  misc_feature (2)..(157): NCBI GI: 121728663 Blast Desc: glyoxalase/bleomycin resistance protein/dioxygenase [Vibrio cholerae V52] gi|121629074|gb|EAX61520.1| glyoxalase/bleomycin resistance protein/dioxygenase [Vibrio V52]
  misc_feature (2)..(161): NCBI GI: 147671824 Blast Desc: glyoxalase/bleomycin resistance protein/dioxygenase [Vibrio cholerae O395] gi|153818665|ref|ZP_01971332.1| glyoxalase/bleomycin resistance protein/dioxygenase [Vibrio NCTC
  misc_feature (2)..(157): NCBI GI: 229506088 Blast Desc: glyoxalase family protein [Vibrio cholerae BX 330286] gi|229528372|ref|ZP_04417763.1| glyoxalase family protein [Vibrio cholerae 12129(1)] gi|229334734|gb|EEO00220.1| glyoxalase family
MSYPINHIGLTVPDLAAATKWYIEILCFQILTPSTVSVRDANGNDDPLMKSALTLFPPELQKISTAFLTSGNGVGLELFEFDPKITEDTKANLARDYKRGGVFHFAVTVPDFDTTLEKAIRAGATRIGDGFETMGAKIQYIADPWGNTVELLSVSFERLLANRGQVEPPE

SEQ ID NO: 27491 - DNA, 795 bp, Muscodor strobelii
  misc_feature: SGI EST ID NO. CUFF.64838.0
  misc_feature: Variant of the nucleotide sequence at SEQ ID NO 27489
ttcacattctcctcactatatgtttcttttcggtgagacatgacaatctaatgtgtcccttgataagccaataacataccaatatccagtcgatgtcgtatcctataaaccacatcgggctcacggtcccagaccttgccgccgcgacaaagtggtatatcgagatcctttgcttccaaatcctgacaccatcgactgtgtccgtccgagacgctaatggcaacgatgatccactcatgaaatccgcgttgacactcttcccgcctgaattgcaaaagatatcaactgcattcttaacgtccggaaatggcgtaggccttgaactgttcgagtttgatccgaaaatcaccgaggataccaaggcgaaccttgctcgagactacaaacgcggtggtgtcttccacttcgccgtcactgtgccggattttgacacaacactggaaaaggcgattcgtgcgggtgcgacgaggatcggtgacggctttgagactatgggagccaagatacagtacattgcagatccttggggaaatacagttgagctattgtcggtcagttttgagaggttgctggctaacagggggcaagtcgagccgcctgaataagggttggcgctgaaagctcgattctgtcttcaattgagatgaactcaaattggaacctctaagtgtcgtgttagaaattggacgacgttccattaatgttgtacttacttattaagattatagagaatatgtcgctctagccgagagtacatcatggattgggtaacttaacgtcattactacgtttttg

SEQ ID NO: 27492 - DNA, 852 bp, Muscodor strobelii
  misc_feature: SGI cDNA ID NO. 569418
  misc_feature: Encodes the peptide sequence at SEQ ID NO 27493
atgtcctcgcctcgaacgaagaatccggtccccgactggattacagtcgcatatccgcatgttgagcattgcatcatttcttttcccaggaagcacattcttctagtcaccattaaccgcccacatgccatgaactgcttgccggtcgaggcaactatcgaactcggcgcgctttggaaatggtacgatgctgagccggagctgcgggctgccgtgttcaccggagccgggaaaaaatcattctgtgctggtatggacttaaaacagcgacttgagattcttgagacaaacaacattgcgcacgaatatcctcagggtcagttcggtggtatgagcaaccggacaggcaagaaacctattattatcgcctgcaacggccatgctcacggtggaggcatggaaattgttcttaacgccgacataatatttgcctcacccaacgccgatttccgtcttcccgaagttctgcgcggtgtctctgcccttgccggtgcgttgcctcggtgtatgatgctattcggaaaccaccgcacaatggatcttgtcctaacaggccgaatactatccctgaaagaagctgtcgaatggggccttgtgaaagaggttgtaccccaggagaaattgttggatagggcaatcgagtatgcttccgagatcgcagcgctgtgccctgacagtgtcattatttcacgccttgctgctcgtgaggcctgggagactggtgtcagcagagcgactatgaggggccaagagttgtatgcggaggctatgctcaggagtgcaaatgccgctgagggtttggcttcatatagagagaagagagaaccgaagtggctgccttcgcacttataa

SEQ ID NO: 27493 - protein, 283 aa, Muscodor strobelii
  misc_feature: SGI Peptide ID NO. 569418
  misc_feature (34)..(204): Pfam Id: PF00378 Pfam Desc: Enoyl-CoA hydratase/isomerase family
  misc_feature (1)..(283): NCBI GI: 261354674 Blast Desc: carnitinyl-CoA dehydratase [Verticillium albo-atrum VaMs.102]
  misc_feature (10)..(283): NCBI GI: 256726567 Blast Desc: NECHADRAFT_39278 [Nectria haematococca mpVI 77-13-4]
  misc_feature (21)..(283): NCBI GI: 226289909 Blast Desc: 3-hydroxybutyryl-CoA dehydratase [Paracoccidioides brasiliensis Pb18]
  misc_feature (19)..(283): NCBI GI: 258573889 Blast Desc: conserved [Uncinocarpus reesii 1704] gi|237901392|gb|EEP75793.1| conserved [Uncinocarpus reesii 1704]
  misc_feature (24)..(283): NCBI GI: 261205636 Blast Desc: enoyl-CoA hydratase [Ajellomyces dermatitidis SLH14081] gi|239592614|gb|EEQ75195.1| enoyl-CoA hydratase [Ajellomyces dermatitidis SLH14081] gi|239611236|gb|EEQ88223.1|
  misc_feature (21)..(283): NCBI GI: 226281029 Blast Desc: enoyl-CoA hydratase/carnithine racemase [Paracoccidioides brasiliensis Pb01]
  misc_feature (38)..(283): NCBI GI: 240106059 Blast Desc: carnitinyl-CoA dehydratase, [Coccidioides posadasii C735 delta SOWgp]
  misc_feature (15)..(283): NCBI GI: 225559015 Blast Desc: enoyl-CoA hydratase [Ajellomyces capsulatus G186AR]
  misc_feature (14)..(283): NCBI GI: 121715502 Blast Desc: enoyl-CoA hydratase [Aspergillus clavatus NRRL 1] gi|119403517|gb|EAW13934.1| enoyl-CoA hydratase [Aspergillus clavatus NRRL 1]
  misc_feature (14)..(283): NCBI GI: 119481027 Blast Desc: enoyl-CoA hydratase [Neosartorya fischeri NRRL 181] gi|119408696|gb|EAW18645.1| enoyl-CoA hydratase [Neosartorya fischeri NRRL 181]
  misc_feature (31)..(278): SWISSPROT Homolog: EC 4.2.1.17 Enoyl-CoA hydratase
MSSPRTKNPVPDWITVAYPHVEHCIISFPRKHILLVTINRPHAMNCLPVEATIELGALWKWYDAEPELRAAVFTGAGKKSFCAGMDLKQRLEILETNNIAHEYPQGQFGGMSNRTGKKPIIIACNGHAHGGGMEIVLNADIIFASPNADFRLPEVLRGVSALAGALPRCMMLFGNHRTMDLVLTGRILSLKEAVEWGLVKEVVPQEKLLDRAIEYASEIAALCPDSVIISRLAAREAWETGVSRATMRGQELYAEAMLRSANAAEGLASYREKREPKWLPSHL

SEQ ID NO: 27494 - DNA, 2023 bp, Muscodor strobelii
  misc_feature: SGI EST ID NO. CUFF.64883.0
  misc_feature: Variant of the nucleotide sequence at SEQ ID NO 27492
gtgattttgaatttctgaaaatagcctcacaattgccgctgaagaaatactttgattctctattgtccattctatctctcatttccgctttgtactcactagcactgtacacctcctgtgacgtagcattgtgaacaaacgttgccgactgtcatcaaatctccaaaatgtcctcgcctcgaacgaagaatccggtccccgactggattacagtcgcatatccgcatgttgagcattgcatcatttcttttcccaggaagcacattcttctagtcaccattaaccgcccacatgccatgaactgcttgccggtcgaggcaactatcgaactcggcgcgctttggaaatggtacgatgctgagccggagctgcgggctgccgtgttcaccggagccgggaaaaaatcattctgtgctggtatggacttaaaacagcgacttgagattcttgagacaaacaacattgcgcacgaatatcctcagggtcagttcggtggtatgagcaaccggacaggcaagaaacctattattatcgcctgcaacggccatgctcacggtggaggcatggaaattgttcttaacgccgacataatatttgcctcacccaacgccgatttccgtcttcccgaagttctgcgcggtgtctctgcccttgccggtgcgttgcctcggtgtatgatgctattcggaaaccaccgcacaatggatcttgtcctaacaggccgaatactatccctgaaagaagctgtcgaatggggccttgtgaaagaggttgtaccccaggagaaattgttggatagggcaatcgagtatgcttccgagatcgcagcgctgtgccctgacagtgtcattatttcacgccttgctgctcgtgaggcctgggagactggtgtcagcagagcgactatgaggggccaagagttgtatgcggaggctatgctcaggagtgcaaatgccgctgagggtttggcttcatatagagagaagagagaaccgaagtggctgccttcgcacttataattgagatacccatgcatgttaaatagatagaaataactaatcgccgcaaactatacatacttgtttcctgttacgttacactattctaattgcattcacgaagcacagcatcattaagattggaatattagctgagtagatcacaatcatacttatcactagatcttcatttatacaactacagcttgctgctctgtgccttaattttggcatagccattcgacaacgcgactctgccatcgcccttgacaattgtctcaaatccgtaattgtcaacgccaccttccgtgccaattttccatattctagtttcgagttcatcacccgggtagacgacgctcttaaacctggcaccaaacgccttgaacctcgcgggatctgatcctccaacctcacgtagcagtccatgagcagcaatattccatgtaccaagtccctgaagaattgcacccttgaaacccgcacgtttcccgaattcattgtctgcgtgcataggattgtaatcgccacaaagacgatatagtaaagcagtctcgggcgaggtttggaatgtgtgcacggcatcgggctggcgggaaggcattttgacgcctggcctactcgggcccttgggacctccatagccaccttgtcccatgccaaacgctgtactgctcattctaacgtagactttgcccgtcttgacatcgacaagctcgtgctcctgctctgagatcatggaaccgcccttgtcgtacacacccagaaccttgctgtggatctcaagatcaagaccagcagagctgacgggaagcgagttcacaatttcaatgccacgctctccatccacggaacgttgtgcgtcgaaggctggcgtgcctgggacgggctcagctgtagtgcgcttgacgaagtcgaaaacatcttgatctgtctgcttgaacgctagattcatgggaaatgtagggaatgctgaaaaccgtggatccaattcgtaaagaaaatgtatctcatctgctttgacg

SEQ ID NO: 27495 - DNA, 975 bp, Muscodor strobelii
  misc_feature: SGI cDNA ID NO. 569419
  misc_feature: Encodes the peptide sequence at SEQ ID NO 27496
atgagtgttagcgaaagtgatagacccgtaaagcgggcggatgggcgttacgacaatgtcgactttcgtaaggctgttggccacaaattcaagcccataaaatgctcatataaccgtagagatgtcctgctcttcgcaaacgcaatcggcgtcaaagcagatgagatacattttctttacgaattggatccacggttttcagcattccctacatttcccatgaatctagcgttcaagcagacagatcaagatgttttcgacttcgtcaagcgcactacagctgagcccgtcccaggcacgccagccttcgacgcacaacgttccgtggatggagagcgtggcattgaaattgtgaactcgcttcccgtcagctctgctggtcttgatcttgagatccacagcaaggttctgggtgtgtacgacaagggcggttccatgatctcagagcaggagcacgagcttgtcgatgtcaagacgggcaaagtctacgttagaatgagcagtacagcgtttggcatgggacaaggtggctatggaggtcccaagggcccgagtaggccaggcgtcaaaatgccttcccgccagcccgatgccgtgcacacattccaaacctcgcccgagactgctttactatatcgtctttgtggcgattacaatcctatgcacgcagacaatgaattcgggaaacgtgcgggtttcaagggtgcaattcttcagggacttggtacatggaatattgctgctcatggactgctacgtgaggttggaggatcagatcccgcgaggttcaaggcgtttggtgccaggtttaagagcgtcgtctacccgggtgatgaactcgaaactagaatatggaaaattggcacggaaggtggcgttgacaattacggatttgagacaattgtcaagggcgatggcagagtcgcgttgtcgaatggctatgccaaaattaaggcacagagcagcaagctgtag

SEQ ID NO: 27496 - protein, 324 aa, Muscodor strobelii
  misc_feature: SGI Peptide ID NO. 569419
  misc_feature (187)..(313): Pfam Id: PF01575 Pfam Desc: MaoC like domain
  misc_feature (3)..(324): NCBI GI: 256726444 Blast Desc: NECHADRAFT_39459 [Nectria haematococca mpVI 77-13-4]
  misc_feature (27)..(322): NCBI GI: 119499493 Blast Desc: peroxisomal dehydratase, [Neosartorya fischeri NRRL 181] gi|119414668|gb|EAW24607.1| peroxisomal dehydratase, [Neosartorya fischeri NRRL 181]
  misc_feature (26)..(323): NCBI GI: 169768966 Blast Desc: [Aspergillus oryzae RIB40] gi|83766811|dbj|BAE56951.1| protein product [Aspergillus oryzae]
  misc_feature (26)..(319): NCBI GI: 116182362 Blast Desc: CHGG_01809 [Chaetomium globosum CBS 148.51] gi|88186106|gb|EAQ93574.1| CHGG_01809 [Chaetomium globosum CBS 148.51]
  misc_feature (27)..(322): NCBI GI: 70985538 Blast Desc: peroxisomal dehydratase [Aspergillus fumigatus Af293] gi|66845903|gb|EAL86237.1| peroxisomal dehydratase, [Aspergillus fumigatus Af293] gi|159125794|gb|EDP50910.1| peroxisomal A1163]
  misc_feature (26)..(323): NCBI GI: 226284173 Blast Desc: peroxisomal dehydratase [Paracoccidioides brasiliensis Pb01]
  misc_feature (26)..(323): NCBI GI: 226288800 Blast Desc: peroxisomal dehydratase [Paracoccidioides brasiliensis Pb18]
  misc_feature (27)..(323): NCBI GI: 240108369 Blast Desc: MaoC like domain containing protein [Coccidioides posadasii C735 delta SOWgp]
  misc_feature (26)..(324): NCBI GI: 240273681 Blast Desc: hydroxysteroid dehydrogenase [Ajellomyces capsulatus H143]
  misc_feature (26)..(321): NCBI GI: 46118152 Blast Desc: FG04688.1 [Gibberella zeae PH-1]
  misc_feature (19)..(318): SWISSPROT Homolog: EC 4.2.1.107 3-alpha,7-alpha,12-alpha-trihydroxy-5-beta-cholest-24-enoyl-CoAhydratase
MSVSESDRPVKRADGRYDNVDFRKAVGHKFKPIKCSYNRRDVLLFANAIGVKADEIHFLYELDPRFSAFPTFPMNLAFKQTDQDVFDFVKRTTAEPVPGTPAFDAQRSVDGERGIEIVNSLPVSSAGLDLEIHSKVLGVYDKGGSMISEQEHELVDVKTGKVYVRMSSTAFGMGQGGYGGPKGPSRPGVKMPSRQPDAVHTFQTSPETALLYRLCGDYNPMHADNEFGKRAGFKGAILQGLGTWNIAAHGLLREVGGSDPARFKAFGARFKSVVYPGDELETRIWKIGTEGGVDNYGFETIVKGDGRVALSNGYAKIKAQSSKL

SEQ ID NO: 27497 - DNA, 1831 bp, Muscodor strobelii
  misc_feature: SGI EST ID NO. CUFF.64884.1
  misc_feature: Variant of the nucleotide sequence at SEQ ID NO 27495
ggcttagagcactgaatcattggcggcgacgaggaagtcctcttccgattcatgttcggctctgacgagtttcccatcttgagttgaactgttctacatttgaatggaatactggagtattctcatatcttgactcaatatccaggacatttgccatttgttcatcatagcatactaattcaaacatttcaatcgagttaaacagacttgtcgcggaacaatgagtgttagcgaaagtgatagacccgtaaagcgggcggatgggcgttacgacaatgtcgactttcgtaaggctgttggccacaaattcaagcccataaaatgctcatataaccgtagagatgtcctgctcttcgcaaacgcaatcggcgtcaaagcagatgagatacattttctttacgaattggatccacggttttcagcattccctacatttcccatgaatctagcgttcaagcagacagatcaagatgttttcgacttcgtcaagcgcactacagctgagcccgtcccaggcacgccagccttcgacgcacaacgttccgtggatggagagcgtggcattgaaattgtgaactcgcttcccgtcagctctgctggtcttgatcttgagatccacagcaaggttctgggtgtgtacgacaagggcggttccatgatctcagagcaggagcacgagcttgtcgatgtcaagacgggcaaagtctacgttagaatgagcagtacagcgtttggcatgggacaaggtggctatggaggtcccaagggcccgagtaggccaggcgtcaaaatgccttcccgccagcccgatgccgtgcacacattccaaacctcgcccgagactgctttactatatcgtctttgtggcgattacaatcctatgcacgcagacaatgaattcgggaaacgtgcgggtttcaagggtgcaattcttcagggacttggtacatggaatattgctgctcatggactgctacgtgaggttggaggatcagatcccgcgaggttcaaggcgtttggtgccaggtttaagagcgtcgtctacccgggtgatgaactcgaaactagaatatggaaaattggcacggaaggtggcgttgacaattacggatttgagacaattgtcaagggcgatggcagagtcgcgttgtcgaatggctatgccaaaattaaggcacagagcagcaagctgtagttgtataaatgaagatctagtgataagtatgattgtgatctactcagctaatattccaatcttaatgatgctgtgcttcgtgaatgcaattagaatagtgtaacgtaacaggaaacaagtatgtatagtttgcggcgattagttatttctatctatttaacatgcatgggtatctcaattataagtgcgaaggcagccacttcggttctctcttctctctatatgaagccaaaccctcagcggcatttgcactcctgagcatagcctccgcatacaactcttggcccctcatagtcgctctgctgacaccagtctcccaggcctcacgagcagcaaggcgtgaaataatgacactgtcagggcacagcgctgcgatctcggaagcatactcgattgccctatccaacaatttctcctggggtacaacctctttcacaaggccccattcgacagcttctttcagggatagtattcggcctgttaggacaagatccattgtgcggtggtttccgaatagcatcatacaccgaggcaacgcaccggcaagggcagagacaccgcgcagaacttcgggaagacggaaatcggcgttgggtgaggcaaatattatgtcggcgttaagaacaatttccatgc

SEQ ID NO: 27498 - DNA, 1857 bp, Muscodor strobelii
  misc_feature: SGI cDNA ID NO. 569420
  misc_feature: Encodes the peptide sequence at SEQ ID NO 27499
atggcgaagcgacctattcgaattggtaactgctctggggctataggagatggcatagatcaaatatacgaacttgccaagtcaggtgctgtcgacgctatcactgctgactacctcgccgagttcaatctagcatggcgagctattgaacttcagtcgaacccagaaggcgggtttgagcctgggttcctggatcagctcgcttggcatgatggagatgccgcaagactcgtcgcgcagaataaggttaagattgttcatgatggcggtgcactcagtcctcgcggcctcgcgctcgcaactgacaagtacttcaaaagtcttggcatctcaggtgtgagaattgcatacgttgaaggcgacaatgtcacatcggcggtcaaagagggcacagttggggagattccacatcttgaccatgtgggcatctcacttcagaatctagacgttgagaagctcttatctgcaaatgcatacacgggccaggcaggcattgtccgggcccttgaagaaggcgcagatatcgtgatctgtggacgatgctgtgatgccagtaccgttatgggattggccacttggtggcactcctggggtccggaacagtacaacgagctcgctggaagtctgatggctggccacttgattgaatgcggtccttatgtgacgggaggcaactattgtggcgtggacgagatctcagagattcacaatatggggtttccgatagccgagatcgcatcggatggcaccacgatcatcaccaaagtcaagggcacaaatggagccgtaacagtcgatacctgcaaggggcagttgctctatgagatccagggtcctaactatctgaaccctgatgtcactgctcacattgaaggggcccaactcgaagaaatcggcaaggatcgagtgaagctcactggtatcgttggttctgcacctccacctactgcgaagctggcgatctgcttgaatggcggctggcaagctgaggtttcaggatttgcagcgggcttgaacactgagttcaagttcaaccagctgaaaaaggggcttcttgggaaggtcaatcaggcggacttctctgtcattagtcttgagaaatatggcactcctccacctgatcctaagagccagaaagactgtactgttctcttccggatctttgcgcaaacgccgaaaaaggaagccatccagcaacttaagcaagcaatattttacaatggtctgcagggttactgtggtttacatttgagcatggactggcggacactggaaccacgcatgttcgtcaaatacttcccagctttgatctcgcaggcaaaactgcccttacgggttgcatttctggatttcgagaggacattcgacgttaagccgagggccgcgaacctctgcgcgagccaagcgccaaaacaaagaagttatgaaacaaaagcttcaccaccgcagatcggacagacagcaaaacggccgttcggcgacctggtcttcgcgcggagtggtgataaaggcgggaatgccaatgttggcttctgggtacgcgacccagcggcatacaactggttgcaatcatttttgactattcaaaggatcaaggatttgctgggaaatgactgggatgataagtacacggtagagagatgcgagtttgagaatctatgggctgtgcatttcgtcgtcaagggcattcttcaagagggtgttagtagtagctccatcatcgatggcctagcaaagagttttggggagttcctgagagcgagacatgttgatctccctattgaatttgtcgagacagagcaaaagaaacgaaaagaggcagttagtaaagctggtcgcggttcagcacgtctttaa

SEQ ID NO: 27499 - protein, 618 aa, Muscodor strobelii
  misc_feature: SGI Peptide ID NO. 569420
  misc_feature (8)..(382): Pfam Id: PF07287 Pfam Desc: Domain of function (DUF1446)
  misc_feature (8)..(343): Pfam Id: PF07287 Pfam Desc: Domain of function (DUF1446)
  misc_feature (1)..(613): NCBI GI: 261354672 Blast Desc: conserved [Verticillium albo-atrum VaMs.102]
  misc_feature (3)..(597): NCBI GI: 145236344 Blast Desc: protein product [Aspergillus niger] gi|134075272|emb|CAK44913.1| protein product [Aspergillus niger]
  misc_feature (5)..(598): NCBI GI: 256720391 Blast Desc: NECHADRAFT_55989 [Nectria haematococca mpVI 77-13-4]
  misc_feature (3)..(599): NCBI GI: 284093389 Blast Desc: [Naegleria gruberi]
  misc_feature (1)..(598): NCBI GI: 238508054 Blast Desc: conserved [Aspergillus flavus NRRL3357] gi|220688747|gb|EED45099.1| conserved [Aspergillus flavus NRRL3357]
  misc_feature (1)..(598): NCBI GI: 169784736 Blast Desc: [Aspergillus oryzae RIB40] gi|83775576|dbj|BAE65696.1| protein product [Aspergillus oryzae]
  misc_feature (4)..(605): NCBI GI: 256720792 Blast Desc: NECHADRAFT_49887 [Nectria haematococca mpVI 77-13-4]
  misc_feature (3)..(604): NCBI GI: 169785763 Blast Desc: [Aspergillus oryzae RIB40] gi|83776090|dbj|BAE66209.1| protein product [Aspergillus oryzae]
  misc_feature (1)..(587): NCBI GI: 85107671 Blast Desc: NCU07901 [Neurospora crassa OR74A] gi|28924023|gb|EAA33181.1| conserved [Neurospora crassa OR74A]
  misc_feature (1)..(598): NCBI GI: 256727310 Blast Desc: NECHADRAFT_32237 [Nectria haematococca mpVI 77-13-4]
MAKRPIRIGNCSGAIGDGIDQIYELAKSGAVDAITADYLAEFNLAWRAIELQSNPEGGFEPGFLDQLAWHDGDAARLVAQNKVKIVHDGGALSPRGLALATDKYFKSLGISGVRIAYVEGDNVTSAVKEGTVGEIPHLDHVGISLQNLDVEKLLSANAYTGQAGIVRALEEGADIVICGRCCDASTVMGLATWWHSWGPEQYNELAGSLMAGHLIECGPYVTGGNYCGVDEISEIHNMGFPIAEIASDGTTIITKVKGTNGAVTVDTCKGQLLYEIQGPNYLNPDVTAHIEGAQLEEIGKDRVKLTGIVGSAPPPTAKLAICLNGGWQAEVSGFAAGLNTEFKFNQLKKGLLGKVNQADFSVISLEKYGTPPPDPKSQKDCTVLFRIFAQTPKKEAIQQLKQAIFYNGLQGYCGLHLSMDWRTLEPRMFVKYFPALISQAKLPLRVAFLDFERTFDVKPRAANLCASQAPKQRSYETKASPPQIGQTAKRPFGDLVFARSGDKGGNANVGFWVRDPAAYNWLQSFLTIQRIKDLLGNDWDDKYTVERCEFENLWAVHFVVKGILQEGVSSSSIIDGLAKSFGEFLRARHVDLPIEFVETEQKKRKEAVSKAGRGSARL

SEQ ID NO: 27500 - DNA, 1924 bp, Muscodor strobelii
  misc_feature: SGI EST ID NO. CUFF.64842.0
  misc_feature: Variant of the nucleotide sequence at SEQ ID NO 27498
cgttcctcaagaacactatggcgaagcgacctattcgaattggtaactgctctggggctataggagatggcatagatcaaatatacgaacttgccaagtcaggtgctgtcgacgctatcactgctgactacctcgccgagttcaatctagcatggcgagctattgaacttcagtcgaacccagaaggcgggtttgagcctgggttcctggatcagctcgcttggcatgatggagatgccgcaagactcgtcgcgcagaataaggttaagattgttcatgatggcggtgcactcagtcctcgcggcctcgcgctcgcaactgacaagtacttcaaaagtcttggcatctcaggtgtgagaattgcatacgttgaaggcgacaatgtcacatcggcggtcaaagagggcacagttggggagattccacatcttgaccatgtgggcatctcacttcagaatctagacgttgagaagctcttatctgcaaatgcatacacgggccaggcaggcattgtccgggcccttgaagaaggcgcagatatcgtgatctgtggacgatgctgtgatgccagtaccgttatgggattggccacttggtggcactcctggggtccggaacagtacaacgagctcgctggaagtctgatggctggccacttgattgaatgcggtccttatgtgacgggaggcaactattgtggcgtggacgagatctcagagattcacaatatggggtttccgatagccgagatcgcatcggatggcaccacgatcatcaccaaagtcaagggcacaaatggagccgtaacagtcgatacctgcaaggggcagttgctctatgagatccagggtcctaactatctgaaccctgatgtcactgctcacattgaaggggcccaactcgaagaaatcggcaaggatcgagtgaagctcactggtatcgttggttctgcacctccacctactgcgaagctggcgatctgcttgaatggcggctggcaagctgaggtttcaggatttgcagcgggcttgaacactgagttcaagttcaaccagctgaaaaaggggcttcttgggaaggtcaatcaggcggacttctctgtcattagtcttgagaaatatggcactcctccacctgatcctaagagccagaaagactgtactgttctcttccggatctttgcgcaaacgccgaaaaaggaagccatccagcaacttaagcaagcaatattttacaatggtctgcagggttactgtggtttacatttgagcatggactggcggacactggaaccacgcatgttcgtcaaatacttcccagctttgatctcgcaggcaaaactgcccttacgggttgcatttctggatttcgagaggacattcgacgttaagccgagggccgcgaacctctgcgcgagccaagcgccaaaacaaagaagttatgaaacaaaagcttcaccaccgcagatcggacagacagcaaaacggccgttcggcgacctggtcttcgcgcggagtggtgataaaggcgggaatgccaatgttggcttctgggtacgcgacccagcggcatacaactggttgcaatcatttttgactattcaaaggatcaaggatttgctgggaaatgactgggatgataagtacacggtagagagatgcgagtttgagaatctatgggctgtgcatttcgtcgtcaagggcattcttcaagagggtgttagtagtagctccatcatcgatggcctagcaaagagttttggggagttcctgagagcgagacatgttgatctccctattgaatttgtcgagacagagcaaaagaaacgaaaagaggcagttagtaaagctggtcgcggttcagcacgtctttaagacttcgtagtgtttaggaaaacctggatacaatgctccgtcaattcacg

SEQ ID NO: 27501 - DNA, 1485 bp, Muscodor strobelii
  misc_feature: SGI cDNA ID NO. 569421
  misc_feature: Reduced expression when VOC is produced
  misc_feature: Encodes the peptide sequence at SEQ ID NO 27502
atgatcgaagccacggtcgaattactgaaagagaaccatctctcttccctgggtgctctgggacttgtggcaatcctcattgtcctcgcttcaagtttccgagaccctctctcaggagttccaggcccatggtacgcaaaatggacggatctagtcacatcatatcattgggtgaagggcacaaaaccaagctatattcacggcctacatcaaatttacggtcctattgttcgagtcggtccccgagaggtgtacaccatggacccggcagacctaaagacaatttacagcgtgaaaaatgagtttccaaaggcagcttggtatcgagattttgttccgggcgtggaaactgttttcaatacacttagcatcgatctccatcgccgctggcgaagagcattgtcggcacctatctccgaatcgggccttcaggcctttctgccagttattgacaacaaagtgcgcctcactattcagagaatggaagaagaatatgaaacccgggggttcaccgacatttataattggtggttatttatgacaaccgatgtcattggggagctcagctttggagagtctttccggatgctggagtcccgaaaggtgaatcaatacgttatcgatctgcaaaatctaggctcatcagccgctttgcgaagtgtgtctcccacgctgttcaagttaaccaagaagctcggtctcccaattcccgctctcaaagagacaatcgctagactacagcgcatgcgtagttacgcaacgcagtcacttcagcgccatcaaaacatcgtcgaaaacgacggaccagaagcaagccgaacagtcttctctaaggtatataaagcacagggagacgaaagcatgactgcaagcgaagtcatagacaatgcacagtcctatattgtggcaggaagcgacactacttccaatacactcatttttcttgtgtgggctgtatgccgtaacccagaagtcaaggcaaagctagtagaggagctggcgatgcttccggaggattttacttatgacgacttaaagcacatatcatatctaaatcatgttgtgagcgaggcgcttcgtcagttttcggcagcacctgccgggctaccaagagaggtccctagagatggaacgacgatgagtggtcattacattcctgccggctataccgtcgcaacacaagcctacagccttcatcgtaacactaatgttttccccgatccggagaagttcaatccttcaagatgggagaacgcgacccaagagatgaaatccatgtttatgccctttggcggaggctcccgcatttgcctaggcctccatctagcaaacatagagcttctgcttggtacggctcgtttctttagggcgtttcctaacgctactatgtcgactctcgaaggcatgagcgacgaagacatgaaaccaaagctatttttcttgttgggccctagtggacgtaggtgtctgatcaacctcaaatga

SEQ ID NO: 27502 - protein, 494 aa, Muscodor strobelii
  misc_feature: SGI Peptide ID NO. 569421
  misc_feature (36)..(491): Pfam Id: PF00067 Pfam Desc: Cytochrome P450
  misc_feature (127)..(491): Pfam Id: PF00067 Pfam Desc: Cytochrome P450
  misc_feature (1)..(491): NCBI GI: 212538573 Blast Desc: benzoate 4-monooxygenase cytochrome P450, [Penicillium marneffei ATCC 18224] gi|210069184|gb|EEA23275.1| benzoate 4-monooxygenase cytochrome P450, [Penicillium marneffei ATCC
  misc_feature (32)..(493): NCBI GI: 238495244 Blast Desc: cytochrome P450, [Aspergillus flavus NRRL3357] gi|220695508|gb|EED51851.1| cytochrome P450, [Aspergillus flavus NRRL3357]
  misc_feature (1)..(491): NCBI GI: 242806422 Blast Desc: cytochrome P450, [Talaromyces stipitatus ATCC 10500] gi|218715365|gb|EED14787.1| cytochrome P450, [Talaromyces stipitatus ATCC 10500]
  misc_feature (42)..(494): NCBI GI: 256729978 Blast Desc: NECHADRAFT_45084 [Nectria haematococca mpVI 77-13-4]
  misc_feature (14)..(492): NCBI GI: 212539207 Blast Desc: benzoate 4-monooxygenase cytochrome P450, [Penicillium marneffei ATCC 18224] gi|210069501|gb|EEA23592.1| benzoate 4-monooxygenase cytochrome P450, [Penicillium marneffei ATCC
  misc_feature (17)..(491): NCBI GI: 255941390 Blast Desc: Pc16g11620 [Penicillium chrysogenum Wisconsin 54-1255] gi|211586087|emb|CAP93832.1| Pc16g11620 [Penicillium chrysogenum Wisconsin 54-1255]
  misc_feature (24)..(491): NCBI GI: 255941466 Blast Desc: Pc16g12030 [Penicillium chrysogenum Wisconsin 54-1255] gi|211586125|emb|CAP93873.1| Pc16g12030 [Penicillium chrysogenum Wisconsin 54-1255]
  misc_feature (32)..(491): NCBI GI: 242760737 Blast Desc: cytochrome P450, [Talaromyces stipitatus ATCC 10500] gi|218723246|gb|EED22663.1| cytochrome P450, [Talaromyces stipitatus ATCC 10500]
  misc_feature (20)..(493): NCBI GI: 259489566 Blast Desc: TPA: cytochrome P450, (Eurofung) [Aspergillus nidulans FGSC A4]
  misc_feature (15)..(494): NCBI GI: 145249294 Blast Desc: An14g03610 [Aspergillus niger] gi|134081664|emb|CAK46598.1| protein product [Aspergillus niger]
  misc_feature (34)..(486): SWISSPROT Homolog: EC 1.14.13.12 Benzoate 4-monooxygenase
  misc_feature: Useful for introducing or modulating the production of volatile compounds
MIEATVELLKENHLSSLGALGLVAILIVLASSFRDPLSGVPGPWYAKWTDLVTSYHWVKGTKPSYIHGLHQIYGPIVRVGPREVYTMDPADLKTIYSVKNEFPKAAWYRDFVPGVETVFNTLSIDLHRRWRRALSAPISESGLQAFLPVIDNKVRLTIQRMEEEYETRGFTDIYNWWLFMTTDVIGELSFGESFRMLESRKVNQYVIDLQNLGSSAALRSVSPTLFKLTKKLGLPIPALKETIARLQRMRSYATQSLQRHQNIVENDGPEASRTVFSKVYKAQGDESMTASEVIDNAQSYIVAGSDTTSNTLIFLVWAVCRNPEVKAKLVEELAMLPEDFTYDDLKHISYLNHVVSEALRQFSAAPAGLPREVPRDGTTMSGHYIPAGYTVATQAYSLHRNTNVFPDPEKFNPSRWENATQEMKSMFMPFGGGSRICLGLHLANIELLLGTARFFRAFPNATMSTLEGMSDEDMKPKLFFLLGPSGRRCLINLK

SEQ ID NO: 27503 - DNA, 1964 bp, Muscodor strobelii
  misc_feature: SGI EST ID NO. CUFF.64845.0
  misc_feature: Variant of the nucleotide sequence at SEQ ID NO 27501
atggaagcccctgagtaaaaccaaaatgctcatataccgcttgcgccaataatacgaacaacattacatgtatatttcctaatcatcattacttcgcgctgagttatacttgatcaaataattggatcgaaactgcgtcataaaacttgagcagctatgatcgaagccacggtcgaattactgaaagagaaccatctctcttccctgggtgctctgggacttgtggcaatcctcattgtcctcgcttcaagtttccgagaccctctctcaggagttccaggcccatggtacgcaaaatggacggatctagtcacatcatatcattgggtgaagggcacaaaaccaagctatattcacggcctacatcaaatttacggtcctattgttcgagtcggtccccgagaggtgtacaccatggacccggcagacctaaagacaatttacagcgtgaaaaatgagtttccaaaggcagcttggtatcgagattttgttccgggcgtggaaactgttttcaatacacttagcatcgatctccatcgccgctggcgaagagcattgtcggcacctatctccgaatcgggccttcaggcctttctgccagttattgacaacaaagtgcgcctcactattcagagaatggaagaagaatatgaaacccgggggttcaccgacatttataattggtggttatttatgacaaccgatgtcattggggagctcagctttggagagtctttccggatgctggagtcccgaaaggtgaatcaatacgttatcgatctgcaaaatctaggctcatcagccgctttgcgaagtgtgtctcccacgctgttcaagttaaccaagaagctcggtctcccaattcccgctctcaaagagacaatcgctagactacagcgcatgcgtagttacgcaacgcagtcacttcagcgccatcaaaacatcgtcgaaaacgacggaccagaagcaagccgaacagtcttctctaaggtatataaagcacagggagacgaaagcatgactgcaagcgaagtcatagacaatgcacagtcctatattgtggcaggaagcgacactacttccaatacactcatttttcttgtgtgggctgtatgccgtaacccagaagtcaaggcaaagctagtagaggagctggcgatgcttccggaggattttacttatgacgacttaaagcacatatcatatctaaatcatgttgtgagcgaggcgcttcgtcagttttcggcagcacctgccgggctaccaagagaggtccctagagatggaacgacgatgagtggtcattacattcctgccggctataccgtcgcaacacaagcctacagccttcatcgtaacactaatgttttccccgatccggagaagttcaatccttcaagatgggagaacgcgacccaagagatgaaatccatgtttatgccctttggcggaggctcccgcatttgcctaggcctccatctagcaaacatagagcttctgcttggtacggctcgtttctttagggcgtttcctaacgctactatgtcgactctcgaaggcatgagcgacgaagacatgaaaccaaagctatttttcttgttgggccctagtggacgtaggtgtctgatcaacctcaaatgagaagactatgacatctatggacttctgcgaaatagtcaacattaagtgtaaatgtacaaaggcggtcttgtgtagcgtttgaggacttactcacgatcaatttcacaccaggagtatttcggacggcgttgttatcttttatataagcgatatgcacgcatctagtctcaaagaaacccaatcaataagatatctgtaaacatagcgttcgatgatatttcacaacataagaagattagctattcgaaatcgcattgtgtctgaaaattagactatttggcacctacactaagtcattcggtctccagctgaagtgcggagag

SEQ ID NO: 27504 - DNA, 3495 bp, Muscodor strobelii
  misc_feature: SGI cDNA ID NO. 569422
  misc_feature: Elevated expression when VOC is produced
  misc_feature: Encodes the peptide sequence at SEQ ID NO 27505
atggccagcaattctttggcaccgccaactctggcgattgatactactcgagtccgccccagaagcgataccaacgaaacgagggccgtaacaccttcgggctcgttcgtatcacaagtatcgaacccattcttgtcaccatctctctctaataacccattcctcacgcctgcacaatccgactgcgggtcaagtattatttcagtagaccctgaaacagtgctccgtcctgacccaggcacggaggctgattttgaggttaaagacagcccatttgctttcgctcctggccatttgaacaagctattaaatccaaaatctttacccactgatatcaacgcgggtctgagcgtcgacgagacgacagctcggtcaagagtcacatttgaccaagccatcaggaagccagacgagaattacccagagaacaccgagaaaatcgcgacaccaggttctgatcctcctttcagcgatcggataagggtctttggcaagaatgttctcccgtcaaaaaaagctacccctatttggagactgttctggaatgcttccaaggataaagtcatcattctactggcaattgctgctgtagtgtccctggctttaggtctctacgaaacattcggagtaaaaaaggaacctggcgacccgccctcggtcgactgggttgaaggcgttgccatcatcgttgctattctaatcgtgacattagttggttcattgaatgactggcagaaggagcgcgcatttgtgaaactcaatgcaaagaaagaggacagagagatcaaagtcgtgagatccggaaaatcgttcaccatcaacgttcatgatatcctcgttggcgatgtcttacatcttgaaccaggtgaccttgtgcccgttgacggaattctaatcaacggtcatgatttgaaatgcgatgagtcttctgctacaggagagtctgatgctatcaagaagacacccgcagaccgagtcatgacttccatagagtccgggtcaagctcctccaaaatcctcgacccatttatcatttctggagccaaagtacttgaaggagttgggacttttctctgcacatcagtcggtgtgcattcaagttatggcaagatcatgatgtctgttcagacggaagttgaggcaacccctttacagaaaaagctagaaaaactcgctattgctattgcgaaattgggagctagcgccgctattctcttattttttgtccttctcttccgatttctcgccgagctacctggagatacccgctccgctcctgagaaagcgacctcattcctcgatattcttatcgttgctgtcacaatcattgtggttgctgtacctgagggtctaccacttgcagtcacacttgcactcgcatttgccacacagcgtcttcttaaagagaagaaccttgtgcgaattttgcgagcttgcgaaacgatgggcaatgccaccaatatatgctcagacaagactggcactttgacaactaacaaaatgacagtggtggctggcaccttcgggcaatcgaacttcgccaagccaggcgagaatgagaagtcgggggctcagactgtggctcaatgggctactaagcttcctcaagagaccaaaacggccattattcagtctgttgccatcaacgcaaccgcgtttgagggtgaagatgccggacaatttgccttcattggctctaaaacagaaactgctctgcttcaattggccaaagatcatctagctatgcaaccactagccgaggtccgcgctaacgaggggcaaattgtccaaatgatgcccttcgactctggtaagaagtgtatgggcgcggtcattaagactggatctagctatcgattgcttgtcaaaggtgcctccgagatcctcttacggtgttgcagcgagaaggccgacgaaatgacactcgagagaagccagctcaccgaatccgataagtcaaacctgacgtccgtcatcgatgaatacgctcgcggttcccttcgtaccattggtcttgtgtaccgtgacttcgcagagtggcctccagctcacgctgcgatcgaagatgctcaggtacaattttcctccgtcctacaagacttggtatggctaggacttgttggtatacaggatcctgtcagggacggtgttccggaggcggttcgtcttgtgcagcatgctggcgtgaaggtccgcatggttactggcgataatgctgtaactgcaaaggcaatcgcaaaagaatgcggcatctacactgatggtcttattatggaagggccggaattcagaaccttaagtgacgagcagatgaacgagaagatacctttgcttcaggtcttggcacgctcgtctcccgaagacaagcgaattctcgtggcgaaactcaaagctctcggcgaaaccgtggcggtcactggcgatggtacgaatgacgcgcctgcactcaaattggcagatgttggtttctcaatgggcatctgcggtaccgaagtcgctaaggaagcttcggagatcgtactgatggatgataactttgcgtcgattctcaccgctctgaaatggggacgggctgtcaatgattcagtccagaaattccttcagttccaaatcacagtgaatatcactgccgtactgctcgcattcgtttccgccgtgtctagtccggaacgaaaatccgtgcttacagccgtccagcttctttgggtgaatctgatcatggacacctttgcggcacttgccctcgcaaccgacccaccgacagacaagattctctcacgtccacctcagccgaaaagcgctccattgatcacaatcaatatgtggaagatgatcatcggtcaagctatttatcaacttgtcgtcacgtttgtgctgtacttcgcaggtaaccaaattctgggctacgacccacacaacgaaacacagaagactgagctcgccaccatcgtattcaatacctttgtctggatgcagatattcaacgaattcaataaccgacgactagacaacaaattcaacattttcgaaggagttcaccgcaacaaatttttcattggcatcaccttactcatgatcggacttcaaattcttatcatttttgtgggtggaactgctttcgagatcagaccactagatgggacgcaatgggcgatttgcatcgtttccgctattctatgtttacctttcgctgttctcgtccgcctcttccccgacgagtggtttgctgttattgtgaagactgtaggcgctccttttgtcactgtgtacagatttttcgcaagggtattctcaaagatcggaagtgtttttgggcgtttcaagagaagcaagaaaacaacccccgacaacgaggacccggagaaagctgagagcagagccctagagggtgtcttggctgactcgccttgtgctccagaaatcgtagtatcgggaggcggtgtagaagcaccgcaaattgtagtagaagaggagaccaataggcgaacatcatga

SEQ ID NO: 27505 - protein, 1164 aa, Muscodor strobelii
  misc_feature: SGI Peptide ID NO. 569422
  misc_feature (485)..(829): Pfam Id: PF00702 Pfam Desc: haloacid dehalogenase-like hydrolase
  misc_feature (927)..(1074): Pfam Id: PF00689 Pfam Desc: Cation transporting ATPase, C-terminus
  misc_feature (104)..(204): Pfam Id: PF00690 Pfam Desc: Cation transporter/ATPase, N-terminus
  misc_feature (227)..(481): Pfam Id: PF00122 Pfam Desc: E1-E2 ATPase
  misc_feature (158)..(204): Pfam Id: PF00690 Pfam Desc: Cation transporter/ATPase, N-terminus
  misc_feature (263)..(481): Pfam Id: PF00122 Pfam Desc: E1-E2 ATPase
  misc_feature (3)..(1109): NCBI GI: 261353875 Blast Desc: plasma membrane calcium-transporting ATPase [Verticillium albo-atrum VaMs.102]
  misc_feature (87)..(1123): NCBI GI: 256729359 Blast Desc: NECHADRAFT_47395 [Nectria haematococca mpVI 77-13-4]
  misc_feature (1)..(1118): NCBI GI: 189201850 Blast Desc: plasma membrane calcium-transporting ATPase 2 [Pyrenophora tritici-repentis Pt-1C-BFP] gi|187984360|gb|EDU49848.1| plasma membrane calcium-transporting
  misc_feature (1)..(1127): NCBI GI: 169602653 Blast Desc: SNOG_04330 [Phaeosphaeria nodorum SN15] gi|160706221|gb|EAT88090.2| SNOG_04330 [Phaeosphaeria nodorum SN15]
  misc_feature (16)..(1123): NCBI GI: 119476566 Blast Desc: cation-transporting atpase fungi [Neosartorya fischeri NRRL 181] gi|119407350|gb|EAW17299.1| cation-transporting atpase fungi [Neosartorya fischeri NRRL 181]
  misc_feature (9)..(1118): NCBI GI: 67524739 Blast Desc: AN2827.2 [Aspergillus nidulans FGSC A4] gi|40744222|gb|EAA63398.1| AN2827.2 [Aspergillus nidulans FGSC A4] gi|259486243|tpe|CBF83927.1| TPA: calcium ion P-type ATPase
  misc_feature (78)..(1126): NCBI GI: 256728374 Blast Desc: [Nectria haematococca mpVI 77-13-4]
  misc_feature (88)..(1118): NCBI GI: 46114720 Blast Desc: FG03202.1 [Gibberella zeae PH-1]
  misc_feature (19)..(1129): NCBI GI: 115385487 Blast Desc: ATEG_09988 [Aspergillus terreus NIH2624] gi|114187737|gb|EAU29437.1| ATEG_09988 [Aspergillus terreus NIH2624]
  misc_feature (3)..(1125): NCBI GI: 255937369 Blast Desc: Pc13g12970 [Penicillium chrysogenum Wisconsin 54-1255] gi|211584331|emb|CAP92366.1| Pc13g12970 [Penicillium chrysogenum Wisconsin 54-1255]
  misc_feature (86)..(1118): SWISSPROT Homolog: EC 3.6.3.8 Calcium-transporting ATPase
  misc_feature: Useful for introducing or modulating the production of volatile compounds
MASNSLAPPTLAIDTTRVRPRSDTNETRAVTPSGSFVSQVSNPFLSPSLSNNPFLTPAQSDCGSSIISVDPETVLRPDPGTEADFEVKDSPFAFAPGHLNKLLNPKSLPTDINAGLSVDETTARSRVTFDQAIRKPDENYPENTEKIATPGSDPPFSDRIRVFGKNVLPSKKATPIWRLFWNASKDKVIILLAIAAVVSLALGLYETFGVKKEPGDPPSVDWVEGVAIIVAILIVTLVGSLNDWQKERAFVKLNAKKEDREIKVVRSGKSFTINVHDILVGDVLHLEPGDLVPVDGILINGHDLKCDESSATGESDAIKKTPADRVMTSIESGSSSSKILDPFIISGAKVLEGVGTFLCTSVGVHSSYGKIMMSVQTEVEATPLQKKLEKLAIAIAKLGASAAILLFFVLLFRFLAELPGDTRSAPEKATSFLDILIVAVTIIVVAVPEGLPLAVTLALAFATQRLLKEKNLVRILRACETMGNATNICSDKTGTLTTNKMTVVAGTFGQSNFAKPGENEKSGAQTVAQWATKLPQETKTAIIQSVAINATAFEGEDAGQFAFIGSKTETALLQLAKDHLAMQPLAEVRANEGQIVQMMPFDSGKKCMGAVIKTGSSYRLLVKGASEILLRCCSEKADEMTLERSQLTESDKSNLTSVIDEYARGSLRTIGLVYRDFAEWPPAHAAIEDAQVQFSSVLQDLVWLGLVGIQDPVRDGVPEAVRLVQHAGVKVRMVTGDNAVTAKAIAKECGIYTDGLIMEGPEFRTLSDEQMNEKIPLLQVLARSSPEDKRILVAKLKALGETVAVTGDGTNDAPALKLADVGFSMGICGTEVAKEASEIVLMDDNFASILTALKWGRAVNDSVQKFLQFQITVNITAVLLAFVSAVSSPERKSVLTAVQLLWVNLIMDTFAALALATDPPTDKILSRPPQPKSAPLITINMWKMIIGQAIYQLVVTFVLYFAGNQILGYDPHNETQKTELATIVFNTFVWMQIFNEFNNRRLDNKFNIFEGVHRNKFFIGITLLMIGLQILIIFVGGTAFEIRPLDGTQWAICIVSAILCLPFAVLVRLFPDEWFAVIVKTVGAPFVTVYRFFARVFSKIGSVFGRFKRSKKTTPDNEDPEKAESRALEGVLADSPCAPEIVVSGGGVEAPQIVVEEETNRRTS

SEQ ID NO: 27506 - DNA, 6263 bp, Muscodor strobelii
  misc_feature: SGI EST ID NO. CUFF.64953.0
  misc_feature: Variant of the nucleotide sequence at SEQ ID NO 27504
gcggtgtaaagtacgtctatatttcccctctcgcttccacgtatcggacttggttgtattgtgggttagtgcggcagcccgtagagaaaccgacatacctgattacatttgtacttgcaatgtgaggagctttcgactggagagtgttcttaagctgcatctctgataccctaaactctatatttgaggatgcgatcatgacatgtcgagcgatctgcaggcgatcgcaagctgtctcagaatctttgccaacgagccattttcttcatatctttaactatcaaaatgttcaagacatacgtttggaagatgtcctctcactaatatgcagaaaaaagattcaaatccctgatgtcagctagcgctgtaagggtccgtagagtctaaattgttgttccacagcttgtcgagctatgtccactaaatcttcatgtctccttcatattcaaatgccctagtgcgttgagacaaaggtcaataaagtgcaataattgtaatccgagcgaggaaaattcttaattgccgagatgtacacagcctcccttggcgcctgatagatcctctcatagttcgacattattggctgtcttgaagccatgaacatattcaagattcaccttacagttatagttcggtctgagattgtaactggagactccggacgtcttcggactaccagtcttgggaaccggtcttggacgctctggaggaagctcatgcgaagcgcatgtgtcatgtctcttagcaatgatcaaaggctcctcggtagggtttggaccccaacgtagaatgatcgaaggcacatggtcgaggttaaggttcatctggagaacacactagaagcctcatatccttcttagtggtcgactagcttctagtgtcgactgcgattaacatgtgagcaaatgatctttcaacattgagctcgaataccggatgacaagcggatgcaaaacataagaatcttggtaaaatcgaagaattgataccgatgactagtagactatatgtcccttttacagacgtcagcggctagggtgcaatagctcgtcctggatttctaaacacctcactgtacccaatcttggctgctaagcactactggatggggtacttaacagtgcatacattcatcgcagtggtcatcggtactggccaggatgctacgagcccgagactaaaggtaatctgcgtgtagagtctagacgagaggacgcccgcggtgggtcatcggaagtaggaaataagggaatctcattgggtcaaaaccatgcgtgtcgccaaacagcttgctttctgactggtcctcttgccttatttgctctgggtacattaacacagcctcaacctaccctcttggcgtcaacccaacaattattgttcctttgcgcccgtgaatcgccaagataacagcatgacttatgtatgctaaatgagtgttttcgaatgtatcaaagatggagagacgaggaaaaaattggtgcgtcattgatagaatggtcctgtcggacccgttggaagacggggcaaagaactgggcagcaggagatgcatcgcagagccgagaaactgggcggagacgagaagaggaaatgaaaggtgatcaaattccgatgagatgatcggaactttcaatacaaatcatttagatctgtggaaatttcaaaagagtagaaaagcggcctccaggaaaatcgccttccgtacggctgcaccacacttatacctcgctcgagacacacacagtatcaaactttgcttcaatagtgcacagcctcatccacgttgcctctgaccactaggcagacaggtcgccaacacaacctttttaccgcccacgtgaggctggtggcccaaactcttgggactcatgttcttggaagaggcccaaaggtttaactaggggtacgggtggctaatagcttctctcaataaccgccctagactgtaatggaacgcaagcaaggaatccattgcctatcgtattgacctcggatggcgaatattgcgacaaaggcacagcccgtacaccaagaacactagaaactcttggaaaattaagactcacgcgacattctaacattcggctcggcgagatcagtttcaaccggccaggcgctctaagcaactctcggagcagacttctcaccgtggaatcatcatcatcactcaaggcaggcatcggtagacttcgacatagcctcaaactccgcccacaatcccctcatacatatgctcaccctaaatcgctcaacacttcagcacatctatgcaaacaaggtctcagacagtaacaaactgtcttctcatgccagactatagcaccatcctcaacacatcaacacaacattaacacatcatcctcatcttcacatcgcatttcgacttactagttatactccaatttgttgttgttattatacatcccactctaaatcacattaacatggccagcaattctttggcaccgccaactctggcgattgatactactcgagtccgccccagaagcgataccaacgaaacgagggccgtaacaccttcgggctcgttcgtatcacaagtatcgaacccattcttgtcaccatctctctctaataacccattcctcacgcctgcacaatccgactgcgggtcaagtattatttcagtagaccctgaaacagtgctccgtcctgacccaggcacggaggctgattttgaggttaaagacagcccatttgctttcgctcctggccatttgaacaagctattaaatccaaaatctttacccgtattccgggctctgggggggtctgaagggtatcgaacgtggactgcagactgatatcaacgcgggtctgagcgtcgacgagacgacagctcggtcaagagtcacatttgaccaagccatcaggaagccagacgagaattacccagagaacaccgagaaaatcgcgacaccaggttctgatcctcctttcagcgatcggataagggtctttggcaagaatgttctcccgtcaaaaaaagctacccctatttggagactgttctggaatgcttccaaggataaagtcatcattctactggcaattgctgctgtagtgtccctggctttaggtctctacgaaacattcggagtaaaaaaggaacctggcgacccgccctcggtcgactgggttgaaggcgttgccatcatcgttgctattctaatcgtgacattagttggttcattgaatgactggcagaaggagcgcgcatttgtgaaactcaatgcaaagaaagaggacagagagatcaaagtcgtgagatccggaaaatcgttcaccatcaacgttcatgatatcctcgttggcgatgtcttacatcttgaaccaggtgaccttgtgcccgttgacggaattctaatcaacggtcatgatttgaaatgcgatgagtcttctgctacaggagagtctgatgctatcaagaagacacccgcagaccgagtcatgacttccatagagtccgggtcaagctcctccaaaatcctcgacccatttatcatttctggagccaaagtacttgaaggagttgggacttttctctgcacatcagtcggtgtgcattcaagttatggcaagatcatgatgtctgttcagacggaagttgaggcaacccctttacagaaaaagctagaaaaactcgctattgctattgcgaaattgggagctagcgccgctattctcttattttttgtccttctcttccgatttctcgccgagctacctggagatacccgctccgctcctgagaaagcgacctcattcctcgatattcttatcgttgctgtcacaatcattgtggttgctgtacctgagggtctaccacttgcagtcacacttgcactcgcatttgccacacagcgtcttcttaaagagaagaaccttgtgcgaattttgcgagcttgcgaaacgatgggcaatgccaccaatatatgctcagacaagactggcactttgacaactaacaaaatgacagtggtggctggcaccttcgggcaatcgaacttcgccaagccaggcgagaatgagaagtcgggggctcagactgtggctcaatgggctactaagcttcctcaagagaccaaaacggccattattcagtctgttgccatcaacgcaaccgcgtttgagggtgaagatgccggacaatttgccttcattggctctaaaacagaaactgctctgcttcaattggccaaagatcatctagctatgcaaccactagccgaggtccgcgctaacgaggggcaaattgtccaaatgatgcccttcgactctggtaagaagtgtatgggcgcggtcattaagactggatctagctatcgattgcttgtcaaaggtgcctccgagatcctcttacggtgttgcagcgagaaggccgacgaaatgacactcgagagaagccagctcaccgaatccgataagtcaaacctgacgtccgtcatcgatgaatacgctcgcggttcccttcgtaccattggtcttgtgtaccgtgacttcgcagagtggcctccagctcacgctgcgatcgaagatgctcaggtacaattttcctccgtcctacaagacttggtatggctaggacttgttggtatacaggatcctgtcagggacggtgttccggaggcggttcgtcttgtgcagcatgctggcgtgaaggtccgcatggttactggcgataatgctgtaactgcaaaggcaatcgcaaaagaatgcggcatctacactgatggtcttattatggaagggccggaattcagaaccttaagtgacgagcagatgaacgagaagatacctttgcttcaggtcttggcacgctcgtctcccgaagacaagcgaattctcgtggcgaaactcaaagctctcggcgaaaccgtggcggtcactggcgatggtacgaatgacgcgcctgcactcaaattggcagatgttggtttctcaatgggcatctgcggtaccgaagtcgctaaggaagcttcggagatcgtactgatggatgataactttgcgtcgattctcaccgctctgaaatggggacgggctgtcaatgattcagtccagaaattccttcagttccaaatcacagtgaatatcactgccgtactgctcgcattcgtttccgccgtgtctagtccggaacgaaaatccgtgcttacagccgtccagcttctttgggtgaatctgatcatggacacctttgcggcacttgccctcgcaaccgacccaccgacagacaagattctctcacgtccacctcagccgaaaagcgctccattgatcacaatcaatatgtggaagatgatcatcggtcaagctatttatcaacttgtcgtcacgtttgtgctgtacttcgcaggtaaccaaattctgggctacgacccacacaacgaaacacagaagactgagctcgccaccatcgtattcaatacctttgtctggatgcagatattcaacgaattcaataaccgacgactagacaacaaattcaacattttcgaaggagttcaccgcaacaaatttttcattggcatcaccttactcatgatcggacttcaaattcttatcatttttgtgggtggaactgctttcgagatcagaccactagatgggacgcaatgggcgatttgcatcgtttccgctattctatgtttacctttcgctgttctcgtccgcctcttccccgacgagtggtttgctgttattgtgaagactgtaggcgctccttttgtcactgtgtacagatttttcgcaagggtattctcaaagatcggaagtgtttttgggcgtttcaagagaagcaagaaaacaacccccgacaacgaggacccggagaaagctgagagcagagccctagagggtgtcttggctgactcgccttgtgctccagaaatcgtagtatcgggaggcggtgtagaagcaccgcaaattgtagtagaagaggagaccaataggcgaacatcatgaggaagtatgattaatgactagagacgacctgtatatagaactgaatagaacagcgatttgattgttacactatgattgtgaagcaattcgtatatctcgatcaagaagtgctacttaacacgtactattgtattgtaccttgatcgctcggatacagccgctcgcttattgtaacagggaggaaaccgatttgtagggaacgatcacggagaatagtcggtgtcggcgttttgttgatcggtggctgctgttggacagaacttgatcccggac

SEQ ID NO: 27507 - DNA, 891 bp, Muscodor strobelii
  misc_feature: SGI cDNA ID NO. 569423
  misc_feature: Encodes the peptide sequence at SEQ ID NO 27508
atgcaggaattactcgacttaccattggagatcctcgacgcgatagtcgaattggtcttgatacatgagcatgttgcgccagcgaacgtagcagatgcctccacgtcccgcctacgaccaaacccgcggccgcaaactgcctcctgggaacatgggtataaaaacgtcgtttacgaacgctccgccatcacctccaacgtcggatcacttatcctcgtcagcagactactacatacgcggacacggcaagccatcgctcgtatctatccgaacggtgcgagatacaagctggacgtcatgctcgttaacaaaaaccaactatggccgacctggctgcatgtaccttatcttacaaagagtctcgactccgtcgatgtcacctttcgtgtgcctggatccagcgagttaaacatcaactattcagcccctagagactacataaacgcagttaggatttcatggtgcttctactttctcctcgaacactttctacactacggcctatacccatctagccatgatagatccttggaggcaagtaagcgccaccgtattactgtcagggacattaatatgagttttcaaaacgttgacgctattttcacacactctggcgcgagcccggacaccatcgggagaggcttccagcagagcacggtaccatcacgtattgacccttctagcacttaccctacgtggttggtacagctagtgaagagaaagattgagcagcagcttgagctgggccatcaatcaactccatggggtctgctattgcacaaccgcatcaatcggtttcgaatcaaaccaccaccaaactcttcggccacagaaacggtcttgtctaccgagtcctatctcggagaatcagggtgcgcgatgacgggttaa

SEQ ID NO: 27508 - protein, 296 aa, Muscodor strobelii
  misc_feature: SGI Peptide ID NO. 569423
  misc_feature (1)..(268): NCBI GI: 212533785 Blast Desc: conserved [Penicillium marneffei ATCC 18224] gi|210072413|gb|EEA26502.1| conserved [Penicillium marneffei ATCC 18224]
  misc_feature (69)..(134): NCBI GI: 239606876 Blast Desc: BDCG_00668 [Ajellomyces dermatitidis ER-3]
  misc_feature (69)..(134): NCBI GI: 261191262 Blast Desc: BDBG_07441 [Ajellomyces dermatitidis SLH14081] gi|239589805|gb|EEQ72448.1| BDBG_07441 [Ajellomyces dermatitidis SLH14081]
  misc_feature (1)..(199): NCBI GI: 255956437 Blast Desc: [Penicillium chrysogenum Wisconsin 54-1255] gi|211590682|emb|CAP96877.1| [Penicillium chrysogenum Wisconsin 54-1255]
  misc_feature (3)..(231): NCBI GI: 261358743 Blast Desc: [Verticillium albo-atrum VaMs.102]
MQELLDLPLEILDAIVELVLIHEHVAPANVADASTSRLRPNPRPQTASWEHGYKNVVYERSAITSNVGSLILVSRLLHTRTRQAIARIYPNGARYKLDVMLVNKNQLWPTWLHVPYLTKSLDSVDVTFRVPGSSELNINYSAPRDYINAVRISWCFYFLLEHFLHYGLYPSSHDRSLEASKRHRITVRDINMSFQNVDAIFTHSGASPDTIGRGFQQSTVPSRIDPSSTYPTWLVQLVKRKIEQQLELGHQSTPWGLLLHNRINRFRIKPPPNSSATETVLSTESYLGESGCAMTG

SEQ ID NO: 27509 - DNA, 687 bp, Muscodor strobelii
  misc_feature: SGI cDNA ID NO. 569424
  misc_feature: Reduced expression when VOC is produced
  misc_feature: Encodes the peptide sequence at SEQ ID NO 27510
atggtcacaatgtctatcagagcattaaaggaacagaaagaagcatactcaatcttacggttaagcaagataactctgacacatcacacgcaggtagctgctgccgagcagctctcaaaagtgggcgttggagctgttccgttaccacaccctctaatcacaatgtcttacgccgacgttgctgcctctggccccaagcagactcccgaggaggccgctgcccctcagcctccccagatcatcccttccgagtctgccagtacctcgtctctgatcgatgtcgacactccttcggtccgcaccgttccctccgacttcctggagcaggatatccagaccgagacccaggctgcccgcatcgagctcgagcacgccgctgaccgcgcccgtgccgaggctgatcttgccaagaagaagagcgctcgcaaggcacgtgaggccgacaacttcctcaccaagttctttggcaacatgagcgataaccagagcactgctcttgttgtcaccaatatcgctgctgtcaccggtatcagcgtgtatctcggatacaaggctctcggtctgtacgagcgtggccgcttgacttggcagaacattggcatcggtgctggtattgcccttggtgttggtctatttgagggcgtcttcggcggatacctctacaagggaaagaagcagcagtcataa

SEQ ID NO: 27510 - protein, 228 aa, Muscodor strobelii
  misc_feature: SGI Peptide ID NO. 569424
  misc_feature (37)..(224): NCBI GI: 171676850 Blast Desc: protein product [Podospora anserina] gi|170936492|emb|CAP61152.1| protein product [Podospora anserina]
  misc_feature (50)..(225): NCBI GI: 46111149 Blast Desc: FG02456.1 [Gibberella zeae PH-1]
  misc_feature (51)..(225): NCBI GI: 85092437 Blast Desc: NCU04946 [Neurospora crassa OR74A] gi|28920799|gb|EAA30158.1| [Neurospora crassa OR74A]
  misc_feature (49)..(225): NCBI GI: 256726050 Blast Desc: NECHADRAFT_100868 [Nectria haematococca mpVI 77-13-4]
  misc_feature (55)..(216): NCBI GI: 116197164 Blast Desc: CHGG_05180 [Chaetomium globosum CBS 148.51] gi|88181093|gb|EAQ88561.1| CHGG_05180 [Chaetomium globosum CBS 148.51]
  misc_feature (56)..(226): NCBI GI: 145606613 Blast Desc: MGG_09349 [Magnaporthe grisea 70-15] gi|145014297|gb|EDJ98865.1| MGG_09349 [Magnaporthe grisea 70-15]
  misc_feature (55)..(224): NCBI GI: 156059242 Blast Desc: SS1G_03633 [Sclerotinia sclerotiorum 1980] gi|154701420|gb|EDO01159.1| SS1G_03633 [Sclerotinia sclerotiorum 1980]
  misc_feature (71)..(225): NCBI GI: 261360059 Blast Desc: [Verticillium albo-atrum VaMs.102]
  misc_feature (55)..(224): NCBI GI: 154317346 Blast Desc: BC1G_03575 [Botryotinia fuckeliana B05.10] gi|150844992|gb|EDN20185.1| BC1G_03575 [Botryotinia fuckeliana B05.10]
  misc_feature (55)..(214): NCBI GI: 242810210 Blast Desc: conserved [Talaromyces stipitatus ATCC 10500] gi|218716159|gb|EED15581.1| conserved [Talaromyces stipitatus ATCC 10500]
  misc_feature: Useful for introducing or modulating the production of volatile compounds
MVTMSIRALKEQKEAYSILRLSKITLTHHTQVAAAEQLSKVGVGAVPLPHPLITMSYADVAASGPKQTPEEAAAPQPPQIIPSESASTSSLIDVDTPSVRTVPSDFLEQDIQTETQAARIELEHAADRARAEADLAKKKSARKAREADNFLTKFFGNMSDNQSTALVVTNIAAVTGISVYLGYKALGLYERGRLTWQNIGIGAGIALGVGLFEGVFGGYLYKGKKQQS

SEQ ID NO: 27511 - DNA, 1345 bp, Muscodor strobelii
  misc_feature: SGI EST ID NO. CUFF.65075.0
  misc_feature: Variant of the nucleotide sequence at SEQ ID NO 27509
ccgcaactgaatcgcgatctcgtcactgggccaggaacaaacttccgacctgctgtcttgttccagctttgaccctgcagtatatcgctctcgccgtaccacgctctcacatacaaacaatctctctctcagcttcacagttgccgtccttgataccccttactctcatcgcattgagtctatagccctctattacctctgtccttctctaccgccgactttgtcgcagcttctccttggtatcattgccaactcggaagctcatctgaccttcttttcaccttggaaactcttaagctgttccgttaccacaccctctaatcacaatgtcttacgccgacgttgctgcctctggccccaagcagactcccgaggaggtatgatgctcttgcgcaatcgtgactggacatgtgatattggttctatgtatcgcgcgccaattctgtccatgccactaacaccagactttctacaggccgctgcccctcagcctccccagatcatcccttccgagtctgccagtacctcgtctctgatcgatgtcgacactccttcggtccgcaccgttccctccgacttcctggagcaggatatccagaccgagacccaggctgcccgcatcgagctcgagcacgccgctgaccgcgcccgtgccgaggctgatcttgccaagaagaagagcgctcgcaaggcacgtgaggccgacaacttcctcaccaagttctttggcaacatgagcgataaccagagcactgctcttgttgtcaccaatatcgctgctgtcaccggtatcagcgtgtatctcggatacaaggctctcggtctgtacgagcgtggccgcttgacttggcagaacattggcatcggtgctggtattgcccttggtgttggtctatttgagggcgtcttcggcggatacctctacaagggaaagaagcagcagtcataagttctatcccaggctgtgatagttaattaatctcttccgagttggcacgacgatgggcttgcatgattaattgcggtggcgcttggtgcgatggcgatctgcggagtctctctctactcgatcctcttcttatgttttttcggttacgaggtctatctgttgtgcctcttggtcggaggacgcttgatagtatagtagggtggactgaactacccagtgttataataccccgtttcagaagctcaaaactaatcttgcgtgttttttggtgatgttttgagtgtgacatacgtcttatggatcttgcttgtatttgatcattcggaattatcaagattctggtggacccttcatatgtctctcaagtgtgggaaggatatctcttctcgcgctaac

SEQ ID NO: 27512 - DNA, 897 bp, Muscodor strobelii
  misc_feature: SGI cDNA ID NO. 569425
  misc_feature: Reduced expression when VOC is produced
  misc_feature: Encodes the peptide sequence at SEQ ID NO 27513
atgtacagagcagctgtgcgatccgcgccacggatttctgctccccttcgccagcccctagccgcatctgggcgacgattcgcctcgacagttcctgcggacaggaaacggagttggaagagctctgccgtaagatggggtttggctgttggtgctgtctactggtatagcaccagcgctgtctttgccgagcaaccgcaactcagccagaagcagccccctccccacttctccgatgaagacctccctacgatcgaagcagtagttgctgagaagcgcaaggaagccgaagcccggttacagaaggctgctgcaaagcctactcccgttgccgagcccgagaccaccgtaccggctgcgcaaacctcaccccaagctccagtgaacgatgtagaggacgctggtgcgcctccgccgccgccacaggagggcggcctcgaaggtctggaagaggaggctggtcaacagggtgccttcaaccctgagaccggcgagatcaactgggactgcccctgcctgggtggtatggccgacggcccttgtggcgagcaattcaaggctgctttcagctgcttcgtatactctcaggaggaccccaagggcattgactgcattgacaagttccagcacatgcaagattgcttcagattacatccagaaatctacggcgaagagctagaaggagacgaagaggctggcgagggatcccctgccgaaggagccgcggctacgaaagatatcgcagaaaaccccagtacagctcaaacttcagagaagagctctgctcctgaacctacgccggctactacgccaaaagatgtacaccgagagaatggagaaccaggtgccgagccagagagagatgccacagcagccgcacctcccaagaaggaatag

SEQ ID NO: 27513 - protein, 298 aa, Muscodor strobelii
  misc_feature: SGI Peptide ID NO. 569425
  misc_feature (174)..(217): Pfam Id: PF06747 Pfam Desc: CHCH domain
  misc_feature (1)..(262): NCBI GI: 261360060 Blast Desc: mitochondrial intermembrane space import and assembly protein 40-B [Verticillium albo-atrum VaMs.102]
  misc_feature (1)..(293): NCBI GI: 46111147 Blast Desc: FG02455.1 [Gibberella zeae PH-1] gi|97073284|sp|Q4IK03.1|MIA40_GIBZE RecName: Full=Mitochondrial intermembrane space import and assembly protein 40; AltName:
  misc_feature (1)..(254): NCBI GI: 258565345 Blast Desc: coiled-coil-helix-coiled-coil-helix domain-containing protein 4 [Uncinocarpus reesii 1704] gi|237907118|gb|EEP81519.1| coiled-coil-helix-coiled-coil-helix domain-containing protein 4
  misc_feature (1)..(234): NCBI GI: 39960441 Blast Desc: MGG_09348 [Magnaporthe grisea 70-15] gi|145014296|gb|EDJ98864.1| MGG_09348 [Magnaporthe grisea 70-15]
  misc_feature (1)..(231): NCBI GI: 256725635 Blast Desc: NECHADRAFT_18469 [Nectria haematococca mpVI 77-13-4]
  misc_feature (1)..(258): NCBI GI: 119190385 Blast Desc: CIMG_05240 [Coccidioides immitis RS]
  misc_feature (1)..(222): NCBI GI: 156059240 Blast Desc: SS1G_03632 [Sclerotinia sclerotiorum 1980] gi|154701419|gb|EDO01158.1| SS1G_03632 [Sclerotinia sclerotiorum 1980]
  misc_feature (1)..(258): NCBI GI: 240107217 Blast Desc: CHCH domain containing protein [Coccidioides posadasii C735 delta SOWgp]
  misc_feature (1)..(231): NCBI GI: 171676852 Blast Desc: protein product [Podospora anserina] gi|170936493|emb|CAP61153.1| protein product [Podospora anserina]
  misc_feature (1)..(229): NCBI GI: 85092435 Blast Desc: NCU04945 [Neurospora crassa OR74A] gi|74615447|sp|Q7S3S2.1|MIA40_NEUCR RecName: Full=Mitochondrial intermembrane space import and assembly protein 40; AltName:
  misc_feature: Useful for introducing or modulating the production of volatile compounds
MYRAAVRSAPRISAPLRQPLAASGRRFASTVPADRKRSWKSSAVRWGLAVGAVYWYSTSAVFAEQPQLSQKQPPPHFSDEDLPTIEAVVAEKRKEAEARLQKAAAKPTPVAEPETTVPAAQTSPQAPVNDVEDAGAPPPPPQEGGLEGLEEEAGQQGAFNPETGEINWDCPCLGGMADGPCGEQFKAAFSCFVYSQEDPKGIDCIDKFQHMQDCFRLHPEIYGEELEGDEEAGEGSPAEGAAATKDIAENPSTAQTSEKSSAPEPTPATTPKDVHRENGEPGAEPERDATAAAPPKKE

SEQ ID NO: 27514 - DNA, 1379 bp, Muscodor strobelii
  misc_feature: SGI EST ID NO. CUFF.64923.1
  misc_feature: Variant of the nucleotide sequence at SEQ ID NO 27512
ttccgcgcggctcaagctccgtcagctggtcgcgtttttttccgacagagccaaaatttccaggcgcatccgaattggatgacgatttagtcccaaattcatccatactacacagcttacaaaccacacacaccaatccgagagcactcttttctccccgtcttgggcaccttttttcttttattgttattccgttcactctttaattctatcagctcgtccacaagatgtacagagcagctgtgcgatccgcgccacggatttctgctccccttcgccagcccctagccgcatctgggcgacgattcgcctcgacagttcctgcggacaggaaacggagttggaagagctctgccgtaagatggggtttggctgttggtgctgtctactggtatagcaccagcgctgtctttgccgagcaaccgcaactcagccagaagcagccccctccccacttctccgatgaagacctccctacgatcgaagcagtagttgctgagaagcgcaaggaagccgaagcccggttacagaaggctgctgcaaagcctactcccgttgccgagcccgagaccaccgtaccggctgcgcaaacctcaccccaagctccagtgaacgatgtagaggacgctggtgcgcctccgccgccgccacaggagggcggcctcgaaggtctggaagaggaggctggtcaacagggtgccttcaaccctgagaccggcgagatcaactgggactgcccctgcctgggtggtatggccgacggcccttgtggcgagcaattcaaggctgctttcagctgcttcgtatactctcaggaggaccccaagggcattgactgcattgacaagttccagcacatgcaagattgcttcagattacatccagaaatctacggcgaagagctagaaggagacgaagaggctggcgagggatcccctgccgaaggagccgcggctacgaaagatatcgcagaaaaccccagtacagctcaaacttcagagaagagctctgctcctgaacctacgccggctactacgccaaaagatgtacaccgagagaatggagaaccaggtgccgagccagagagagatgccacagcagccgcacctcccaagaaggaatagacgcgctttgagtccgagcagaggcacttgataatcgaaggacagcgtgcatgtacaaatataccccaaaagacgagaagggttaatgctacatggactgtagaggcgctggtggagcaaaagcctgattagatctgtaactactgtatataacatgtatgagaaatggtagacttgtgtaagacactcatcctctctctgctaattaccatattttcaaattcacccaaaaaccaaaaatggtcacaatgtcta

SEQ ID NO: 27515 - DNA, 813 bp, Muscodor strobelii
  misc_feature: SGI cDNA ID NO. 569426
  misc_feature: Encodes the peptide sequence at SEQ ID NO 27516
atgaatccgccagccacgaaagatgtgatagaatggcatcctataagatcgctactaggagaccaaaaccacccattctctttaatagtgttaaatcagccgatatgtgacgccgatctctttagtgatctttgggatacagcggacacaaaaattgctgctgatggcggtgcaaaccgcatattcgatctcgtcttaacatcagcaggaaacaataacgggttagaacatggatacagaggtctggacacaataattggcgacctagactcactcaccctagaatcacgcctttatttctcacaaacccgcataatccacgacccagaccagtactctacagacttcaccaaagcagttcatcacgcgcgacggaatcgccccggaacagatctcatctgcatgggcgggcttggcggtcgagtagaccaaggactaagccaacttcaccacttatacctattccagacctcgcctacctacgaagacgggcggatgtatcttctctctggcgaatccctttcattcttactcaaaggcgggaaacggcatctcatccacgttcgagagccggacgctgtggttgagagacggtttgaaagtgtttcggcggatccgtttgggaaacatgtcgggatcataccggttggtgaggcggcgagaattacgcttagggggtttgagtgggatgttgaggactggccgacgaggtttggcggccagatgagtacgagtaatcatgtgctgcccgagacgcaggtcgtggaggttgagagtgataaggatgtgctttttactattgcactgaaatga

SEQ ID NO: 27516 - protein, 270 aa, Muscodor strobelii
  misc_feature: SGI Peptide ID NO. 569426
  misc_feature (208)..(265): Pfam Id: PF04265 Pfam Desc: Thiamin pyrophosphokinase, vitamin B1 binding domain
  misc_feature (32)..(164): Pfam Id: PF04263 Pfam Desc: Thiamin pyrophosphokinase, catalytic domain
  misc_feature (25)..(270): NCBI GI: 85092433 Blast Desc: NCU04944 [Neurospora crassa OR74A] gi|28920797|gb|EAA30156.1| conserved [Neurospora crassa OR74A]
  misc_feature (9)..(270): NCBI GI: 46111145 Blast Desc: FG02454.1 [Gibberella zeae PH-1]
  misc_feature (9)..(270): NCBI GI: 256726049 Blast Desc: [Nectria haematococca mpVI 77-13-4]
  misc_feature (9)..(270): NCBI GI: 171676612 Blast Desc: protein product [Podospora anserina] gi|170936373|emb|CAP61030.1| protein product [Podospora anserina]
  misc_feature (1)..(270): NCBI GI: 145606611 Blast Desc: thiamine pyrophosphokinase, [Magnaporthe grisea 70-15] gi|145014295|gb|EDJ98863.1| thiamine pyrophosphokinase, [Magnaporthe grisea 70-15]
  misc_feature (10)..(270): NCBI GI: 116197158 Blast Desc: CHGG_05177 [Chaetomium globosum CBS 148.51] gi|88181090|gb|EAQ88558.1| CHGG_05177 [Chaetomium globosum CBS 148.51]
  misc_feature (5)..(267): NCBI GI: 156059238 Blast Desc: SS1G_03631 [Sclerotinia sclerotiorum 1980] gi|154701418|gb|EDO01157.1| SS1G_03631 [Sclerotinia sclerotiorum 1980]
  misc_feature (10)..(267): NCBI GI: 154317350 Blast Desc: BC1G_03577 [Botryotinia fuckeliana B05.10] gi|150844994|gb|EDN20187.1| BC1G_03577 [Botryotinia fuckeliana B05.10]
  misc_feature (79)..(269): NCBI GI: 261360061 Blast Desc: thiamin pyrophosphokinase [Verticillium albo-atrum VaMs.102]
  misc_feature (10)..(269): NCBI GI: 75859060 Blast Desc: AN9488.2 [Aspergillus nidulans FGSC A4] gi|40747618|gb|EAA66774.1| AN9488.2 [Aspergillus nidulans FGSC A4]
  misc_feature (21)..(259): SWISSPROT Homolog: EC 2.7.6.2 Thiamine diphosphokinase
MNPPATKDVIEWHPIRSLLGDQNHPFSLIVLNQPICDADLFSDLWDTADTKIAADGGANRIFDLVLTSAGNNNGLEHGYRGLDTIIGDLDSLTLESRLYFSQTRIIHDPDQYSTDFTKAVHHARRNRPGTDLICMGGLGGRVDQGLSQLHHLYLFQTSPTYEDGRMYLLSGESLSFLLKGGKRHLIHVREPDAVVERRFESVSADPFGKHVGIIPVGEAARITLRGFEWDVEDWPTRFGGQMSTSNHVLPETQVVEVESDKDVLFTIALK

SEQ ID NO: 27517 - DNA, 2659 bp, Muscodor strobelii
  misc_feature: SGI EST ID NO. CUFF.64912.0
  misc_feature: Variant of the nucleotide sequence at SEQ ID NO 27515
cacagattccatttcaccaacccaacgtcttaaacatgtgtacactctatggactacctcaactgccttagtgttttattcaggatctgtgatatgaaaatatatacccatagagttttcactatcaccaccacctaagagcttgccattgcgacatttcactcgctctcattcacgaaaatgaatccgccagccacgaaagatgtgatagaatggcatcctataagatcgctactaggagaccaaaaccacccattctctttaatagtgttaaatcagccgatatgtgacgccgatctctttagtgatctttgggatacagcggacacaaaaattgctgctgatggcggtgcaaaccgcatattcgatctcgtcttaacatcagcaggaaacaataacgggttagaacatggatacagaggtctggacacaataattggcgacctagactcactcaccctagaatcacgcctttatttctcacaaacccgcataatccacgacccagaccagtactctacagacttcaccaaagcagttcatcacgcgcgacggaatcgccccggaacagatctcatctgcatgggcgggcttggcggtcgagtagaccaaggactaagccaacttcaccacttatacctattccagacctcgcctacctacgaagacgggcggatgtatcttctctctggcgaatccctttcattcttactcaaaggcgggaaacggcatctcatccacgttcgagagccggacgctgtggttgagagacggtttgaaagtgtttcggcggatccgtttgggaaacatgtcgggatcataccggttggtgaggcggcgagaattacgcttagggggtttgagtgggatgttgaggactggccgacgaggtttggcggccagatgagtacgagtaatcatgtgctgcccgagacgcaggtcgtggaggttgagagtgataaggatgtgctttttactattgcactgaaatgaagacctgcttggtggttggtggaccgtggaccatggaccaaggtttgatgtgtagacgggaatgtgcattgcagggcattagatggcatcttgaaaagaatcagcttctacatgcagtggattttcgagaattaatcacacaagcacaataccacgagaagcatcagaaagacaggtatgatcaaaaacattgagcctgtaaagatcactgcctctggtgtaagtacattttgtatacaaccaaccataaacaccgtactcctcgctataaaccgaaaatgctatgttatgtccccttcctctccacacataggcctctcgcagcccgacgtgatctctttcctgccgactggtagtagtcatcaccgcagataatgcagcaccagccaacaaaacacaaagaacacaataacacccccaacaaaaatccacttatcctccttcgcccgtctctcaaccatccggatcgtcgtgccggaaacaccgagcgtattcgcaacactatacagcttcgcctgagtgctcttcagcatctccctctgcatacccaaatcattcagtaccgcggagccgcgcgagagatactcatcaagcgtatcattcgtattcgcgaagaaatcccgttcacggaccgcatgggcctctctttcatcatactcccgtcccatctccatctgctgtcccccataccgctgcgtcggcgctgacgtagtggcattggcgtagggattctcaggagtagaagtggtgaagggccgtcgacctgagagctcggagcgggactgggattgtatagtgttttcgcgctcggtcttgaaggcgtcgagctgggtgcggaactctgagagctcggtccggaagttgcacaggcgttcttgcgctttgtctgcttttgcggggttgagctcttggtgtgcgagagaggagtactcttcgattgttcgcgagaaggccgtgagggatgcggagagcgagccgagcgctgcgggcgtgggcgcggagccgctgtcccgcgtggaggagagcgtcgcgagatcgcgtttgattgatgtggactgcttgagagcagagttgaattgggtgttctggtgatggatgaggatgttagtattcctgtgaagtttgggagggaaaggtaggcgggagagtagcataccattttgacggagctattgcttttagaatgtgctgtgattcgttgtagttgtgacttggatcgtgagatttgatgcgcaggtgttagacagtgcacgtcattttatgttgggtgcacgaagacaaggcagaaagattccgaaaatgacaacagcgcatcttcttagagggacaaggggatgggggaccaatcgcagcatgtcaaatagcatcaccgcttacccaaatagtgccctacaatcgatagcttgaaagcttagctacctattcaacacacctggaattgaactctaaatggcacctcaggatacacttaattctcctttgaatacattttgctgccctgacttgaacggaaagctcagcatcagacttcgttccatatctctgccctatagagccggttgtatgggaagaatagccttatctaaatttgcacggaaacagacctaggtatttgagagagatgaaatgagatattggtgtacattttcaggcgatgggaatcatg

SEQ ID NO: 27518 - DNA, 726 bp, Muscodor strobelii
  misc_feature: SGI cDNA ID NO. 569427
  misc_feature: Encodes the peptide sequence at SEQ ID NO 27519
atgaacacccaattcaactctgctctcaagcagtccacatcaatcaaacgcgatctcgcgacgctctcctccacgcgggacagcggctccgcgcccacgcccgcagcgctcggctcgctctccgcatccctcacggccttctcgcgaacaatcgaagagtactcctctctcgcacaccaagagctcaaccccgcaaaagcagacaaagcgcaagaacgcctgtgcaacttccggaccgagctctcagagttccgcacccagctcgacgccttcaagaccgagcgcgaaaacactatacaatcccagtcccgctccgagctctcaggtcgacggcccttcaccacttctactcctgagaatccctacgccaatgccactacgtcagcgccgacgcagcggtatgggggacagcagatggagatgggacgggagtatgatgaaagagaggcccatgcggtccgtgaacgggatttcttcgcgaatacgaatgatacgcttgatgagtatctctcgcgcggctccgcggtactgaatgatttgggtatgcagagggagatgctgaagagcactcaggcgaagctgtatagtgttgcgaatacgctcggtgtttccggcacgacgatccggatggttgagagacgggcgaaggaggataagtggatttttgttgggggtgttattgtgttctttgtgttttgttggctggtgctgcattatctgcggtga

SEQ ID NO: 27519 - protein, 241 aa, Muscodor strobelii
  misc_feature: SGI Peptide ID NO. 569427
  misc_feature (40)..(218): Pfam Id: PF05008 Pfam Desc: Vesicle transport v-SNARE protein
  misc_feature (154)..(218): Pfam Id: PF05008 Pfam Desc: Vesicle transport v-SNARE protein
  misc_feature (1)..(241): NCBI GI: 85092431 Blast Desc: NCU04943 [Neurospora crassa OR74A] gi|28920796|gb|EAA30155.1| conserved [Neurospora crassa OR74A]
  misc_feature (1)..(241): NCBI GI: 39960460 Blast Desc: MGG_09346 [Magnaporthe grisea 70-15] gi|145014294|gb|EDJ98862.1| MGG_09346 [Magnaporthe grisea 70-15]
  misc_feature (1)..(241): NCBI GI: 156059216 Blast Desc: SS1G_03620 [Sclerotinia sclerotiorum 1980] gi|154701407|gb|EDO01146.1| SS1G_03620 [Sclerotinia sclerotiorum 1980]
  misc_feature (1)..(241): NCBI GI: 154317370 Blast Desc: BC1G_03587 [Botryotinia fuckeliana B05.10] gi|150845004|gb|EDN20197.1| BC1G_03587 [Botryotinia fuckeliana B05.10]
  misc_feature (1)..(241): NCBI GI: 116197156 Blast Desc: CHGG_05176 [Chaetomium globosum CBS 148.51] gi|88181089|gb|EAQ88557.1| CHGG_05176 [Chaetomium globosum CBS 148.51]
  misc_feature (1)..(241): NCBI GI: 171676610 Blast Desc: protein product [Podospora anserina] gi|170936372|emb|CAP61029.1| protein product [Podospora anserina]
  misc_feature (1)..(241): NCBI GI: 256725634 Blast Desc: NECHADRAFT_70152 [Nectria haematococca mpVI 77-13-4]
  misc_feature (2)..(241): NCBI GI: 238841609 Blast Desc: synaptobrevin [Microsporum canis CBS 113480]
  misc_feature (1)..(241): NCBI GI: 46111143 Blast Desc: FG02453.1 [Gibberella zeae PH-1]
  misc_feature (1)..(241): NCBI GI: 146324854 Blast Desc: v-SNARE protein Bos1 [Aspergillus fumigatus Af293] gi|129556626|gb|EBA27294.1| v-SNARE protein Bos1, [Aspergillus fumigatus Af293] gi|159123294|gb|EDP48414.1| v-SNARE protein
MNTQFNSALKQSTSIKRDLATLSSTRDSGSAPTPAALGSLSASLTAFSRTIEEYSSLAHQELNPAKADKAQERLCNFRTELSEFRTQLDAFKTERENTIQSQSRSELSGRRPFTTSTPENPYANATTSAPTQRYGGQQMEMGREYDEREAHAVRERDFFANTNDTLDEYLSRGSAVLNDLGMQREMLKSTQAKLYSVANTLGVSGTTIRMVERRAKEDKWIFVGGVIVFFVFCWLVLHYLR

SEQ ID NO: 27520 - DNA, 2246 bp, Muscodor strobelii
  misc_feature: SGI EST ID NO. CUFF.64913.1
  misc_feature: Variant of the nucleotide sequence at SEQ ID NO 27518
catgattcccatcgcctgaaaatgtacaccaatatctcatttcatctctctcaaatacctaggtctgtttccgtgcaaatttagataaggctattcttcccatacaaccggctctatagggcagagatatggaacgaagtctgatgctgagctttccgttcaagtcagggcagcaaaatgtattcaaaggagaattaagtgtatcctgaggtgccatttagagttcaattccaggtgtgttgaataggtagctaagctttcaagctatcgattgtagggcactatttgggtaagcggtgatgctatttgacatgctgcgattggtcccccatccccttgtccctctaagaagatgcgctgttgtcattttcggaatctttctgccttgtcttcgtgcacccaacataaaatgacgtgcactgtctaacacctgcgcatcaaatctcacgatccaagtcacaactacaacgaatcacagcacattctaaaagcaatagctccgtcaaaatgaacacccaattcaactctgctctcaagcagtccacatcaatcaaacgcgatctcgcgacgctctcctccacgcgggacagcggctccgcgcccacgcccgcagcgctcggctcgctctccgcatccctcacggccttctcgcgaacaatcgaagagtactcctctctcgcacaccaagagctcaaccccgcaaaagcagacaaagcgcaagaacgcctgtgcaacttccggaccgagctctcagagttccgcacccagctcgacgccttcaagaccgagcgcgaaaacactatacaatcccagtcccgctccgagctctcaggtcgacggcccttcaccacttctactcctgagaatccctacgccaatgccactacgtcagcgccgacgcagcggtatgggggacagcagatggagatgggacgggagtatgatgaaagagaggcccatgcggtccgtgaacgggatttcttcgcgaatacgaatgatacgcttgatgagtatctctcgcgcggctccgcggtactgaatgatttgggtatgcagagggagatgctgaagagcactcaggcgaagctgtatagtgttgcgaatacgctcggtgtttccggcacgacgatccggatggttgagagacgggcgaaggaggataagtggatttttgttgggggtgttattgtgttctttgtgttttgttggctggtgctgcattatctgcggtgatgactactaccagtcggcaggaaagagatcacgtcgggctgcgagaggcctatgtgtggagaggaaggggacataacatagcattttcggtttatagcgaggagtacggtgtttatggttggttgtatacaaaatgtacttacaccagaggcagtgatctttacaggctcaatgtttttgatcatacctgtctttctgatgcttctcgtggtattgtgcttgtgtgattaattctcgaaaatccactgcatgtagaagctgattcttttcaagatgccatctaatgccctgcaatgcacattcccgtctacacatcaaaccttggtccatggtccacggtccaccaaccaccaagcaggtcttcatttcagtgcaatagtaaaaagcacatccttatcactctcaacctccacgacctgcgtctcgggcagcacatgattactcgtactcatctggccgccaaacctcgtcggccagtcctcaacatcccactcaaaccccctaagcgtaattctcgccgcctcaccaaccggtatgatcccgacatgtttcccaaacggatccgccgaaacactttcaaaccgtctctcaaccacagcgtccggctctcgaacgtggatgagatgccgtttcccgcctttgagtaagaatgaaagggattcgccagagagaagatacatccgcccgtcttcgtaggtaggcgaggtctggaataggtataagtggtgaagttggcttagtccttggtctactcgaccgccaagcccgcccatgcagatgagatctgttccggggcgattccgtcgcgcgtgatgaactgctttggtgaagtctgtagagtactggtctgggtcgtggattatgcgggtttgtgagaaataaaggcgtgattctagggtgagtgagtctaggtcgccaattattgtgtccagacctctctatttgctgttagttcgaatcaagatttgtgtgacgatttgggtcaagtgtgtaacttacgtatccatgttcta

SEQ ID NO: 27521 - DNA, 1659 bp, Muscodor strobelii
  misc_feature: SGI cDNA ID NO. 569428
  misc_feature: Encodes the peptide sequence at SEQ ID NO 27522
atgtcggaaccaacgtcaaacccagttagcggaaaggaaaccgacatcgacgacaattcgtccagaaacctcaccgactcaagaccaccaacaccatccggcaaaaaggcagcagacgagaatgcaatccagacagaaaaaccagcggcagctgacgatgaacccgctagcgagaaaccggtcaatctagcaccaatatacagtatattcacaactggggaaaaacgggcaatcgtattcggtgctgctgccggggccttcttctcgcctttatccgcacagatatacttcccagctctagatacgatagccagtgatctccatgtttctgttacccaagtcaacttaacggttactacgtatatgattgtccaagcctttgctcctatgtttatcggctcattggcggacactgctggacgtcggccgtcgtacattctgtgcttcatcatttacatgggcgccaacatcggctgtgccctggtaccgaattatggcggacttctagctctgcgagctctacaatctgctggatccagtgcaactgtcgccttatgtcaagctgtggtatccgacgtcgtcacctcggccgagcgaggctcctacgtagcctatacatcccttcccatcattctcgcaccatctcttgggccggttataggtggtatcatcgcacaatacctaggctggcggtggatcttctggtttctcactattttgtccggtgctgttgcagtcttgtttctcttcttcatgccagagacatgtcgcctaatcgtcggcgacgggtcaatccgtcctccaactttctggcgcaccttctggcaactcaccaaagatgcttatcggaagagaaaagcaacaaatgaaacacagcatgagcacaaggacacaaaacctactcgtatacaacgtcccaacttcgcaaagacgctgactattctcttcgagaaggagatgttcgtgttgctcatgtacggcagtctcctctacgcagggttctacgccgtagcaacctgcctcagcaatgagtttgccaagaactacggtttcgatggtctcaaaatcggtcttgtcttcatccccgtcggcgtagggtctatcgtatcggcgttcacgatgggaaggctggcgaactggaattatcgcagacattgcaggaaattgaatattccatatgatcgcgctcggcaacagagtatggaaggtttcccgatagagagagcaagattggaacccggtattcctttcctcatcttgtacgcggctacgatcattggctggggctggagcttgcaatataaggctcaccttgctgtcgagattattctactgttcctcgtcggattagccgtgacagggttctcgaatctgctcagtactatcatcgttgatatcaaccccggtgtggcgggtgcggctacagctgcgaataacctgacgcgttgtttggttggtgcgggagcaaccgcggctatcaaccctttgatagacgctgttgggtcaggctgggcattcaccatcattgcgttgctattcatagctctttcgccatgtctatggttggttctgaagaagggcgttgattggcgcagggaaaaggcagaaaaaaaggagagacaagaggcaaaagctcaggaaaaagtcctacggggttag

SEQ ID NO: 27522 - protein, 552 aa, Muscodor strobelii
  misc_feature: SGI Peptide ID NO. 569428
  misc_feature (82)..(490): Pfam Id: PF07690 Pfam Desc: Major Facilitator Superfamily
  misc_feature (43)..(533): NCBI GI: 256726048 Blast Desc: NECHADRAFT_43520 [Nectria haematococca mpVI 77-13-4]
  misc_feature (67)..(547): NCBI GI: 46111151 Blast Desc: FG02457.1 [Gibberella zeae PH-1]
  misc_feature (6)..(545): NCBI GI: 85089437 Blast Desc: NCU04886 [Neurospora crassa OR74A] gi|28919240|gb|EAA28715.1| [Neurospora crassa OR74A]
  misc_feature (46)..(542): NCBI GI: 255950382 Blast Desc: Pc22g20580 [Penicillium chrysogenum Wisconsin 54-1255] gi|211592975|emb|CAP99346.1| Pc22g20580 [Penicillium chrysogenum Wisconsin 54-1255]
  misc_feature (67)..(547): NCBI GI: 255944495 Blast Desc: Pc20g04730 [Penicillium chrysogenum Wisconsin 54-1255] gi|211587750|emb|CAP85802.1| Pc20g04730 [Penicillium chrysogenum Wisconsin 54-1255]
  misc_feature (1)..(538): NCBI GI: 154304903 Blast Desc: BC1G_09037 [Botryotinia fuckeliana B05.10] gi|150853899|gb|EDN29091.1| BC1G_09037 [Botryotinia fuckeliana B05.10]
  misc_feature (38)..(543): NCBI GI: 70986024 Blast Desc: MFS multidrug transporter [Aspergillus fumigatus Af293] gi|66846143|gb|EAL86476.1| MFS multidrug transporter, [Aspergillus fumigatus Af293] gi|159128353|gb|EDP53468.1| MFS
  misc_feature (66)..(534): NCBI GI: 238489581 Blast Desc: MFS transporter, [Aspergillus flavus NRRL3357] gi|220698416|gb|EED54756.1| MFS transporter, [Aspergillus flavus NRRL3357]
  misc_feature (38)..(543): NCBI GI: 119473941 Blast Desc: MFS transporter, [Neosartorya fischeri NRRL 181] gi|119406999|gb|EAW16949.1| MFS transporter, [Neosartorya fischeri NRRL 181]
  misc_feature (66)..(539): NCBI GI: 169763636 Blast Desc: [Aspergillus oryzae RIB40] gi|83770746|dbj|BAE60879.1| protein product [Aspergillus oryzae]
MSEPTSNPVSGKETDIDDNSSRNLTDSRPPTPSGKKAADENAIQTEKPAAADDEPASEKPVNLAPIYSIFTTGEKRAIVFGAAAGAFFSPLSAQIYFPALDTIASDLHVSVTQVNLTVTTYMIVQAFAPMFIGSLADTAGRRPSYILCFIIYMGANIGCALVPNYGGLLALRALQSAGSSATVALCQAVVSDVVTSAERGSYVAYTSLPIILAPSLGPVIGGIIAQYLGWRWIFWFLTILSGAVAVLFLFFMPETCRLIVGDGSIRPPTFWRTFWQLTKDAYRKRKATNETQHEHKDTKPTRIQRPNFAKTLTILFEKEMFVLLMYGSLLYAGFYAVATCLSNEFAKNYGFDGLKIGLVFIPVGVGSIVSAFTMGRLANWNYRRHCRKLNIPYDRARQQSMEGFPIERARLEPGIPFLILYAATIIGWGWSLQYKAHLAVEIILLFLVGLAVTGFSNLLSTIIVDINPGVAGAATAANNLTRCLVGAGATAAINPLIDAVGSGWAFTIIALLFIALSPCLWLVLKKGVDWRREKAEKKERQEAKAQEKVLRG

SEQ ID NO: 27523 - DNA, 410 bp, Muscodor strobelii
  misc_feature: SGI EST ID NO. CUFF.64900.0
  misc_feature: Variant of the nucleotide sequence at SEQ ID NO 27521
agaaacctcaccgactcaagaccaccaacaccatccggcaaaaaggcagcagacgagaatgcaatccagacagaaaaaccagcggcagctgacgatgaacccgctagcgagaaaccggtcaatctagcaccaatatacagtatattcacaactggggaaaaacgggcaatcgtattcggtgctgctgccggggccttcttctcgcctttatccgcacagatatacttcccagctctagatacgatagccagtgatctccatgtttctgttacccaagtcaacttaacggttactacgtatatgattgtccaagcctttgctcctatgtttatcggctcattggcggacactgctggacgtcggccgtcgtacattctgtgcttcatcatttacatgggcgccaacatcgg

SEQ ID NO: 27524 - DNA, 1140 bp, Muscodor strobelii
  misc_feature: SGI cDNA ID NO. 569429
  misc_feature: Encodes the peptide sequence at SEQ ID NO 27525
atgaagcttctcgtagcgacactggcaatcttgccagccttaatatcgactgttcaatgtacccctactcaccagttcgatcagttctttccaggatggaacggattgatccaaggatatctaaaagacaactgtagcgaggaatatgctgcgtataagaccggcaaagtgaaccatactcttggtgccgaatcacttgtcaacccagtgatcgattgcgttctagagcagtttcctaattctcgccaggcagaactggcggccagtaatctcgtcctcgggctcattccgacgatccttcaaagcttaggcagttcgacggtagagacagcgcttgttggaatccgacgcccattattgggattcttgctttctgccggtagcccgactgtagcgattgcaaaaagtagcagctttgcgaagtcattagccgacttcgttgatggaggagacccacgagacctcgagattcctggcttcggctggagtcgcgtgcctggaaaatgggccctcttgataacgattgccgaatacatcgttgtcggaggtgctgttacaaatgtcgtgttactcgcatgggaattgggagtgcatgctgtggccatcttcgcaccagatacgatttttggtgtgccgctttggacctttcttgctgtcattatccacttagtctcggttctctgcatctggttgagagttcgagttgtcccagcgaaggagggagacgactttgctcggcgcacagaggtcgcacggacaggtctaccaacagagttcattcctgctgcattccacacatccagaaggcttgaatggcgagatgagagtctttggttctacggcttaagctggctcgtctctttcggcagtctgatccaggttgttctcggtactctgatcttgtcaggattgttattcttcagcttggtggattcgttgacgattgtgctgagatatatgctaagtgctattgcttgccgcgctatagtccgattggaactatctgggatgatcatgtcggttgctccaaatacaggcaagaacaacaggaacaccttcaggcaggcggcggagccagccatggaagcagagcagatcatgctcacgacggattggaagaatcaagctcacgtcatgtga

SEQ ID NO: 27525 - protein, 379 aa, Muscodor strobelii
  misc_feature: SGI Peptide ID NO. 569429
  misc_feature (14)..(337): NCBI GI: 145609221 Blast Desc: MGG_07429 [Magnaporthe grisea 70-15] gi|145016612|gb|EDK01042.1| MGG_07429 [Magnaporthe grisea 70-15]
  misc_feature (25)..(347): NCBI GI: 238490752 Blast Desc: conserved [Aspergillus flavus NRRL3357] gi|220697026|gb|EED53367.1| conserved [Aspergillus flavus NRRL3357]
  misc_feature (25)..(347): NCBI GI: 169772847 Blast Desc: [Aspergillus oryzae RIB40] gi|83768753|dbj|BAE58890.1| protein product [Aspergillus oryzae]
  misc_feature (21)..(337): NCBI GI: 256726714 Blast Desc: NECHADRAFT_25871 [Nectria haematococca mpVI 77-13-4]
  misc_feature (32)..(368): NCBI GI: 256732224 Blast Desc: NECHADRAFT_93753 [Nectria haematococca mpVI 77-13-4]
  misc_feature (3)..(337): NCBI GI: 46127805 Blast Desc: FG08280.1 [Gibberella zeae PH-1]
  misc_feature (25)..(336): NCBI GI: 46111045 Blast Desc: FG02404.1 [Gibberella zeae PH-1]
  misc_feature (13)..(341): NCBI GI: 116199195 Blast Desc: CHGG_07753 [Chaetomium globosum CBS 148.51] gi|88179032|gb|EAQ86500.1| CHGG_07753 [Chaetomium globosum CBS 148.51]
  misc_feature (70)..(334): NCBI GI: 256732899 Blast Desc: NECHADRAFT_5957 [Nectria haematococca mpVI 77-13-4]
  misc_feature (21)..(341): NCBI GI: 171686992 Blast Desc: protein product [Podospora anserina] gi|170943457|emb|CAP69110.1| protein product [Podospora anserina]
MKLLVATLAILPALISTVQCTPTHQFDQFFPGWNGLIQGYLKDNCSEEYAAYKTGKVNHTLGAESLVNPVIDCVLEQFPNSRQAELAASNLVLGLIPTILQSLGSSTVETALVGIRRPLLGFLLSAGSPTVAIAKSSSFAKSLADFVDGGDPRDLEIPGFGWSRVPGKWALLITIAEYIVVGGAVTNVVLLAWELGVHAVAIFAPDTIFGVPLWTFLAVIIHLVSVLCIWLRVRVVPAKEGDDFARRTEVARTGLPTEFIPAAFHTSRRLEWRDESLWFYGLSWLVSFGSLIQVVLGTLILSGLLFFSLVDSLTIVLRYMLSAIACRAIVRLELSGMIMSVAPNTGKNNRNTFRQAAEPAMEAEQIMLTTDWKNQAHVM

SEQ ID NO: 27526 - DNA, 2521 bp, Muscodor strobelii
  misc_feature: SGI EST ID NO. CUFF.64909.0
  misc_feature: Variant of the nucleotide sequence at SEQ ID NO 27524
gaggagtttacgtaaacccggaagcaaacaacagagtacacgccgattacacgtacgactccaaaatgtcgaactgtttttagcacaaagctagccctatctgcggtctgccatgcacatttgacagtggttgccgcgttctgggcatggtcgggcgtggttcgagtgggcactctcaacgtcgggaactttcgtgcaggggttgtcgtgagccgcttggacagtcttggtatgactcccgcattagttgcatgttggctccagtgtttgccagtgtacaattggtgccagtcgagccgttttggggtctcaagtctggtcttcagaatccttcaccaaccgcccaaatattcagcttgataattctattcggcttctattacccagcgagggaattgacatggttattatgctgctctttctggtcaagtttatggcccccaactttgccttatggccctggtcgttcggcgatcggagtgtgacttgaagaagaggaggaggctctgcaattgtgcgaaatataaagagaatgttgggtagcaatgggagtctctgtagttgtggcatatttgcgtctttctgtcattttgtgcttctattagcgtgcgcagtgtctgttgaaccatgaagcttctcgtagcgacactggcaatcttgccagccttaatatcgactgttcaatgtacccctactcaccagttcgatcagttctttccaggatggaacggattgatccaaggatatctaaaagacaactgtagcgaggaatatgctgcgtataagaccggcaaagtgaaccatactcttggtgccgaatcacttgtcaacccagtgatcgattgcgttctagagcagtttcctaattctcgccaggcagaactggcggccagtaatctcgtcctcgggctcattccgacgatccttcaaagcttaggcagttcgacggtagagacagcgcttgttggaatccgacgcccattattgggattcttgctttctgccggtagcccgactgtagcgattgcaaaaagtagcagctttgcgaagtcattagccgacttcgttgatggaggagacccacgagacctcgagattcctggcttcggctggagtcgcgtgcctggaaaatgggccctcttgataacgattgccgaatacatcgttgtcggaggtgctgttacaaatgtcgtgttactcgcatgggaattgggagtgcatgctgtggccatcttcgcaccagatacgatttttggtgtgccgctttggacctttcttgctgtcattatccacttagtctcggttctctgcatctggttgagagttcgagttgtcccagcgaaggagggagacgactttgctcggcgcacagaggtcgcacggacaggtctaccaacagagttcattcctgctgcattccacacatccagaaggcttgaatggcgagatgagagtctttggttctacggcttaagctggctcgtctctttcggcagtctgatccaggttgttctcggtactctgatcttgtcaggattgttattcttcagcttggtggattcgttgacgattgtgctgagatatatgctaagtgctattgcttgccgcgctatagtccgattggaactatctgggatgatcatgtcggttgctccaaatacaggcaagaacaacaggaacaccttcaggcaggcggcggagccagccatggaagcagagcagatcatgctcacgacggattggaagaatcaagctcacgtcatgtgagagtatcgagacaggggtaaaaaaggtttatgctcggccaatcaacgagcaaaccccgtgcaatatcctcagccgggtcagtcgatagctgatcttcatctcttcgattgccaattgccaccgtcaccaagcatcaagaccttagcggtccaccttacaccggacaagtgtgtgagcggaaagggcgcacaagaaggactctggggctcttccagttgagacgctggacaaggctggcggccgatggcgaagcagaattagggtgtggcagacgttgcttttgaatccgagccggatcgccggggacttacgcttctaagatggtgcttgtttcgcaatcaagttttgcgtctttacatgacttctgacgagccagtgttttagagagtgatgttgctaggcgaggatgagttggtatcctgggtcaatgagcatatactcggttctttggacagcggtagaatcattatttatttgagaagtcaggtatgaagtaatgaatggaataatttgtgcgataagctagtccttatggctagtcccagacgccaacctaattatgaactgaaccacgatgctgcattgtagagagaaatctggtgagcaagggagttgaggtgcctaagagatgtcgtacaaactggaagtttaagtcagcaatgtaccttaggtacatggcggtaagcaactcatcatcacgcggtttcctctatgtatgatgatccgagagaagcaatcggggcgactgttacca

SEQ ID NO: 27527 - DNA, 1248 bp, Muscodor strobelii
  misc_feature: SGI cDNA ID NO. 569430
  misc_feature: Reduced expression when VOC is produced
  misc_feature: Encodes the peptide sequence at SEQ ID NO 27528
atggccaccgaacgcgtaacatcgcttcttaagcacctttcgcccaatagcccagtggcggccatacaatcaaagagtcccgatgatgtcgttattaccactgcgattcggacgccactgtgcaagggtttcaagggaggcttcaaggacacgagtctcgagtttatcatgtactccgtcttgaaagcgaccaaggagcgcatgggcttctcccccgaccttgtagaggatatttgcatgggaaatgtctccgacggcaaggcagcatacaaggcccgtgccgcagctctctccgccggcttccccaacaccgtcggcgcatcatccgtcaaccgcttctgctcctcaggcctcaaggccaccgccgatatcgcacaccaaattgcaaatggttcgatcgagattggcattgccgccggcgccgaatccatgacattagggggggataaggtcgaggtccccttcgatgctgaggtcctcggtgtcagccaagaggccagagactgcatggagccaatgggttggacgagcgagaacgtagcccgtgacttcggccttacccgcgagcagctcgacgaatacgctgctgagagtttccgtcgcgcagaggcagcacagaaggctggttggttcgatgacgagatcgtccccattaccaccaaggtcaagggtcccgacggcgagttgaagacggtcactttgacgaaagacgagggtattcgaccaggcaccaccgctgctgggttgggcaagatccgtcctgcattccctcaatggggcaatatgacaactggtggcaatgccagtcaagtcactgacggcgcttcggccatcgttctgatgaagcgctcaaaggccatccagcttggtctgcctatcatggctaagtatgttggttctactatcgccgggttgccaccaaggattatgggtattggcccaacggtcgccattcccaagctcttgaacaaatacaaccttacgcttgatgactgcgacgtcgtcgagctcaacgaggcgttcgccacgatggccgtctactcaaaggatttcttgaaactagaccacgccaagatgaaccctcgcggtggtgccattgcacttggccaccctctcggcacgacaggtgctcgccagattgtcactggacttagtgagctgcgccggacgaagaagaagatcttattgacgagtatgtgcatcggaacgggtatgggcatggctgggttatttgtaaacgagcaatga

SEQ ID NO: 27528 - protein, 415 aa, Muscodor strobelii
  misc_feature: SGI Peptide ID NO. 569430
  misc_feature (291)..(413): Pfam Id: PF02803 Pfam Desc: Thiolase, C-terminal domain
  misc_feature (27)..(284): Pfam Id: PF00108 Pfam Desc: Thiolase, N-terminal domain
  misc_feature (169)..(284): Pfam Id: PF00108 Pfam Desc: Thiolase, N-terminal domain
  misc_feature (27)..(146): Pfam Id: PF00108 Pfam Desc: Thiolase, N-terminal domain
  misc_feature (1)..(415): NCBI GI: 46116802 Blast Desc: FG04243.1 [Gibberella zeae PH-1]
  misc_feature (1)..(415): NCBI GI: 39971359 Blast Desc: MGG_10700 [Magnaporthe grisea 70-15] gi|145009410|gb|EDJ94110.1| MGG_10700 [Magnaporthe grisea 70-15]
  misc_feature (1)..(415): NCBI GI: 171676718 Blast Desc: protein product [Podospora anserina] gi|170936426|emb|CAP61083.1| protein product [Podospora anserina]
  misc_feature (1)..(415): NCBI GI: 85091050 Blast Desc: 3-ketoacyl-CoA thiolase [Neurospora crassa OR74A] gi|28920094|gb|EAA29476.1| 3-ketoacyl-CoA thiolase [Neurospora crassa OR74A]
  misc_feature (1)..(415): NCBI GI: 156049001 Blast Desc: SS1G_08207 [Sclerotinia sclerotiorum 1980] gi|154692606|gb|EDN92344.1| SS1G_08207 [Sclerotinia sclerotiorum 1980]
  misc_feature (1)..(415): NCBI GI: 154317156 Blast Desc: BC1G_03480 [Botryotinia fuckeliana B05.10] gi|150844897|gb|EDN20090.1| BC1G_03480 [Botryotinia fuckeliana B05.10]
  misc_feature (1)..(415): NCBI GI: 116197302 Blast Desc: 3-ketoacyl-coA thiolase [Chaetomium globosum CBS 148.51] gi|88181162|gb|EAQ88630.1| 3-ketoacyl-coA thiolase [Chaetomium globosum CBS 148.51]
  misc_feature (1)..(415): NCBI GI: 70995760 Blast Desc: 3-ketoacyl-CoA ketothiolase (Kat1) [Aspergillus fumigatus Af293] gi|42820670|emb|CAF31983.1| 3-ketoacyl-coA thiolase, [Aspergillus fumigatus] gi|66850270|gb|EAL90597.1|
  misc_feature (1)..(415): NCBI GI: 145240021 Blast Desc: An08g05400 [Aspergillus niger] gi|134077171|emb|CAK45512.1| protein product [Aspergillus niger]
  misc_feature (1)..(415): NCBI GI: 121701457 Blast Desc: 3-ketoacyl-CoA ketothiolase (Kat1), [Aspergillus clavatus NRRL 1] gi|119397136|gb|EAW07567.1| 3-ketoacyl-CoA ketothiolase (Kat1), [Aspergillus clavatus NRRL 1]
  misc_feature (4)..(411): SWISSPROT Homolog: EC 2.3.1.16 Acetyl-CoA C-acyltransferase
  misc_feature: Useful for fungicidal and/or biocontrol applications
  misc_feature: Useful for introducing or modulating the production of volatile compounds
MATERVTSLLKHLSPNSPVAAIQSKSPDDVVITTAIRTPLCKGFKGGFKDTSLEFIMYSVLKATKERMGFSPDLVEDICMGNVSDGKAAYKARAAALSAGFPNTVGASSVNRFCSSGLKATADIAHQIANGSIEIGIAAGAESMTLGGDKVEVPFDAEVLGVSQEARDCMEPMGWTSENVARDFGLTREQLDEYAAESFRRAEAAQKAGWFDDEIVPITTKVKGPDGELKTVTLTKDEGIRPGTTAAGLGKIRPAFPQWGNMTTGGNASQVTDGASAIVLMKRSKAIQLGLPIMAKYVGSTIAGLPPRIMGIGPTVAIPKLLNKYNLTLDDCDVVELNEAFATMAVYSKDFLKLDHAKMNPRGGAIALGHPLGTTGARQIVTGLSELRRTKKKILLTSMCIGTGMGMAGLFVNEQ

SEQ ID NO: 27529 - DNA, 3458 bp, Muscodor strobelii
  misc_feature: SGI EST ID NO. CUFF.65376.0
  misc_feature: Variant of the nucleotide sequence at SEQ ID NO 27527
ttacgatcttttaatccctctaatcttgtgttattttcttcccttttcgtattattcaccttgcaaagtatctctgccagtgaatatatctcatagatcaccatggccaccgaacgcgtaacatcgcttcttaagcacctttcgcccaatagcccagtggcggccatacaatcaaagagtcccgatgatgtcgttattaccactgcgattcggacgccactgtgcaagggtttcaagggaggcttcaaggacacgagtctcgagtttatcatgtactccgtcttgaaagcgaccaaggagcgcatgggcttctcccccgaccttgtagaggatatttgcatgggaaatgtctccgacggcaaggcagcatacaaggcccgtgccgcagctctctccgccggcttccccaacaccgtcggcgcatcatccgtcaaccgcttctgctcctcaggcctcaaggccaccgccgatatcgcacaccaaattgcaaatggttcgatcgagattggcattgccgccggcgccgaatccatgacattagggggggataaggtcgaggtccccttcgatgctgaggtcctcggtgtcagccaagaggccagagactgcatggagccaatgggttggacgagcgagaacgtagcccgtgacttcggccttacccgcgagcagctcgacgaatacgctgctgagagtttccgtcgcgcagaggcagcacagaaggctggttggttcgatgacgagatcgtccccattaccaccaaggtcaagggtcccgacggcgagttgaagacggtcactttgacgaaagacgagggtattcgaccaggcaccaccgctgctgggttgggcaagatccgtcctgcattccctcaatggggcaatatgacaactggtggcaatgccagtcaagtcactgacggcgcttcggccatcgttctgatgaagcgctcaaaggccatccagcttggtctgcctatcatggctaagtatgttggttctactatcgccgggttgccaccaaggattatgggtattggcccaacggtcgccattcccaagctcttgaacaaatacaaccttacgcttgatgactgcgacgtcgtcgagctcaacgaggcgttcgccacgatggccgtctactcaaaggatttcttgaaactagaccacgccaagatgaaccctcgcggtggtgccattgcacttggccaccctctcggcacgacaggtgctcgccagattgtcactggacttagtgagctgcgccggacgaagaagaagatcttattgacgagtatgtgcatcggaacgggtatgggcatggctgggttatttgtaaacgagcaatgatttgtaaaacagcgatcatggcataaaaattgcgagacgaatttgacaactgatctaaccattatttacgtgctcagtcgtagaaacactaggaggtgtctatttgcccaccattaggctcgtcggtccgcgggttggcacttgcacgtagaaatatggtcgtgatggtaataagttcttgccttctatgtgagctatacccttgtgtctctgctctctagctcccaaaacgccttgcaaatcttgttgatcctggtatcttgatcatatccatccgatgaacgcctgctctatatccgtgaatatcatcgtctctctttcgatgaagcacgtatctgcctcccttcatttcttatagaagaaatatacctccaagtatgatcggagcaacattgatctgtatgtccactgctgtcccagagcgagtgagacccaacaccaaaaaaggggttgaaaaggattttctattaaaaaaaaaagcacacaaatggcgaactgaaacaagagccttggataagtggagcgaacgttctcaacacaaccgtagcattccccgatctacacaggaggcacgacccggcgtcgaaccccatggctccagtgccgaagcaccttcattaccactaggtcatttgtgtgtaccaatccaagtgctaattgaattgataaagccaatgcacggcacaatctcgggtgaaacgtggttgctgggcaatgcggaaaatgatcgcgtgacgatgcggttggttattcggtacgctacgagcatctgccacagtgatttcttataaaagaaataggacgccaaataggcccagaacaacactgagcacgctgatctgcaaacgtcctgctgctcgagattgaggatcaataccagtggcgcttcccccaagataccaagatccaatgtctgtcaattcgccgtcgtcgttgagcataaccgcgttcgggccaacgttgctaacgtcggaccggaaagaaccgaaaagactataacggccaacgctatcgagacggtcaaagtattcggaagacatattgtagaactcttgagtcgtctgaaggttctggttatcgaagttgtattccgtgatccattgcgatacgttagggaatctgcatgagtgtcagcttacaatgcatcagatggaaaaacgaggcttacgcagcggaatattcgcccaaatgacttgccagcccttcaaaattgccgtaccagtggatagcaacgaagtcatacgtgcagttcttcttatcgtcatccgtactgatcagcgctgagcaattcccgaggaagttctgcagccaggtaatgccggtttgcgctccagtacaagctggtaagccgactttgatacccttttctctcagaggcgcaatattgtcgacccatacttgagcagctttcgcagggtagacattgctaccaccgtatcgatctaggtcgggttcgttgaaagtcaatacatggctaatattgcgtccaccgtctatcagatctgtgacatttttgaggaatgatgcgtcgtcaatggcgccccatagctggggaacgaattcaaaatcatcttgcgattggcttgagtatgcagatgatggttgcgaggcgtaattataataccatgtgagatctgaaccgtcttgtacccatatcttgttgtcttctggcgtttcgttatctgcgatgaatacgaggcctcgcttgtctgatcgggttgcatgtgttattgctgagaaagcggcgaggagagcaaatgagttgcgcatcatgtctaggtcttatgaaatataaacctaaattataatagaccgagaatccacacgataatggcgagcgtatcgtgggcttcgaaattaagtattctaggggatcgaacgggaatttttgttgatatgagccgggccgctcagcgtagttcgtcacgctaccaacgggttatggagcaagtcgcggaaacaaaattgaagtaaaaatgctcaaaagaaaggaaacgaacggatttaccagaaagaagtttgtaggaaatatctagtggcagttacaaaagattgatgagctggagccaagacgagcccttgcacaattccatgagtctggtccgtgg

SEQ ID NO: 27530 - DNA, 936 bp, Muscodor strobelii
  misc_feature: SGI cDNA ID NO. 569431
  misc_feature: Encodes the peptide sequence at SEQ ID NO 27531
atgcgcaactcatttgctctcctcgccgctttctcagcaataacacatgcaacccgatcagacaagcgaggcctcgtattcatcgcagataacgaaacgccagaagacaacaagatatgggtacaagacggttcagatctcacatggtattataattacgcctcgcaaccatcatctgcatactcaagccaatcgcaagatgattttgaattcgttccccagctatggggcgccattgacgacgcatcattcctcaaaaatgtcacagatctgatagacggtggacgcaatattagccatgtattgactttcaacgaacccgacctagatcgatacggtggtagcaatgtctaccctgcgaaagctgctcaagtatgggtcgacaatattgcgcctctgagagaaaagggtatcaaagtcggcttaccagcttgtactggagcgcaaaccggcattacctggctgcagaacttcctcgggaattgctcagcgctgatcagtacggatgacgataagaagaactgcacgtatgacttcgttgctatccactggtacggcaattttgaagggctggcaagtcatttgggcgaatattccgctgcattccctaacgtatcgcaatggatcacggaatacaacttcgataaccagaaccttcagacgactcaagagttctacaatatgtcttccgaatactttgaccgtctcgatagcgttggccgttatagtcttttcggttctttccggtccgacgttagcaacgttggcccgaacgcggttatgctcaacgacgacggcgaattgacagacattggatcttggtatcttgggggaagcgccactggtattgatcctcaatctcgagcagcaggacgtttgcagatcagcgtgctcagtgttgttctgggcctatttggcgtcctatttcttttataa

SEQ ID NO: 27531 - protein, 311 aa, Muscodor strobelii
  misc_feature: SGI Peptide ID NO. 569431
  misc_feature (4)..(291): NCBI GI: 116197304 Blast Desc: CHGG_05250 [Chaetomium globosum CBS 148.51] gi|88181163|gb|EAQ88631.1| CHGG_05250 [Chaetomium globosum CBS 148.51]
  misc_feature (9)..(292): NCBI GI: 85091052 Blast Desc: NCU09647 [Neurospora crassa OR74A] gi|28920095|gb|EAA29477.1| conserved [Neurospora crassa OR74A]
  misc_feature (20)..(302): NCBI GI: 171676720 Blast Desc: protein product [Podospora anserina] gi|170936427|emb|CAP61084.1| protein product [Podospora anserina]
  misc_feature (22)..(311): NCBI GI: 39971357 Blast Desc: MGG_10699 [Magnaporthe grisea 70-15] gi|145009411|gb|EDJ94111.1| MGG_10699 [Magnaporthe grisea 70-15]
  misc_feature (15)..(311): NCBI GI: 261360043 Blast Desc: conserved [Verticillium albo-atrum VaMs.102]
  misc_feature (6)..(285): NCBI GI: 212544029 Blast Desc: conserved [Penicillium marneffei ATCC 18224] gi|210067076|gb|EEA21169.1| conserved [Penicillium marneffei ATCC 18224]
  misc_feature (7)..(293): NCBI GI: 154309153 Blast Desc: BC1G_07471 [Botryotinia fuckeliana B05.10] gi|150852514|gb|EDN27706.1| BC1G_07471 [Botryotinia fuckeliana B05.10]
  misc_feature (17)..(310): NCBI GI: 46116804 Blast Desc: FG04244.1 [Gibberella zeae PH-1]
  misc_feature (20)..(293): NCBI GI: 156031221 Blast Desc: SS1G_14032 [Sclerotinia sclerotiorum 1980] gi|154699434|gb|EDN99172.1| SS1G_14032 [Sclerotinia sclerotiorum 1980]
  misc_feature (6)..(280): NCBI GI: 242788360 Blast Desc: conserved [Talaromyces stipitatus ATCC 10500] gi|218721350|gb|EED20769.1| conserved [Talaromyces stipitatus ATCC 10500]
MRNSFALLAAFSAITHATRSDKRGLVFIADNETPEDNKIWVQDGSDLTWYYNYASQPSSAYSSQSQDDFEFVPQLWGAIDDASFLKNVTDLIDGGRNISHVLTFNEPDLDRYGGSNVYPAKAAQVWVDNIAPLREKGIKVGLPACTGAQTGITWLQNFLGNCSALISTDDDKKNCTYDFVAIHWYGNFEGLASHLGEYSAAFPNVSQWITEYNFDNQNLQTTQEFYNMSSEYFDRLDSVGRYSLFGSFRSDVSNVGPNAVMLNDDGELTDIGSWYLGGSATGIDPQSRAAGRLQISVLSVVLGLFGVLFLL

SEQ ID NO: 27532 - DNA, 3574 bp, Muscodor strobelii
  misc_feature: SGI EST ID NO. CUFF.65377.1
  misc_feature: Variant of the nucleotide sequence at SEQ ID NO 27530
ccacggaccagactcatggaattgtgcaagggctcgtcttggctccagctcatcaatcttttgtaactgccactagatatttcctacaaacttctttctggtaaatccgttcgtttcctttcttttgagcatttttacttcaattttgtttccgcgacttgctccataacccgttggtagcgtgacgaactacgctgagcggcccggctcatatcaacaaaaattcccgttcgatcccctagaatacttaatttcgaagcccacgatacgctcgccattatcgtgtggattctcggtctattataatttaggtttatatttcataagacctagacatgatgcgcaactcatttgctctcctcgccgctttctcagcaataacacatgcaacccgatcagacaagcgaggcctcgtattcatcgcagataacgaaacgccagaagacaacaagatatgggtacaagacggttcagatctcacatggtattataattacgcctcgcaaccatcatctgcatactcaagccaatcgcaagatgattttgaattcgttccccagctatggggcgccattgacgacgcatcattcctcaaaaatgtcacagatctgatagacggtggacgcaatattagccatgtattgactttcaacgaacccgacctagatcgatacggtggtagcaatgtctaccctgcgaaagctgctcaagtatgggtcgacaatattgcgcctctgagagaaaagggtatcaaagtcggcttaccagcttgtactggagcgcaaaccggcattacctggctgcagaacttcctcgggaattgctcagcgctgatcagtacggatgacgataagaagaactgcacgtatgacttcgttgctatccactggtacggcaattttgaagggctggcaagtcatttgggcgaatattccgctgcattccctaacgtatcgcaatggatcacggaatacaacttcgataaccagaaccttcagacgactcaagagttctacaatatgtcttccgaatactttgaccgtctcgatagcgttggccgttatagtcttttcggttctttccggtccgacgttagcaacgttggcccgaacgcggttatgctcaacgacgacggcgaattgacagacattggatcttggtatcttgggggaagcgccactggtattgatcctcaatctcgagcagcaggacgtttgcagatcagcgtgctcagtgttgttctgggcctatttggcgtcctatttcttttataagaaatcactgtggcagatgctcgtagcgtaccgaataaccaaccgcatcgtcacgcgatcattttccgcattgcccagcaaccacgtttcacccgagattgtgccgtgcattggctttatcaattcaattagcacttggattggtacacacaaatgacctagtggtaatgaaggtgcttcggcactggagccatggggttcgacgccgggtcgtgcctcctgtgtagatcggggaatgctacggttgtgttgagaacgttcgctccacttatccaaggctcttgtttcagttcgccatttgtgtgcttttttttttaatagaaaatccttttcaaccccttttttggtgttgggtctcactcgctctgggacagcagtggacatacagatcaatgttgctccgatcatacttggaggtatatttcttctataagaaatgaagggaggcagatacgtgcttcatcgaaagagagacgatgatattcacggatatagagcaggcgttcatcggatggatatgatcaagataccaggatcaacaagatttgcaaggcgttttgggagctagagagcagagacacaagggtatagctcacatagaaggcaagaacttattaccatcacgaccatatttctacgtgcaagtgccaacccgcggaccgacgagcctaatggtgggcaaatagacacctcctagtgtttctacgactgagcacgtaaataatggttagatcagttgtcaaattcgtctcgcaatttttatgccatgatcgctgttttacaaatcattgctcgtttacaaataacccagccatgcccatacccgttccgatgcacatactcgtcaataagatcttcttcttcgtccggcgcagctcactaagtccagtgacaatctggcgagcacctgtcgtgccgagagggtggccaagtgcaatggcaccaccgcgagggttcatcttggcgtggtctagtttcaagaaatcctttgagtagacggccatcgtggcgaacgcctcgttgagctcgacgacgtcgcagtcatcaagcgtaaggttgtatttgttcaagagcttgggaatggcgaccgttgggccaatacccataatccttggtggcaacccggcgatagtagaaccaacatacttagccatgataggcagaccaagctggatggcctttgagcgcttcatcagaacgatggccgaagcgccgtcagtgacttgactggcattgccaccagttgtcatattgccccattgagggaatgcaggacggatcttgcccaacccagcagcggtggtgcctggtcgaataccctcgtctttcgtcaaagtgaccgtcttcaactcgccgtcgggacccttgaccttggtggtaatggggacgatctcgtcatcgaaccaaccagccttctgtgctgcctctgcgcgacggaaactctcagcagcgtattcgtcgagctgctcgcgggtaaggccgaagtcacgggctacgttctcgctcgtccaacccattggctccatgcagtctctggcctcttggctgacaccgaggacctcagcatcgaaggggacctcgaccttatccccccctaatgtcatggattcggcgccggcggcaatgccaatctcgatcgaaccatttgcaatttggtgtgcgatatcggcggtggccttgaggcctgaggagcagaagcggttgacggatgatgcgccgacggtgttggggaagccggcggagagagctgcggcacgggccttgtatgctgccttgccgtcggagacctgatcggagcagattcattagcagatgtcccacgagcgaccagtatgggtgagtagatcttcgcgacatacatttcccatgcaaatatcctctacaaggtcgggggagaagcccatgcgctccttggtcgctttcaagacggagtacatgataaactcgagactcgtgtccttgaagcctcccttgaaacccttgcacagtggcgtccgaatcgcagtggtaataacgacatcatcgggactctttgattgtctgtagttgtgcgcaaatgattagtttctgcgattgcaacggcgactccaaagtggcgggcggacgagtgaggagaaatgccggcgcacttacatggccgccactgggctattgggcgaaaggtgcttaagaagcgatgttacgcgttcggtggccatggtgatctatgagatatattcactggcagagatactttgcaaggtgaataatacgaaaagggaagaaaataacacaagattagagggattaaaagatcgtaa

SEQ ID NO: 27533 - DNA, 669 bp, Muscodor strobelii
  misc_feature: SGI cDNA ID NO. 569432
  misc_feature: Encodes the peptide sequence at SEQ ID NO 27534
atggccgaatcagacatcaaatcctacctcaaacagacacacgaccgtgtctttgagcataaccgtgcctgggctgagggacaaaaggagaaggacccggaatttttcactaagctgagcgccggtcaaagtccggaatacttatggattggctgcagtgactctcgtatccccgctgagcagatcacgggccttggtcctggtgaggtcttcattcaccgcaacatcgccaatctagtcgtcagcaccgatctcaatgttatgagcgttatcgagtatgctgtatgccacctgcacgtcaagcacatcgtcgtgtgtggccactacggctgcggaggtgtcaaggctgccatgacacccaaagacctaggtctattgaatccgtggcttcgtaacatccgcgatgtctaccgccttcacgagaaggaactcgacacaattgcagacgagggagcgcgctataaccgtctcgtggaattgagcgttcaagagcagtgccgaaacattatcaagacggccgctgtccaacagtcatacgccaaaaatcaatatcctgtcgtacacggctgggtattcggattcgaggatggtttactcaaagatttgaagattgatcacaaagcgatgctcgagagcatccagaagatctacaatctcactgaatcctag

SEQ ID NO: 27534 - protein, 222 aa, Muscodor strobelii
  misc_feature: SGI Peptide ID NO. 569432
  misc_feature (40)..(203): Pfam Id: PF00484 Pfam Desc: Carbonic anhydrase
  misc_feature (1)..(221): NCBI GI: 261354375 Blast Desc: carbonic anhydrase [Verticillium albo-atrum VaMs.102]
  misc_feature (1)..(222): NCBI GI: 171681249 Blast Desc: protein product [Podospora anserina] gi|170940583|emb|CAP65810.1| protein product [Podospora anserina]
  misc_feature (3)..(220): NCBI GI: 145610284 Blast Desc: MGG_02599 [Magnaporthe grisea 70-15] gi|149209665|ref|XP_001522207.1| MGCH7_ch7g315 [Magnaporthe grisea 70-15] gi|86196270|gb|EAQ70908.1| MGCH7_ch7g315 grisea
  misc_feature (3)..(220): NCBI GI: 226815603 Blast Desc: beta class carbonic anhydrase [Sordaria macrospora]
  misc_feature (1)..(221): NCBI GI: 116203789 Blast Desc: CHGG_09778 [Chaetomium globosum CBS 148.51] gi|88175906|gb|EAQ83374.1| CHGG_09778 [Chaetomium globosum CBS 148.51]
  misc_feature (2)..(220): NCBI GI: 164423585 Blast Desc: carbonic anhydrase 2 [Neurospora crassa OR74A] gi|157070156|gb|EAA30440.2| carbonic anhydrase 2 [Neurospora crassa OR74A]
  misc_feature (1)..(222): NCBI GI: 256729556 Blast Desc: [Nectria haematococca mpVI 77-13-4]
  misc_feature (1)..(222): NCBI GI: 46117432 Blast Desc: FG04558.1 [Gibberella zeae PH-1]
  misc_feature (5)..(222): NCBI GI: 189188506 Blast Desc: carbonic anhydrase [Pyrenophora tritici-repentis Pt-1C-BFP] gi|187972198|gb|EDU39697.1| carbonic anhydrase [Pyrenophora tritici-repentis Pt-1C-BFP]
  misc_feature (5)..(221): NCBI GI: 169617311 Blast Desc: SNOG_11833 [Phaeosphaeria nodorum SN15] gi|160703381|gb|EAT80877.2| SNOG_11833 [Phaeosphaeria nodorum SN15]
  misc_feature (6)..(221): SWISSPROT Homolog: EC 4.2.1.1 Carbonate dehydratase
MAESDIKSYLKQTHDRVFEHNRAWAEGQKEKDPEFFTKLSAGQSPEYLWIGCSDSRIPAEQITGLGPGEVFIHRNIANLVVSTDLNVMSVIEYAVCHLHVKHIVVCGHYGCGGVKAAMTPKDLGLLNPWLRNIRDVYRLHEKELDTIADEGARYNRLVELSVQEQCRNIIKTAAVQQSYAKNQYPVVHGWVFGFEDGLLKDLKIDHKAMLESIQKIYNLTES

SEQ ID NO: 27535 - DNA, 1587 bp, Muscodor strobelii
  misc_feature: SGI EST ID NO. CUFF.64916.0
  misc_feature: Variant of the nucleotide sequence at SEQ ID NO 27533
tcagacacgccaaaaaatgtgcgcccaagttaactcctcgggaactctcgttatttcggtctttctcatcctgcattggcggttaccccgagtcgtccatgataggccagatgtttaaaggtcgagtgggttgcagttcctctctgctctccacatctgtcagacgaacacttgccccagcatcacacaaagctcaatttcttgtagtccaacgacacagcagcagctctagcaacaccacaaacaagaatcttaacaacataaagagcgctcaagacagcataatcagccgcgccatggccgaatcagacatcaaatcctacctcaaacagacacacgaccgtgtctttgagcataaccgtgcctgggctgagggacaaaaggagaaggacccggaatttttcactaagctgagcgccggtcaaagtccggaatacttatggattggctgcagtgactctcgtatccccgctgagcagatcacgggccttggtcctggtgaggtcttcattcaccgcaacatcgccaatctagtcgtcagcaccgatctcaatgttatgagcgttatcgagtatgctgtatgccacctgcacgtcaagcacatcgtcgtgtgtggccactacggctgcggaggtgtcaaggctgccatgacacccaaagacctaggtctattgaatccgtggcttcgtaacatccgcgatgtctaccgccttcacgagaaggaactcgacacaattgcagacgagggagcgcgctataaccgtctcgtggaattgagcgttcaagagcagtgccgaaacattatcaagacggccgctgtccaacagtcatacgccaaaaatcaatatcctgtcgtacacggctgggtattcggattcgaggatggtttactcaaagatttgaagattgatcacaaagcgatgctcgagagcatccagaagatctacaatctcactgaatcctaggttgcgtgtgtacaagtagtcattcaattgtaacaacggggaagacagagcgatcggcgtaacacatgggagcgggtggcgatgaattatatatacaatactagaaaccaataaatagacacggcatacgttgcattcagactaaaatcgaaacaagtcaaagaactccgacctctccaacaacccctctgtggtttactccatattcctcacgacgaaatgcacaatgcattttaccgtcttctaatttgtgcgctctaagctctctacaaggcctgatcgaccaaaaggcaatggatcaaattattttcaaaccaatcgatgcattagacttaatcgtcctggttcaaggccataatggaatatgaccatcctagtaataaagctccacgtgcgggaagcgagcaggcttcagggattttctctgaggggctcggcgaacctgacccgatcgtcgcagatctgcggcacgacgcgcacatagaacagtacgctggtacacctcatcgaaataccaaatcctactctctttgttagatgtgatcagtcacaatcatgcacaattcaacgcaaaatcgggaattagctttcggccattttacgtgatcctccactcaatcag

SEQ ID NO: 27536 - DNA, 1509 bp, Muscodor strobelii
  misc_feature: SGI cDNA ID NO. 569433
  misc_feature: Elevated expression when VOC is produced
  misc_feature: Encodes the peptide sequence at SEQ ID NO 27537
atgtctgctctcgaaattattatggtggtggtcaaatatgcagtacttctgcttatcccttacttgactctcgtagctgcattccggctcttccttcatccactgagggcttaccctggtccccttctggcgaggatctcggacacttatgctggcttctttgcgcttagcatgaagctatctaccgtcacctacaatgacttgaagaaatacggtccggttatgagacatggacctaacaagctcgttttcagtacaccccaggccgtccacgatatctacagtaatgaccgcgtcaccaagtcgcacgtttacgaacttacagtaacatcgggaaaaccgagcatcttcaacgccatcgacagacagcagcaccgggaaaaacgcaagctaatcgggcaggccattaccgagaaagcgatgcgctcctttgagccaaccatgctggagcagattgacgtcttcatccaccaaattgagctcgcttcgggggagcaccaacccaatcctgttaatataactcatcttaccaaacgcctcggtgctgatatcgtaggccatctggcgtttgggtatgcgatgaacatgcagactgacccgacctatcgctttgttttacagggtctggctgcaggatcataccagaacaacagctttctgcaatggccgctcctaaagaaacttggactgcacaatatcctcgcgctctttgcggggtactcgtcgcgtatgaagtataaggacatgttattaactatgatcaaggcgcgactttcccaagacaaacatgccaagaatgacttatactcgtttgtcgtcgatgacttggaccaggacgggagcaagggcggcgtgaaggcgagtgagctctggtctgaggctttgttcttctttccggcaggcggtgatacgacaacgacagccatgagcgccttattcttctatctagcgcattaccgcgatgcttacaacacattggtagctgagatccggaatacgttctccaacgaagctggcattgttgccgggccaaaactcgctagttgccggtatctacgggcttctattgaggaatcattacgtctctcaccccccgtaggcggcaccctctggcgagagctctacagcgatcagcttgacaacggcccgctcatcgtggatggccacataatcccgccaggtacgcaggtaggtgtcagcacgtacgctctgcatcatgattcggactacttcagtgacccattggccttccaacctgagcgctggctgaccgaggaccgggacatcatggcccgtatgaactcggcgttgatcccgttctcagtaggggctagaggatgcgcgggtaaggcaatggcgtatctagaaataagtctagtcgttgctaagacgctttggcgcttcgatttcgagttggccgaggggaagaggggaagagtgggtgtgagcagtgcggaaggaactgacaaagtgcctgtcgaatttcaattatctgacacatttggataa

SEQ ID NO: 27537 - protein, 502 aa, Muscodor strobelii
  misc_feature: SGI Peptide ID NO. 569433
  misc_feature (39)..(493): Pfam Id: PF00067 Pfam Desc: Cytochrome P450
  misc_feature (125)..(476): Pfam Id: PF00067 Pfam Desc: Cytochrome P450
  misc_feature (5)..(499): NCBI GI: 145256217 Blast Desc: An10g00660 [Aspergillus niger CBS 513.88] gi|134078632|emb|CAK40505.1| protein product [Aspergillus niger]
  misc_feature (25)..(501): NCBI GI: 46123381 Blast Desc: FG06068.1 [Gibberella zeae PH-1]
  misc_feature (29)..(501): NCBI GI: 121712150 Blast Desc: benzoate 4-monooxygenase cytochrome P450 [Aspergillus clavatus NRRL 1] gi|119401842|gb|EAW12264.1| benzoate 4-monooxygenase cytochrome P450 [Aspergillus clavatus NRRL 1]
  misc_feature (8)..(499): NCBI GI: 255954725 Blast Desc: Pc21g10830 [Penicillium chrysogenum Wisconsin 54-1255] gi|211589826|emb|CAP95980.1| Pc21g10830 [Penicillium chrysogenum Wisconsin 54-1255]
  misc_feature (29)..(499): NCBI GI: 121710976 Blast Desc: benzoate 4-monooxygenase cytochrome P450 [Aspergillus clavatus NRRL 1] gi|119401254|gb|EAW11678.1| benzoate 4-monooxygenase cytochrome P450 [Aspergillus clavatus NRRL 1]
  misc_feature (13)..(501): NCBI GI: 154313085 Blast Desc: BC1G_05544 [Botryotinia fuckeliana B05.10] gi|150849629|gb|EDN24822.1| BC1G_05544 [Botryotinia fuckeliana B05.10]
  misc_feature (1)..(501): NCBI GI: 145608110 Blast Desc: MGG_03375 [Magnaporthe grisea 70-15] gi|145015610|gb|EDK00100.1| MGG_03375 [Magnaporthe grisea 70-15]
  misc_feature (80)..(499): NCBI GI: 145241738 Blast Desc: An09g02000 [Aspergillus niger] gi|134078055|emb|CAK40138.1| protein product [Aspergillus niger]
  misc_feature (15)..(501): NCBI GI: 85092131 Blast Desc: NCU06895 [Neurospora crassa OR74A] gi|28920645|gb|EAA30006.1| conserved [Neurospora crassa OR74A]
  misc_feature (17)..(502): NCBI GI: 169603764 Blast Desc: SNOG_04890 [Phaeosphaeria nodorum SN15] gi|111066161|gb|EAT87281.1| SNOG_04890 [Phaeosphaeria nodorum SN15]
  misc_feature (35)..(474): SWISSPROT Homolog: EC 1.14.13.12 Benzoate 4-monooxygenase
  misc_feature: Useful for introducing or modulating the production of volatile compounds
MSALEIIMVVVKYAVLLLIPYLTLVAAFRLFLHPLRAYPGPLLARISDTYAGFFALSMKLSTVTYNDLKKYGPVMRHGPNKLVFSTPQAVHDIYSNDRVTKSHVYELTVTSGKPSIFNAIDRQQHREKRKLIGQAITEKAMRSFEPTMLEQIDVFIHQIELASGEHQPNPVNITHLTKRLGADIVGHLAFGYAMNMQTDPTYRFVLQGLAAGSYQNNSFLQWPLLKKLGLHNILALFAGYSSRMKYKDMLLTMIKARLSQDKHAKNDLYSFVVDDLDQDGSKGGVKASELWSEALFFFPAGGDTTTTAMSALFFYLAHYRDAYNTLVAEIRNTFSNEAGIVAGPKLASCRYLRASIEESLRLSPPVGGTLWRELYSDQLDNGPLIVDGHIIPPGTQVGVSTYALHHDSDYFSDPLAFQPERWLTEDRDIMARMNSALIPFSVGARGCAGKAMAYLEISLVVAKTLWRFDFELAEGKRGRVGVSSAEGTDKVPVEFQLSDTFG

SEQ ID NO: 27538 - DNA, 2184 bp, Muscodor strobelii
  misc_feature: SGI EST ID NO. CUFF.64990.0
  misc_feature: Variant of the nucleotide sequence at SEQ ID NO 27536
gttgtgcattcggtattctgcccagggtatgcaagtcagtggaggaaatttgtgcaatacgccctgcagaacacgagccaacagaggtcgaccatgaggtgtgctttgatggatgtaccctgtacggctagttgatcccatcaccaactgccccgcttcattatatcccttcatcactcaattctccctatcttgttttcccatctttctcacatgaacgctcactcaaattctgttgactgccacacgtttcaccgtgttgatgaagacgtcatagagtacgaccgaccatgtctgctctcgaaattattatggtggtggtcaaatatgcagtacttctgcttatcccttacttgactctcgtagctgcattccggctcttccttcatccactgagggcttaccctggtccccttctggcgaggatctcggacacttatgctggcttctttgcgcttagcatgaagctatctaccgtcacctacaatgacttgaagaaatacggtccggttatgagacatggacctaacaagctcgttttcagtacaccccaggccgtccacggtaagtgccttttgtcttatcttctatccatcgcataggactctagctacattgtccagcgtagatatctacagtaatgaccgcgtcaccaagtcgcacgtttacgaacttacagtaacatcgggaaaaccgagcatcttcaacgccatcgacagacagcagcaccgggaaaaacgcaagctaatcgggcaggccattaccgagaaagcgatgcgctcctttgagccaaccatgctggagcagattgacgtcttcatccaccaaattgagctcgcttcgggggagcaccaacccaatcctgttaatataactcatcttaccaaacgcctcggtgctgatatcgtaggccatctggcgtttgggtatgcgatgaacatgcagactgacccgacctatcgctttgttttacagggtctggctgcaggatcataccagaacaacagctttctgcaatggccgctcctaaagaaacttggactgcacaatatcctcgcgctctttgcggggtactcgtcgcgtatgaagtataaggacatgttattaactatgatcaaggcgcgactttcccaagacaaacatgccaagaatgacttatactcgtttgtcgtcgatgacttggaccaggacgggagcaagggcggcgtgaaggcgagtgagctctggtctgaggctttgttcttctttccggcaggcggtgatacgacaacgacagccatgagcgccttattcttctatctagcgcattaccgcgatgcttacaacacattggtagctgagatccggaatacgttctccaacgaagctggcattgttgccgggccaaaactcgctagttgccggtatctacgggcttctattgaggaatcattacgtctctcaccccccgtaggcggcaccctctggcgagagctctacagcgatcagcttgacaacggcccgctcatcgtggatggccacataatcccgccaggtacgcaggtaggtgtcagcacgtacgctctgcatcatgattcggactacttcagtgacccattggccttccaacctgagcgctggctgaccgaggaccgggacatcatggcccgtatgaactcggcgttgatcccgttctcagtaggggctagaggatgcgcgggtaaggcaatggcgtatctagaaataagtctagtcgttgctaagacgctttggcgcttcgatttcgagttggccgaggggaagaggggaagagtgggtgtgagcagtgcggaaggaactgacaaagtgcctgtcgaatttcaattatctgacacatttggataaagacacgatggtccaaatttgatgtttcgggcgagaaagcgttgattctagccgctacgcgcgtatgtgccacaatagcggtgacatcaatctcgggattgcggaggttgtttgatattccctgccacctgagagcttattgaattggtaattcatccctggctgctatatgagttgtcggaactgtaattgatacttgatgtgagagcttagcggtggatgtttccatgcccatgctggtacctatgaagactttgtaatcccaaatcaccctggtgaggcaaaagtgcaaaattccggagcaagcaagccacgcacgac

SEQ ID NO: 27539 - DNA, 1110 bp, Muscodor strobelii
  misc_feature: SGI cDNA ID NO. 569434
  misc_feature: Elevated expression when VOC is produced
  misc_feature: Encodes the peptide sequence at SEQ ID NO 27540
atggcaactcttccttacgagaggattgtttcctcgaaaatattcaccattctcgttggccccgagaagaagacctatacaattcacagtgcgcttttggctgcgttgtctaagcctcttgatgtattggtcaatggagggatgaaagaggacatcgaggcaacagccgaatggcctgatgtcgaggaagaaacatttgcgcagatttgtgcatttgcctacaccgggacatacgagagcccttatgacaagtcgttgcttgcgaaacccagcaatgaaaacccttttgcacagacgaaagccaccaacagtcaaaccacccgcggcagcctcgtcgacattaccagtcataacaccaccaacagtccgctcattcgcggtagcctcggcagctctagcactcttggcggcattggcaatccacctgctagcacatcgttgtttgggagctcatctgctcctggcagttcaagcacggctggcggtttattcggtagcgctgggcgagccagcagcacaagtgcaggtctttcctctcctaagccgggtaatacctcgatctttcgcggcggcgatagcataatgcagtctgcttttagtcctggagatgccaggccaattccaagcagtacgagcacggtctttcgccctcataacgccgatcccatcatgtttcacgcaaagatttatgtattcgcggattgctatcttgttagtaatctcgccaaattgagtctcacgaagctgcgtgcggcccttgatctgatccccaaggacaagactggaggagaggcgcttgcggaattggccaaatactcttacagcaataccgtcgacaaggatgaccttcgtgatcctctcaggggattggtctcgagtcatatcgcaaggcatgttgaagctatgtggtcgagcactggcattcaatctgtaatggagtcatatggcgacctttctaaagacatcatcggacagttgatcccgcgtttgaaccgtaatgtggaatcagcctttggtttcggtactaagcaaggctcacccttaaaagaaatatccccgataacccgtttgccaggacgtggaggatttgacttcggcagatggaaatag

SEQ ID NO: 27540 - protein, 369 aa, Muscodor strobelii
  misc_feature: SGI Peptide ID NO. 569434
  misc_feature (6)..(327): NCBI GI: 240272832 Blast Desc: conserved [Ajellomyces capsulatus H143]
  misc_feature (6)..(330): NCBI GI: 154314343 Blast Desc: [Botryotinia fuckeliana B05.10] gi|150848910|gb|EDN24103.1| [Botryotinia fuckeliana B05.10]
  misc_feature (5)..(81): NCBI GI: 238842159 Blast Desc: conserved [Microsporum canis CBS 113480]
  misc_feature (6)..(88): NCBI GI: 256727614 Blast Desc: NECHADRAFT_76623 [Nectria haematococca mpVI 77-13-4]
  misc_feature (6)..(327): NCBI GI: 212541026 Blast Desc: PMAA_058390 [Penicillium marneffei ATCC 18224] gi|210067967|gb|EEA22059.1| PMAA_058390 [Penicillium marneffei ATCC 18224]
  misc_feature (6)..(81): NCBI GI: 242813686 Blast Desc: TSTA_102080 [Talaromyces stipitatus ATCC 10500] gi|218714555|gb|EED13978.1| TSTA_102080 [Talaromyces stipitatus ATCC 10500]
  misc_feature (5)..(81): NCBI GI: 238842007 Blast Desc: conserved [Microsporum canis CBS 113480]
  misc_feature (6)..(85): NCBI GI: 115492757 Blast Desc: [Aspergillus terreus NIH2624] gi|114197866|gb|EAU39566.1| [Aspergillus terreus NIH2624]
  misc_feature (6)..(110): NCBI GI: 238492589 Blast Desc: AFLA_040690 [Aspergillus flavus NRRL3357] gi|220696025|gb|EED52367.1| AFLA_040690 [Aspergillus flavus NRRL3357]
  misc_feature (6)..(86): NCBI GI: 242776115 Blast Desc: conserved [Talaromyces stipitatus ATCC 10500] gi|218722400|gb|EED21818.1| conserved [Talaromyces stipitatus ATCC 10500]
  misc_feature: Useful for introducing or modulating the production of volatile compounds
MATLPYERIVSSKIFTILVGPEKKTYTIHSALLAALSKPLDVLVNGGMKEDIEATAEWPDVEEETFAQICAFAYTGTYESPYDKSLLAKPSNENPFAQTKATNSQTTRGSLVDITSHNTTNSPLIRGSLGSSSTLGGIGNPPASTSLFGSSSAPGSSSTAGGLFGSAGRASSTSAGLSSPKPGNTSIFRGGDSIMQSAFSPGDARPIPSSTSTVFRPHNADPIMFHAKIYVFADCYLVSNLAKLSLTKLRAALDLIPKDKTGGEALAELAKYSYSNTVDKDDLRDPLRGLVSSHIARHVEAMWSSTGIQSVMESYGDLSKDIIGQLIPRLNRNVESAFGFGTKQGSPLKEISPITRLPGRGGFDFGRWK

SEQ ID NO: 27541 - DNA, 1747 bp, Muscodor strobelii
  misc_feature: SGI EST ID NO. CUFF.64931.0
  misc_feature: Variant of the nucleotide sequence at SEQ ID NO 27539
ccccaccactgtatttagctcggcacataagtaccaaggcttaccatcaggtggtaattgctcccttctacacaatcgatccatcagtatcagcgcgttgcctccacaaggtagctgtaacggaggggcggccgagtaatcagtcctgcttgacgtaaataggttgatggttgtcagctgggtagaaatggcgtgcggttggctgctagctattgtctccccgcactaggcaaggtagcaaacagccatttttacagcaccttcaaaggcgcagcacctccatctccgtgcgcattggtgttagttgggaattgaatcttacctatctaatgaactcgtgatatatttgcgccaaaatccggcacgcgcatgcaacagcgcctcccatctacctacttacgacaccgtcccttcttccggccaagatcagaaagccgacatttttgacttctccaaggtataattcaagaatggcaactcttccttacgagaggattgtttcctcgaaaatattcaccattctcgttggccccgagaagaagacctatacaattcacagtgcgcttttggctgcgttgtctaagcctcttgatgtattggtcaatggagggatgaaagaggacatcgaggcaacagccgaatggcctgatgtcgaggaagaaacatttgcgcagatttgtgcatttgcctacaccgggacatacgagagcccttatgacaagtcgttgcttgcgaaacccagcaatgaaaacccttttgcacagacgaaagccaccaacagtcaaaccacccgcggcagcctcgtcgacattaccagtcataacaccaccaacagtccgctcattcgcggtagcctcggcagctctagcactcttggcggcattggcaatccacctgctagcacatcgttgtttgggagctcatctgctcctggcagttcaagcacggctggcggtttattcggtagcgctgggcgagccagcagcacaagtgcaggtctttcctctcctaagccgggtaatacctcgatctttcgcggcggcgatagcataatgcagtctgcttttagtcctggagatgccaggccaattccaagcagtacgagcacggtctttcgccctcataacgccgatcccatcatgtttcacgcaaagatttatgtattcgcggattgctatcttgttagtaatctcgccaaattgagtctcacgaagctgcgtgcggcccttgatctgatccccaaggacaagactggaggagaggcgcttgcggaattggccaaatactcttacagcaataccgtcgacaaggatgaccttcgtgatcctctcaggggattggtctcgagtcatatcgcaaggcatgttgaagctatgtggtcgagcactggcattcaatctgtaatggagtcatatggcgacctttctaaagacatcatcggacagttgatcccgcgtttgaaccgtaatgtggaatcagcctttggtttcggtactaagcaaggctcacccttaaaagaaatatccccgataacccgtttgccaggacgtggaggatttgacttcggcagatggaaatagcgaagaaactaaggagaaacaatagacttgggtatactgcaaatgcagctgcttcgacaagttgtcaactttggggcctgtacgaaggcagaaattactcttgattctctctgtggtgattcagagttctagatgagggtagtgtgagggcatattgtagcccttac

SEQ ID NO: 27542 - DNA, 2103 bp, Muscodor strobelii
  misc_feature: SGI cDNA ID NO. 569435
  misc_feature: Encodes the peptide sequence at SEQ ID NO 27543
atggctctaccgttagggcttcaccatgacgaggaacactctgtcttgttactcaccgattctgaagacgacgacttacttcctcccaagcgttactcatctcaggtcgagccaaaagagcctccagaagccatgcgccagaaaataaaagagaccgcggcaaatgttccgattcacccgatccctgctatgcaggaggcctttgcagagtcactccaggaggcgacgacaacttcgggaggagacaaaccaaagctcaaatttggcaatgcgaaagaacggaggacacgcctactggccggaacgaaggatacccctctgcacaatgcattgtggaggtaccggcctgggcagaaacatcatgagctgtggaaacttctagcgcaaatttcttttggcgtatacttgttgctaaatgggcttgccaacaacaacgaccaggtagtcgacatcctccaaggccatatcgacgaagtagatgaatttctagagacctgtctagaagacgtcaaaatggcggttgaggacgttgaagagcggattcagtacttgaagctacctatgaacaacatgaaaacttttgagacaatgctggaagatcgcgatttccgcatgcaaataataacgggcaacgagaagattgaacatatcgctgagagaacggcgtacgctctggaaatcaccttacgagatactgatgaaggactgaaggcaacgaaacaattcgcaatctacttgaaagaccaagaggggcgggcatggcggcaacagcgaccggaattggtcgacatcttcgatgctatgaagggcaacgcgcaaggatggtatcaggcctttagcgacatacaagaacatgcgctttcgctggagagcacccttgccaacatgaatcaaatagtcgcagaaatgaaccagaaagctggagaagtaagccgcaaaacaaggttcaccgtagcgccattctctggtccagggcaaacggcgcgttcaagggatagttcagtgaaaccgtcatctccttcatcccgaacccgttcatcagaaccacattcaccaccaccaagtataccacaaagagcgccgcgagtgaaagtgcccattgaggaagatcaggaagatcttgtgtttgatgatgaaaaggaggttgtaattctaactccacctggacccgagatggacgacagacagcaggagttacagaagccggatgaggagcagggtctgtacctattacaaccgcggacttatactcctcagccagctgagcccgcaccttcaccccaagcgtcagcttcacctcgtatgtcggaagttcctccaccgcaagatgggagattatcaaaacgaacttctctacggcagagagtgtcattgaagggcgggaccttaccggaagtcattcacgtgcctcccgtcaatgcagaagagattgaatcggcgagattccaatcacctcactatcagcaatcacctcgtcaccaacagtcaccccgtcaccagcagtcgcctcatttccagcactcacctcattattcacactctccacatcagcaatcacctcgccctagccagagacgggatcctgagcatacacctaaccaggaaatcagaccctctgcctcgtatcattcaggaatgaacacgataaatgagatgcagccaccggcattcctgaataccataccctcacctcggtctgaccagcaacaatacttctaccctgtccgggctagtcctcactcacccttacaacaacggccacacacctcagcgacaactcggccaccgcctcggccgcatacatctcacacaactcatgggcggaatcaacgatcagctatgggtatgagcatgttgagcaatgtaacgaatgccgagactcaggatggccaaaggctgaagaaaaagaaaagcaagttcggctggctgagaaaggcatttacacttgatgaagaggagcgcgctgagtttgaggcgaagaaacaacaaacggcgcctaatccgtattacaatgcccggagtccgaagtttctggacggaaagcgtttgcctgttcatccgggcagtgcctctgtccgtggctcggtaaggaacggatactga

SEQ ID NO: 27543 - protein, 700 aa, Muscodor strobelii
  misc_feature: SGI Peptide ID NO. 569435
  misc_feature (4)..(683): NCBI GI: 256735567 Blast Desc: NECHADRAFT_99015 [Nectria haematococca mpVI 77-13-4]
  misc_feature (10)..(335): NCBI GI: 171687697 Blast Desc: protein product [Podospora anserina] gi|170943810|emb|CAP69462.1| protein product [Podospora anserina]
  misc_feature (61)..(318): NCBI GI: 116180526 Blast Desc: CHGG_00891 [Chaetomium globosum CBS 148.51] gi|88185188|gb|EAQ92656.1| CHGG_00891 [Chaetomium globosum CBS 148.51]
  misc_feature (59)..(315): NCBI GI: 85116118 Blast Desc: NCU02590 [Neurospora crassa OR74A] gi|28926793|gb|EAA35757.1| [Neurospora crassa OR74A]
  misc_feature (65)..(365): NCBI GI: 145616006 Blast Desc: MGG_03625 [Magnaporthe grisea 70-15] gi|145009790|gb|EDJ94446.1| MGG_03625 [Magnaporthe grisea 70-15]
  misc_feature (47)..(319): NCBI GI: 156054826 Blast Desc: SS1G_06261 [Sclerotinia sclerotiorum 1980] gi|154704041|gb|EDO03780.1| SS1G_06261 [Sclerotinia sclerotiorum 1980]
  misc_feature (55)..(347): NCBI GI: 46134953 Blast Desc: FG09325.1 [Gibberella zeae PH-1]
  misc_feature (47)..(274): NCBI GI: 154320488 Blast Desc: BC1G_01716 [Botryotinia fuckeliana B05.10] gi|150853405|gb|EDN28597.1| BC1G_01716 [Botryotinia fuckeliana B05.10]
  misc_feature (57)..(357): NCBI GI: 119480417 Blast Desc: NFIA_082910 [Neosartorya fischeri NRRL 181] gi|119408391|gb|EAW18340.1| conserved [Neosartorya fischeri NRRL 181]
  misc_feature (47)..(322): NCBI GI: 242765471 Blast Desc: conserved [Talaromyces stipitatus ATCC 10500] gi|218724177|gb|EED23594.1| conserved [Talaromyces stipitatus ATCC 10500]
MALPLGLHHDEEHSVLLLTDSEDDDLLPPKRYSSQVEPKEPPEAMRQKIKETAANVPIHPIPAMQEAFAESLQEATTTSGGDKPKLKFGNAKERRTRLLAGTKDTPLHNALWRYRPGQKHHELWKLLAQISFGVYLLLNGLANNNDQVVDILQGHIDEVDEFLETCLEDVKMAVEDVEERIQYLKLPMNNMKTFETMLEDRDFRMQIITGNEKIEHIAERTAYALEITLRDTDEGLKATKQFAIYLKDQEGRAWRQQRPELVDIFDAMKGNAQGWYQAFSDIQEHALSLESTLANMNQIVAEMNQKAGEVSRKTRFTVAPFSGPGQTARSRDSSVKPSSPSSRTRSSEPHSPPPSIPQRAPRVKVPIEEDQEDLVFDDEKEVVILTPPGPEMDDRQQELQKPDEEQGLYLLQPRTYTPQPAEPAPSPQASASPRMSEVPPPQDGRLSKRTSLRQRVSLKGGTLPEVIHVPPVNAEEIESARFQSPHYQQSPRHQQSPRHQQSPHFQHSPHYSHSPHQQSPRPSQRRDPEHTPNQEIRPSASYHSGMNTINEMQPPAFLNTIPSPRSDQQQYFYPVRASPHSPLQQRPHTSATTRPPPRPHTSHTTHGRNQRSAMGMSMLSNVTNAETQDGQRLKKKKSKFGWLRKAFTLDEEERAEFEAKKQQTAPNPYYNARSPKFLDGKRLPVHPGSASVRGSVRNGY

SEQ ID NO: 27544 - DNA, 5710 bp, Muscodor strobelii
  misc_feature: SGI EST ID NO. CUFF.65431.0
  misc_feature: Variant of the nucleotide sequence at SEQ ID NO 27542
cacaatactcgtaagtcgtacactcgttgcacatgtactccttaattggcattctacataatatttcattctggggctttctttgagcatcctacttgcgtgccagtaaacgacttgccaacaatgtataagcttagactgttagcgggttcagctcagggtaaagaaggtcttgtcgcctccatctagagccaacattccgaggctactgctgtatggtatttgatcgcatttgatagcatttgacaattcttctctgttgaggtcaaagccaaaaggagagccgaccccaggaaatctcttcattccgttcactctgtgttctctgcaagtttagtttattacgtgatactgtacttacgccaacctttgcgatcctggctctcgatcctcgacatactccattcgtgggtctcgattcaatagcgcacatttcccctggactaactacaacaagttcccgtcttttctttagtggcttcccttttctacacgaacctcgacgatcaccagtctacaatagtttcttttcctaaacggtgctttacaacacgcactatctgctctttagacgggctaagactcgaacaatttatcattgctggagctagaagcattcatctgccgagccaacttacgtctgtcttcaccacggatccttctcgtttgcttccttctcctttctttcgtgaagcgacagcaacatcgcatttactcgacttactggtatacggtcgctctcaaaccacactcgttttcatatttgctttcattttactctaattgccgccatcattgtgggcgcattgtcagcaaagacacacgaatagcgccagccaacgcctcgcgatcgcatactctattgtctcaatcctcgacgccacactgcataacagtttcacgttgcaaacaaatagccaacagttggaattccgtatcatccgaaacgtagtattgaactttagtagagccgtcgaaggattacttggtgaactattcggtgattgtgccacgcccattcgcaacgaggctccgcggaccgccatgccattcttgcaccatcgcctatcacgggtcaaatcggcttgagacgtaggaatctggctacacctcgtgcagttcctgcgccgtatattcggtagaaacaaatcctactatacggtctttcgtcgtcgtttcgcaaacgccaatttattggaccgccacgggcccctcgtgtcgcacgtttctcaactattgtttcggctacctgcaggctcttggcagttcgcgttgttagcccccatctctgtcccgcgatctgcgcctcgcaccagactgtcataatcggtcgtgcctggtttcatactacccaaaaaccgagtctgatcgacctatcgcactcttcccgctgtcgtcgacgatctctagtacggaacggaatagggcaaccccctgcgccagccactgcaggcgatcgttttaaaatagattcagagggtagtattggcaaactggccggcgcacaactaatcgccgtcttgcgtcgcaatggctctaccgttagggcttcaccatgacgaggaacactctgtcttgttactcaccgattctgaagacgacgacttacttcctcccaagcgttactcatctcaggtcgagccaaaagagcctccagaagccatgcgccagaaaataaaagagaccgcggcaaatgttccgattcacccgatccctgctatgcaggaggcctttgcagagtcactccaggaggcgacgacaacttcgggaggagacaaaccaaagctcaaatttggcaatgcgaaagaacggaggacacgcctactggccggaacgaaggatacccctctgcacaatgcattgtggaggtaccggcctgggcagaaacatcatgagctgtggaaacttctagcgcaaatttcttttggcgtatacttgttgctaaatgggcttgccaacaacaacgaccaggtagtcgacatcctccaaggccatatcgacgaagtagatgaatttctagagacctgtctagaagacgtcaaaatggcggttgaggacgttgaagagcggattcagtacttgaagctacctatgaacaacatgaaaacttttgagacaatgctggaagatcgcgatttccgcatgcaaataataacgggcaacgagaagattgaacatatcgctgagagaacggcgtacgctctggaaatcaccttacgagatactgatgaaggactgaaggcaacgaaacaattcgcaatctacttgaaagaccaagaggggcgggcatggcggcaacagcgaccggaattggtcgacatcttcgatgctatgaagggcaacgcgcaaggatggtatcaggcctttagcgacatacaagaacatgcgctttcgctggagagcacccttgccaacatgaatcaaatagtcgcagaaatgaaccagaaagctggagaagtaagccgcaaaacaaggttcaccgtagcgccattctctggtccagggcaaacggcgcgttcaagggatagttcagtgaaaccgtcatctccttcatcccgaacccgttcatcagaaccacattcaccaccaccaagtataccacaaagagcgccgcgagtgaaagtgcccattgaggaagatcaggaagatcttgtgtttgatgatgaaaaggaggttgtaattctaactccacctggacccgagatggacgacagacagcaggagttacagaagccggatgaggagcagggtctgtacctattacaaccgcggacttatactcctcagccagctgagcccgcaccttcaccccaagcgtcagcttcacctcgtatgtcggaagttcctccaccgcaagatgggagattatcaaaacgaacttctctacggcagagagtgtcattgaagggcgggaccttaccggaagtcattcacgtgcctcccgtcaatgcagaagagattgaatcggcgagattccaatcacctcactatcagcaatcacctcgtcaccaacagtcaccccgtcaccagcagtcgcctcatttccagcactcacctcattattcacactctccacatcagcaatcacctcgccctagccagagacgggatcctgagcatacacctaaccaggaaatcagaccctctgcctcgtatcattcaggaatgaacacgataaatgagatgcagccaccggcattcctgaataccataccctcacctcggtctgaccagcaacaatacttctaccctgtccgggctagtcctcactcacccttacaacaacggccacacacctcagcgacaactcggccaccgcctcggccgcatacatctcacacaactcatgggcggaatcaacgatcagctatgggtatgagcatgttgagcaatgtaacgaatgccgagactcaggatggccaaaggctgaagaaaaagaaaagcaagttcggctggctgagaaaggcatttacacttgatgaagaggagcgcgctgagtttgaggcgaagaaacaacaaacggcgcctaatccgtattacaatgcccggagtccgaagtttctggacggaaagcgtttgcctgttcatccgggcagtgcctctgtccgtggctcggtaaggaacggatactgagaggcttacgccttacttgcaacacaaacaacgattgatcgattcaccatccaccacaaacgccatctatcaaacccgaattggaacacagcacacagaacaccaccaatactatccttataccgatcatcaccctccacgtaccaaatatataattcacgaaggtcatgactcaacacgtggccacagaccatgaatatacacgaagtagtgagaccccaccatgtacaacttttacttatctagacctgtctatctgggatgaaacattcaaaagcatagcgatagcgggttaacatacggataccacacatcgaatattacaacataccgaggcggttgtgttttggaatattaaataatacacgcataactctagccgagtaatttttaatgggagatgagatgtaatgctacttattgtgtgattctgaagtgactgctttgatcatggattatttgactctgcctcgatcgtgtcttcacggatatcggctttattggaaatgcgatatacgtagctgtgattacgatgcatatttggtctgtatatagcatctacatactgcccaagattacccatcctatccccttcaacctacccctttaaccctaaacaggactcatttccagctcactccccctcttctcctcatcccttcttccctccctaccctccgtcacccttttcctcaacataatcaagccctgcaccacactaaagatgatacaaaacccaatcgcaatgccaaaaacatacgccgccacaagtccgccctgaagtccgggatcaagaaacgagtacgtataaaaatgtttcgtagcatccgtcacatacgccagcgcaagataaagcgctaatatcagtaacaaaaacgggatatgcacccacggacttggattcgtcctcggaaccacaatctcgaatagcgcaaacgccgagttcagcgcgtgttgacttatattactccacgttgaatacgtcgtcgctagcgtcgtcggactcgacagaagggcccagaatactatcgttacgacgaaggggaaaaccgtcgtgcacgtgtagagtaatgagtggagcgcttgaaggggccgtggccaggcttcgagggggctataggagcggcgcgcgtagaggaatgtgtggaaggaggagaataggaagtagaatcctaacccccagtaggtaagtactgtgaagtaggagaatgaattttgcgccgagagacaggagtcgtggcctggtgaacaggagtagccgatgttgaagaggagggttgtgaatatgtagagggactaggagcaaagtgttagctaaataggttatgatgaacgaggttcggcgagcgagcgatcgaggggtgagtctgtgtttgtgtaatttttggtgtagcgggatggcatggtcgtgacacgttactgtcactgtcactgtcactgttaccgaagcactgcgcatggggatgctacactcctactcgtgcactttcgcgagctgggcttgtccaatttgaatggctttgaggggttgaagtatggtgtatcgagccaagtcaaagatgtgaggcgaaaggaagactgacgaagaatgcgcgaaagccgaataagacgtatggcggcagaagccaggacgtctgaaagcgatgggactcatcccatagccccgtgccgaatttgaatgggttcaccggcattttgatggtcgggaggtgttcgcaataaggagatagtctaatgcaggagttcgttcgatagctctgtctgcttcattcgaaaggtcgcgatgtttgaccgattctcttccgtgatcgagggtatcgtgacgtgggcgcgttctgactttaaccagtgccgtcgcagtcgcaatcatctaaccgaagcgcaatccttctgcagaaagaggaaggggcaaaaaaaatcaacaggcgcactcagaggcgctgcatagtcgtgaagtaagcgtcgagtgaaagctcataggtgttggctgagctaaagtaaaccagatgacagctcagctgatgtgggctgagccgtaggtaggctacttagatttcaaaaattgggacaataggcg

SEQ ID NO: 27545 - DNA, 795 bp, Muscodor strobelii
  misc_feature: SGI cDNA ID NO. 569436
  misc_feature: Reduced expression when VOC is produced
  misc_feature: Encodes the peptide sequence at SEQ ID NO 27546
atgccggtgaacccattcaaattcggcacggggctatgggatgagtcccatcgctttcagacgtcctggcttctgccgccatacgtcttattcggctttcgcgcattcttctccctctacatattcacaaccctcctcttcaacatcggctactcctgttcaccaggccacgactcctgtctctcggcgcaaaattcattctcctacttcacagtacttacctactgggggttaggattctacttcctattctcctccttccacacattcctctacgcgcgccgctcctatagccccctcgaagcctggccacggccccttcaagcgctccactcattactctacacgtgcacgacggttttccccttcgtcgtaacgatagtattctgggcccttctgtcgagtccgacgacgctagcgacgacgtattcaacgtggagtaatataagtcaacacgcgctgaactcggcgtttgcgctattcgagattgtggttccgaggacgaatccaagtccgtgggtgcatatcccgtttttgttactgatattagcgctttatcttgcgctggcgtatgtgacggatgctacgaaacatttttatacgtactcgtttcttgatcccggacttcagggcggacttgtggcggcgtatgtttttggcattgcgattgggttttgtatcatctttagtgtggtgcagggcttgattatgttgaggaaaagggtgacggagggtagggagggaagaagggatgaggagaagagggggagtgagctggaaatgagtcctgtttag

SEQ ID NO: 27546 - protein, 264 aa, Muscodor strobelii
  misc_feature: SGI Peptide ID NO. 569436
  misc_feature (1)..(262): NCBI GI: 116180524 Blast Desc: CHGG_00890 [Chaetomium globosum CBS 148.51] gi|88185187|gb|EAQ92655.1| CHGG_00890 [Chaetomium globosum CBS 148.51]
  misc_feature (1)..(259): NCBI GI: 171687699 Blast Desc: protein product [Podospora anserina] gi|170943811|emb|CAP69463.1| protein product [Podospora anserina]
  misc_feature (2)..(262): NCBI GI: 256734854 Blast Desc: [Nectria haematococca mpVI 77-13-4]
  misc_feature (4)..(252): NCBI GI: 145616004 Blast Desc: MGG_03627 [Magnaporthe grisea 70-15] gi|145009789|gb|EDJ94445.1| MGG_03627 [Magnaporthe grisea 70-15]
  misc_feature (2)..(262): NCBI GI: 46134955 Blast Desc: FG09326.1 [Gibberella zeae PH-1]
  misc_feature (14)..(264): NCBI GI: 121703193 Blast Desc: conserved [Aspergillus clavatus NRRL 1] gi|119398004|gb|EAW08435.1| conserved [Aspergillus clavatus NRRL 1]
  misc_feature (14)..(262): NCBI GI: 115387225 Blast Desc: [Aspergillus terreus NIH2624] gi|114195202|gb|EAU36902.1| [Aspergillus terreus NIH2624]
  misc_feature (14)..(264): NCBI GI: 169766732 Blast Desc: [Aspergillus oryzae RIB40] gi|238483497|ref|XP_002372987.1| conserved [Aspergillus flavus NRRL3357] gi|83765692|dbj|BAE55835.1| protein product oryzae]
  misc_feature (14)..(252): NCBI GI: 169621476 Blast Desc: SNOG_13948 [Phaeosphaeria nodorum SN15] gi|111057453|gb|EAT78573.1| SNOG_13948 [Phaeosphaeria nodorum SN15]
  misc_feature (14)..(259): NCBI GI: 145229313 Blast Desc: An01g05400 [Aspergillus niger] gi|134055068|emb|CAK43709.1| protein product [Aspergillus niger]
  misc_feature: Useful for introducing or modulating the production of volatile compounds
MPVNPFKFGTGLWDESHRFQTSWLLPPYVLFGFRAFFSLYIFTTLLFNIGYSCSPGHDSCLSAQNSFSYFTVLTYWGLGFYFLFSSFHTFLYARRSYSPLEAWPRPLQALHSLLYTCTTVFPFVVTIVFWALLSSPTTLATTYSTWSNISQHALNSAFALFEIVVPRTNPSPWVHIPFLLLILALYLALAYVTDATKHFYTYSFLDPGLQGGLVAAYVFGIAIGFCIIFSVVQGLIMLRKRVTEGREGRRDEEKRGSELEMSPV

SEQ ID NO: 27547 - DNA, 5476 bp, Muscodor strobelii
  misc_feature: SGI EST ID NO. CUFF.65432.1
  misc_feature: Variant of the nucleotide sequence at SEQ ID NO 27545
cgcctattgtcccaatttttgaaatctaagtagcctacctacggctcagcccacatcagctgagctgtcatctggtttactttagctcagccaacacctatgagctttcactcgacgcttacttcacgactatgcagcgcctctgagtgcgcctgttgattttttttgccccttcctctttctgcagaaggattgcgcttcggttagatgattgcgactgcgacggcactggttaaagtcagaacgcgcccacgtcacgataccctcgatcacggaagagaatcggtcaaacatcgcgacctttcgaatgaagcagacagagctatcgaacgaactcctgcattagactatctccttattgcgaacacctcccgaccatcaaaatgccggtgaacccattcaaattcggcacggggctatgggatgagtcccatcgctttcagacgtcctggcttctgccgccatacgtcttattcggctttcgcgcattcttctccctctacatattcacaaccctcctcttcaacatcggctactcctgttcaccaggccacgactcctgtctctcggcgcaaaattcattctcctacttcacagtacttacctactgggggttaggattctacttcctattctcctccttccacacattcctctacgcgcgccgctcctatagccccctcgaagcctggccacggccccttcaagcgctccactcattactctacacgtgcacgacggttttccccttcgtcgtaacgatagtattctgggcccttctgtcgagtccgacgacgctagcgacgacgtattcaacgtggagtaatataagtcaacacgcgctgaactcggcgtttgcgctattcgagattgtggttccgaggacgaatccaagtccgtgggtgcatatcccgtttttgttactgatattagcgctttatcttgcgctggcgtatgtgacggatgctacgaaacatttttatacgtactcgtttcttgatcccggacttcagggcggacttgtggcggcgtatgtttttggcattgcgattgggttttgtatcatctttagtgtggtgcagggcttgattatgttgaggaaaagggtgacggagggtagggagggaagaagggatgaggagaagagggggagtgagctggaaatgagtcctgtttagggttaaaggggtaggttgaaggggataggatgggtaatcttgggcagtatgtagatgctatatacagaccaaatatgcatcgtaatcacagctacgtatatcgcatttccaataaagccgatatccgtgaagacacgatcgaggcagagtcaaataatccatgatcaaagcagtcacttcagaatcacacaataagtagcattacatctcatctcccattaaaaattactcggctagagttatgcgtgtattatttaatattccaaaacacaaccgcctcggtatgttgtaatattcgatgtgtggtatccgtatgttaacccgctatcgctatgcttttgaatgtttcatcccagatagacaggtctagataagtaaaagttgtacatggtggggtctcactacttcgtgtatattcatggtctgtggccacgtgttgagtcatgaccttcgtgaattatatatttggtacgtggagggtgatgatcggtataaggatagtattggtggtgttctgtgtgctgtgttccaattcgggtttgatagatggcgtttgtggtggatggtgaatcgatcaatcgttgtttgtgttgcaagtaaggcgtaagcctctcagtatccgttccttaccgagccacggacagaggcactgcccggatgaacaggcaaacgctttccgtccagaaacttcggactccgggcattgtaatacggattaggcgccgtttgttgtttcttcgcctcaaactcagcgcgctcctcttcatcaagtgtaaatgcctttctcagccagccgaacttgcttttctttttcttcagcctttggccatcctgagtctcggcattcgttacattgctcaacatgctcatacccatagctgatcgttgattccgcccatgagttgtgtgagatgtatgcggccgaggcggtggccgagttgtcgctgaggtgtgtggccgttgttgtaagggtgagtgaggactagcccggacagggtagaagtattgttgctggtcagaccgaggtgagggtatggtattcaggaatgccggtggctgcatctcatttatcgtgttcattcctgaatgatacgaggcagagggtctgatttcctggttaggtgtatgctcaggatcccgtctctggctagggcgaggtgattgctgatgtggagagtgtgaataatgaggtgagtgctggaaatgaggcgactgctggtgacggggtgactgttggtgacgaggtgattgctgatagtgaggtgattggaatctcgccgattcaatctcttctgcattgacgggaggcacgtgaatgacttccggtaaggtcccgcccttcaatgacactctctgccgtagagaagttcgttttgataatctcccatcttgcggtggaggaacttccgacatacgaggtgaagctgacgcttggggtgaaggtgcgggctcagctggctgaggagtataagtccgcggttgtaataggtacagaccctgctcctcatccggcttctgtaactcctgctgtctgtcgtccatctcgggtccaggtggagttagaattacaacctccttttcatcatcaaacacaagatcttcctgatcttcctcaatgggcactttcactcgcggcgctctttgtggtatacttggtggtggtgaatgtggttctgatgaacgggttcgggatgaaggagatgacggtttcactgaactatcccttgaacgcgccgtttgccctggaccagagaatggcgctacggtgaactataaattgtaagtgtgccacacccgccttgtcgaaaaaaggtttgacttacccttgttttgcggcttacttctccagctttctggttcatttctgcgactatttgattcatgttggcaagggtgctctccagcgaaagcgcatgttcttgtatgtcgctaaaggcctgataccatccttgcgcgttgcccttcatagcatcgaagatgtcgaccaattccggtcgctgttgccgccatgcccgcccctcttggtctttcaagtagattgcgaattgtttcgttgccttcagtccttcatcagtatctcgtaaggtgatttccagagcgtacgccgttctctcagcgatatgttcaatcttctcgttgcccgttattatttgcatgcggaaatcgcgatcttccagcattgtctcaaaagttttcatgttgttcataggtagcttcaagtactgaatccgctcttcaacgtcctcaaccgccattttgacgtcttctagacaggtctctagaaattcatctacttcgtcgatatggccttggaggatgtcgactacctggtcgttgttgttggcaagcccatttagcaacaagtatacgccaaaagaaatttgcgctagaagtttccacagctcatgatgtttctgcccaggccggtacctccacaatgcattgtgcagaggggtatccttcgttccggccagtaggcgtgtcctccgttctttcgcattgccaaatttgagctttggtttgtctcctcccgaagttgtcgtcgcctcctggagtgactctgcaaaggcctcctgcatagcagggatcgggtgaatcggaacatttgccgcggtctcttttattttctggcgcatggcttctggaggctcttttggctcgacctgagatgagtaacgcttgggaggaagtaagtcgtcgtcttcagaatcggtgagtaacaagacagagtgttcctcgtcatggtgaagccctaacggtagagccattgcgacgcaagacggcgattagttgtgcgccggccagtttgccaatactaccctctgaatctattttaaaacgatcgcctgcagtggctggcgcagggggttgccctattccgttccgtactagagatcgtcgacgacagcgggaagagtgcgataggtcgatcagactcggtttttgggtagtatgaaaccaggcacgaccgattatgacagtctggtgcgaggcgcagatcgcgggacagagatgggggctaacaacgcgaactgccaagagcctgcaggtagccgaaacaatagttgagaaacgtgcgacacgaggggcccgtggcggtccaataaattggcgtttgcgaaacgacgacgaaagaccgtatagtaggatttgtttctaccgaatatacggcgcaggaactgcacgaggtgtagccagattcctacgtctcaagccgatttgacccgtgataggcgatggtgcaagaatggcatggcggtccgcggagcctcgttgcgaatgggcgtggcacaatcaccgaatagttcaccaagtaatccttcgacggctctactaaagttcaatactacgtttcggatgatacggaattccaactgttggctatttgtttgcaacgtgaaactgttatgcagtgtggcgtcgaggattgagacaatagagtatgcgatcgcgaggcgttggctggcgctattcgtgtgtctttgctgacaatgcgcccacaatgatggcggcaattagagtaaaatgaaagcaaatatgaaaacgagtgtggtttgagagcgaccgtataccagtaagtcgagtaaatgcgatgttgctgtcgcttcacgaaagaaaggagaaggaagcaaacgagaaggatccgtggtgaagacagacgtaagttggctcggcagatgaatgcttctagctccagcaatgataaattgttcgagtcttagcccgtctaaagagcagatagtgcgtgttgtaaagcaccgtttaggaaaagaaactattgtagactggtgatcgtcgaggttcgtgtagaaaagggaagccactaaagaaaagacgggaacttgttgtagttagtccaggggaaatgtgcgctattgaatcgagacccacgaatggagtatgtcgaggatcgagagccaggatcgcaaaggttggcgtaagtacagtatcacgtaataaactaaacttgcagagaacacagagtgaacggaatgaagagatttcctggggtcggctctccttttggctttgacctcaacagagaagaattgtcaaatgctatcaaatgcgatcaaataccatacagcagtagcctcggaatgttggctctagatggaggcgacaagaccttctttaccctgagctgaacccgctaacagtctaagcttatacattgttggcaagtcgtttactggcacgcaagtaggatgctcaaagaaagccccagaatgaaatattatgtagaatgccaattaaggagtacatgtgcaacgagtgtacgacttacgagtattgtg

SEQ ID NO: 27548 - DNA, 3042 bp, Muscodor strobelii
  misc_feature: SGI cDNA ID NO. 569437
  misc_feature: Encodes the peptide sequence at SEQ ID NO 27549
atgcatcaggaattggccgacaatccagcgatcattgccaacttctgctacaatttgatttacatcaacgaggaagttgggctatttgaattcttccacgaaactgtttatgagttcttcatgtcatatcagcgaactatctatagccgacgagttgccgaaatttgtctgtcctacctactgtctcccgtttttgacgaaggcgtacaaagtgatgctagttggtacaatgccggtagcctcgaggccatcctacaggaacatcccttccttctgtatgcatcttccaagtgggcctcttgcctcaggcaaagtttccggccaggaggagacgaggctctggagaagagcgattcaacagttatttatctactcacggatctttacgacaaatatcccaagttgacaaggaagggaaatttgcagcttgccttccaggtatatttacttcatatggacaagatgctgcccggcggtgtttgtccggaacacattgtcagttattttggtctaggccagttgttcgatagcctcaacgaaagggcattgttcaacatcgccgagcgcgattgccatgggttgacgccaatccattgggccgcacagagcaatactcaacttcgcaacgacgttaggctcacactaaacaaactgatcgaatatggagcagacgtcaatgcaatagaccacaaagggcataccccattgtactatgcggcataccaaggaaatttggaggcggtagagctacttgctgagaaaaactccgaacttaacatacagagcacaagtggagagacagccttgatcgccgcttgtcgaaaacatcatgaagaaatcatagggtgtcttgtgcaggaaaatgcagacgtgacaatccaaagcatctctggcactgctctgcaagccatttcttcgattggatgttggaattgcgcgaaaaaggtacttgacggttataaaggccaaaagatcatcgaaactaatgggccgttccgcacgtctcttcatgctgcagcattctacggtcatcaggagtttgtaaaatgtctcctcggtcgagatgattatactgttcacacaaaggacaaaatgcacggcaacctgataacggcggccgccataggatgcaatactgggcttgaccctaaacccttcatggaaacgattgagttattgattgaacacggagtaaagattaataacaaaagcggacaagccgggctagctcttcaactagcagcataccatgggcataaggaccttgttcggctgcttttagacaaaggtgcgaaggttcgaaaagcaatagggccaatggggacagcatatcgagtagcggaagctcgtgggcatcacgaaattggagatatgctgaagacgcacgaccggaaagctgcggattatggtcgagtcaagaattccaaagcgcaagatttccagccgatccaacagactatattcgaagccactgtaggatcgagcagcgtgagtatcatcaacgccctcattgaaaagtttctgtgcgcatatgcatgggaaataggacgcggcggcggttacttcttgaaaccattggtccagctcggcaaaacggctttcttcgacgttatagacttggccacaaagtcatacgatactgatatgcaagctattgagcggcacaccggccttagacagcggttcctgcaaaaaatctccaatctgctcttctttcctggcttcgcaagcgaagatggtaagatcgcactacaacttggaatgatattccctcactctcaaagggcagcatcgtcatcttttcacgatcctcttggggaagactttgcacaggtcttagatgcgatgatccaggccgcggtgaccatattggtgtgcgccatagacagtgaaaaccatagtataatccttatgatcactgacacatggatcgaggcgctcgacaaactcatttcctacccagattttgggcgaccgatgctgcagaaggtacttcgaactcgtgcaaaagagcttaaggatctcctggaggatcgtgagaaccatgaggctaggcagaaagctgaggccttagtgtccgttggtatcgagcttgcaatagggatagctcggggcggtaggaggaccaataatcttggctttgtgatttcaaagctgtgggttgaagcgattaaagatgcggaagaactaggcacggtgggagaggaaccgatacagctattcattaggatcttcaccacgcggctcgcaggtgcaattacccagaaagaccatctcaacgcaaagattggtgccgtagctggcattgatcttttgagagcggcggctttgctcccaaaaacaacattgttcgacatgttctgtgaggagctggtccgattgtgggatctaattctggagaatcagatgaagcctctggcccaagagctcatccagctaaagaagacagagtacgaagtatgtttcagtgaaggtaagcaggatgaagctctcggcctcttgcttacaggcatcggtgttcttcacgtcgccataaaggatcacagagattcattagctttcgaagtactgcgttcgatagaggctacacccacgaagccggcgatatcactctttggactatttgcagaccaggcttggagctccatcctcgtcgcctgtgtggatctatttggaacagcggaaaagagacaatctgggatgttggacatattggcatcaagagtcattgccctggtatggactagttctgaacaaagcgatgacgaaatcacgagagttgtcaccaaacacatcgacggactcaatcgaattgcctgttcactggacaaacgcaagcagttcatgcaggtcttgagagttattttcatattcctggaagtcgctttgggtgaagaaaaaacaacatctgtcgtctcccaaacactggcaaacgtagcctccaaaaagctaggcgcgttggttccagggtttcttgatatggccgagtttgcacaatacgaaaaggctctcaagtatttgagggctcaaagtgcgccgtga

SEQ ID NO: 27549 - protein, 1013 aa, Muscodor strobelii
  misc_feature: SGI Peptide ID NO. 569437
  misc_feature (231)..(263): Pfam Id: PF00023 Pfam Desc: Ankyrin repeat
  misc_feature (192)..(230): Pfam Id: PF00023 Pfam Desc: Ankyrin repeat
  misc_feature (264)..(296): Pfam Id: PF00023 Pfam Desc: Ankyrin repeat
  misc_feature (1)..(1008): NCBI GI: 156060005 Blast Desc: SS1G_02139 [Sclerotinia sclerotiorum 1980] gi|154699549|gb|EDN99287.1| SS1G_02139 [Sclerotinia sclerotiorum 1980]
  misc_feature (2)..(962): NCBI GI: 46117334 Blast Desc: FG04509.1 [Gibberella zeae PH-1]
  misc_feature (218)..(459): NCBI GI: 116208038 Blast Desc: CHGG_03312 [Chaetomium globosum CBS 148.51] gi|88183909|gb|EAQ91377.1| CHGG_03312 [Chaetomium globosum CBS 148.51]
  misc_feature (218)..(455): NCBI GI: 116201879 Blast Desc: CHGG_08824 [Chaetomium globosum CBS 148.51] gi|88177342|gb|EAQ84810.1| CHGG_08824 [Chaetomium globosum CBS 148.51]
  misc_feature (218)..(459): NCBI GI: 116208038 Blast Desc: CHGG_03312 [Chaetomium globosum CBS 148.51] gi|88183909|gb|EAQ91377.1| CHGG_03312 [Chaetomium globosum CBS 148.51]
  misc_feature (218)..(455): NCBI GI: 116203745 Blast Desc: CHGG_09756 [Chaetomium globosum CBS 148.51] gi|88175884|gb|EAQ83352.1| CHGG_09756 [Chaetomium globosum CBS 148.51]
  misc_feature (218)..(459): NCBI GI: 116203745 Blast Desc: CHGG_09756 [Chaetomium globosum CBS 148.51] gi|88175884|gb|EAQ83352.1| CHGG_09756 [Chaetomium globosum CBS 148.51]
  misc_feature (9)..(455): NCBI GI: 189206656 Blast Desc: ankyrin repeat domain containing protein [Pyrenophora tritici-repentis Pt-1C-BFP] gi|187975755|gb|EDU42381.1| ankyrin repeat domain containing protein [Pyrenophora tritici-repentis
  misc_feature (218)..(455): NCBI GI: 116199953 Blast Desc: CHGG_08132 [Chaetomium globosum CBS 148.51] gi|88179411|gb|EAQ86879.1| CHGG_08132 [Chaetomium globosum CBS 148.51]
  misc_feature (27)..(455): NCBI GI: 242760891 Blast Desc: ankyrin repeat-containing protein, [Talaromyces stipitatus ATCC 10500] gi|218723276|gb|EED22693.1| ankyrin repeat-containing protein, [Talaromyces stipitatus ATCC 10500]
MHQELADNPAIIANFCYNLIYINEEVGLFEFFHETVYEFFMSYQRTIYSRRVAEICLSYLLSPVFDEGVQSDASWYNAGSLEAILQEHPFLLYASSKWASCLRQSFRPGGDEALEKSDSTVIYLLTDLYDKYPKLTRKGNLQLAFQVYLLHMDKMLPGGVCPEHIVSYFGLGQLFDSLNERALFNIAERDCHGLTPIHWAAQSNTQLRNDVRLTLNKLIEYGADVNAIDHKGHTPLYYAAYQGNLEAVELLAEKNSELNIQSTSGETALIAACRKHHEEIIGCLVQENADVTIQSISGTALQAISSIGCWNCAKKVLDGYKGQKIIETNGPFRTSLHAAAFYGHQEFVKCLLGRDDYTVHTKDKMHGNLITAAAIGCNTGLDPKPFMETIELLIEHGVKINNKSGQAGLALQLAAYHGHKDLVRLLLDKGAKVRKAIGPMGTAYRVAEARGHHEIGDMLKTHDRKAADYGRVKNSKAQDFQPIQQTIFEATVGSSSVSIINALIEKFLCAYAWEIGRGGGYFLKPLVQLGKTAFFDVIDLATKSYDTDMQAIERHTGLRQRFLQKISNLLFFPGFASEDGKIALQLGMIFPHSQRAASSSFHDPLGEDFAQVLDAMIQAAVTILVCAIDSENHSIILMITDTWIEALDKLISYPDFGRPMLQKVLRTRAKELKDLLEDRENHEARQKAEALVSVGIELAIGIARGGRRTNNLGFVISKLWVEAIKDAEELGTVGEEPIQLFIRIFTTRLAGAITQKDHLNAKIGAVAGIDLLRAAALLPKTTLFDMFCEELVRLWDLILENQMKPLAQELIQLKKTEYEVCFSEGKQDEALGLLLTGIGVLHVAIKDHRDSLAFEVLRSIEATPTKPAISLFGLFADQAWSSILVACVDLFGTAEKRQSGMLDILASRVIALVWTSSEQSDDEITRVVTKHIDGLNRIACSLDKRKQFMQVLRVIFIFLEVALGEEKTTSVVSQTLANVASKKLGALVPGFLDMAEFAQYEKALKYLRAQSAP

SEQ ID NO: 27550 - DNA, 1456 bp, Muscodor strobelii
  misc_feature: SGI EST ID NO. CUFF.64956.0
  misc_feature: Variant of the nucleotide sequence at SEQ ID NO 27548
gcagaaggtacttcgaactcgtgcaaaagagcttaaggatctcctggaggatcgtgagaaccatgaggctaggcagaaagctgaggccttagtgtccgttggtatcgagcttgcaatagggatagctcggggcggtaggaggaccaataatcttggctttgtgatttcaaagctgtgggttgaagcgattaaagatgcggaagaactaggcacggtgggagaggaaccgatacagctattcattaggatcttcaccacgcggctcgcaggtgcaattacccagaaagaccatctcaacgcaaagattggtgccgtagctggcattgatcttttgagagcggcggctttgctcccaaaaacaacattgttcgacatgttctgtgaggagctggtccgattgtgggatctaattctggagaatcagatgaagcctctggcccaagagctcatccagctaaagaagacagagtacgaagtatgtttcagtgaaggtaagcaggatgaagctctcggcctcttgcttacaggcatcggtgttcttcacgtcgccataaaggatcacagagattcattagctttcgaagtactgcgttcgatagaggctacacccacgaagccggcgatatcactctttggactatttgcagaccaggcttggagctccatcctcgtcgcctgtgtggatctatttggaacagcggaaaagagacaatctgggatgttggacatattggcatcaagagtcattgccctggtatggactagttctgaacaaagcgatgacgaaatcacgagagttgtcaccaaacacatcgacggactcaatcgaattgcctgttcactggacaaacgcaagcagttcatgcaggtcttgagagttattttcatattcctggaagtcgctttgggtgaagaaaaaacaacatctgtcgtctcccaaacactggcaaacgtagcctccaaaaagctaggcgcgttggttccagggtttcttgatatggccgagtttgcacaatacgaaaaggctctcaagtatttgagggctcaaagtgcgccgtgaggcatctgagggcagacaaactgggcgcgaggctacgtgcgcagctattatgtgtatgtacagatgtaaatgagtgaatacttcttgagtctgagaaagagaggtaactcgaaacattggcgaacggattacctgaaggggacaaccttgcaggatttaggagatgctggggaagtgggactcaattgttcagctcctggaaatagttagtaagtgccctgacagcgagctagcgattttcttagtgcatttcttgcatgaaagcgatgggatttcttatttgcactttctggtcagagtctggcgtgtctctcctccggaaggagattacgaggccttttcaattcgctcttttctcatttaaaagcagcgacttacctttcctgacgagttgag

SEQ ID NO: 27551 - DNA, 837 bp, Muscodor strobelii
  misc_feature: SGI cDNA ID NO. 569438
  misc_feature: Encodes the peptide sequence at SEQ ID NO 27552
atggagaagtacacgggcgcaattctgttgcctctggctacatggcaggtgtcaaggataatcgagaaggttcacgaagcttcactcgaagatgaaatgcatgatgatatacatctgttgtacttctacgtcgactacggagatgaaaagggacgaggcacgatatttagaagcatgctcctgacatttttggagcaggcatacaagcaccctacaaaacttggtactatcaacccacccagagatggtattccgactgagtctcttgtcaaagagctacaggatttgctcgcttcattccacggttgtatatatatcatcatcgacgcgcttgaccagcttccggaaccttatggatacaaggtcgtttgctttctcaaaagcctcgcacaaaaactacacagcaaggggagcagttgcgagatcagagtagcggtaagctcacgcaattgtcaatatgtcgtggacctgcaactagatattacagtcatcgaaatcgaagtaacagacgaggcaaataaggatgacatacaacaatacgttcggagtcaacttaattccaagcttttgactggaaagctggaactcggaagccttattattgaaaaaatcagcacagatgcaaagggaaacttcttgtgggcaaagacacaaactctcaatgtgtgcaattgtcggcgagaatttccagttaacgaggttcttgggcatcgcgtattaggagacttagaagagatatatcaaaagtatagacagtcgatcgagtctataacgaatccttcccgaaagcgtatctctttgattgcggatcgaacctcaatacggccaaaactttag

SEQ ID NO: 27552 - protein, 278 aa, Muscodor strobelii
  misc_feature: SGI Peptide ID NO. 569438
  misc_feature (17)..(277): NCBI GI: 46117334 Blast Desc: FG04509.1 [Gibberella zeae PH-1]
  misc_feature (59)..(266): NCBI GI: 156060005 Blast Desc: SS1G_02139 [Sclerotinia sclerotiorum 1980] gi|154699549|gb|EDN99287.1| SS1G_02139 [Sclerotinia sclerotiorum 1980]
  misc_feature (29)..(255): NCBI GI: 171679183 Blast Desc: protein product [Podospora anserina] gi|170937663|emb|CAP62321.1| protein product [Podospora anserina]
  misc_feature (32)..(249): NCBI GI: 154308128 Blast Desc: BC1G_08231 [Botryotinia fuckeliana B05.10] gi|150853116|gb|EDN28308.1| BC1G_08231 [Botryotinia fuckeliana B05.10]
  misc_feature (39)..(235): NCBI GI: 67902626 Blast Desc: AN8300.2 [Aspergillus nidulans FGSC A4] gi|40747709|gb|EAA66865.1| AN8300.2 [Aspergillus nidulans FGSC A4] gi|259484224|tpe|CBF80262.1| TPA: conserved [Aspergillus FGSC
  misc_feature (18)..(254): NCBI GI: 238845951 Blast Desc: ankyrin repeat protein [Microsporum canis CBS 113480]
  misc_feature (106)..(270): NCBI GI: 189193223 Blast Desc: conserved [Pyrenophora tritici-repentis Pt-1C-BFP] gi|187978514|gb|EDU45140.1| conserved [Pyrenophora tritici-repentis Pt-1C-BFP]
  misc_feature (25)..(259): NCBI GI: 261356089 Blast Desc: ankyrin repeat domain-containing protein [Verticillium albo-atrum VaMs.102]
  misc_feature (18)..(235): NCBI GI: 145237864 Blast Desc: An07g04960 [Aspergillus niger] gi|134076056|emb|CAK39415.1| protein product [Aspergillus niger]
  misc_feature (21)..(249): NCBI GI: 238842160 Blast Desc: het-eN [Microsporum canis CBS 113480]
MEKYTGAILLPLATWQVSRIIEKVHEASLEDEMHDDIHLLYFYVDYGDEKGRGTIFRSMLLTFLEQAYKHPTKLGTINPPRDGIPTESLVKELQDLLASFHGCIYIIIDALDQLPEPYGYKVVCFLKSLAQKLHSKGSSCEIRVAVSSRNCQYVVDLQLDITVIEIEVTDEANKDDIQQYVRSQLNSKLLTGKLELGSLIIEKISTDAKGNFLWAKTQTLNVCNCRREFPVNEVLGHRVLGDLEEIYQKYRQSIESITNPSRKRISLIADRTSIRPKL

SEQ ID NO: 27553 - DNA, 873 bp, Muscodor strobelii
  misc_feature: SGI EST ID NO. CUFF.64969.0
  misc_feature: Variant of the nucleotide sequence at SEQ ID NO 27551
gaaaatcaacattgatgtcaaggataatcgagaaggttcacgaagcttcactcgaagatgaaatgcatgatgatatacatctgttgtacttctacgtcgactacggagatgaaaagggacgaggcacgatatttagaagcatgctcctgacatttttggagcaggcatacaagcaccctacaaaacttggtactatcaacccacccagagatggtattccgactgagtctcttgtcaaagagctacaggatttgctcgcttcattccacggttgtatatatatcatcatcgacgcgcttgaccagcttccggaaccttatggatacaaggtcgtttgctttctcaaaagcctcgcacaaaaactacacagcaaggggagcagttgcgagatcagagtagcggtaagctcacgcaattgtcaatatgtcgtggacctgcaactagatattacagtcatcgaaatcgaagtaacagacgaggcaaataaggatgacatacaacaatacgttcggagtcaacttaattccaagcttttgactggaaagctggaactcggaagccttattattgaaaaaatcagcacagatgcaaagggaaacttcttgtgggcaaagacacaaactctcaatgtgtgcaattgtcggcgagaatttccagttaacgaggttcttgggcatcgcgtattaggagacttagaagagatatatcaaaagtatagacagtcgatcgagtctataacgaatccttcccgaaagcgtatctctttgattgcggatcgaacctcaatacggccaaaactttagcaggacaaaggttcaaccaatcgaactttaacagatttatatttttctgagttaaattaaagagaaaaat

SEQ ID NO: 27554 - DNA, 1077 bp, Muscodor strobelii
  misc_feature: SGI cDNA ID NO. 569439
  misc_feature: Encodes the peptide sequence at SEQ ID NO 27555
atggcgggagttcccgcaagggcactttcactgaaggactggttcaacgctagagatcaagacagtttcattccgatagactacaccacagatcttgattccgtctactgtgtagtcagtcgatatttgctatttaaactagggcttggtctactaccaagattcaaagtcagtctacaggcgccaaatgcggacgtttcagatctcccatcatgggttatagactggcggctgacaggccttcacgtccaagatatcagctccgagcgtacttgtaagcataaaatcttcaggacattagataatccgtgggacgtcaagacacgtgaaatcatcaacccgataggacccattcggcataagccaggatctccctctccagggcacaacaagttccgctctgacaataaaatcgtcgacgagcagaacttgacgaaactcaaactccgtgggaggatcgtgagaagtgccatcatcaatatagggaaccacgaaatcgtcctagaacagtctagtttctacctccgggtcgctcgaccactgcaagagaagacagggagctatggatggaagctacccgtccccttgcgggcagacgacgtcgtcgtgcaaatgttggctttctcacgagaagtctacacagactttcggctcaaggatacacccgatccctgtgattataagcaagaggggatgtggctattaagacaaaccaatacgggagagcacaagctcatcgcttgtcttgcgactatcccggaacatgagattgctccatatgagaactggtcacttaaacctcggaaaaaacagctcgaagaatatgggattgctctatatgaaaatcattcccgcaaaccttgggagaaaaatcacgaaggatatgaagaggacgaagaatttgaggaggacgaggaatatgagactgctctatatgaagattacttccgtaaacctttggaggaaaggtacaaagaaccggtagtggtccctttacttgccagggcgaagtggggagctgatgttgttatgaaagaagagagtctcgggcccgttgaaacttttgttattgtctaa

SEQ ID NO: 27555 - protein, 358 aa, Muscodor strobelii
  misc_feature: SGI Peptide ID NO. 569439
MAGVPARALSLKDWFNARDQDSFIPIDYTTDLDSVYCVVSRYLLFKLGLGLLPRFKVSLQAPNADVSDLPSWVIDWRLTGLHVQDISSERTCKHKIFRTLDNPWDVKTREIINPIGPIRHKPGSPSPGHNKFRSDNKIVDEQNLTKLKLRGRIVRSAIINIGNHEIVLEQSSFYLRVARPLQEKTGSYGWKLPVPLRADDVVVQMLAFSREVYTDFRLKDTPDPCDYKQEGMWLLRQTNTGEHKLIACLATIPEHEIAPYENWSLKPRKKQLEEYGIALYENHSRKPWEKNHEGYEEDEEFEEDEEYETALYEDYFRKPLEERYKEPVVVPLLARAKWGADVVMKEESLGPVETFVIV

SEQ ID NO: 27556 - DNA, 1272 bp, Muscodor strobelii
  misc_feature: SGI EST ID NO. CUFF.64977.0
  misc_feature: Variant of the nucleotide sequence at SEQ ID NO 27554
cgcagatgttctcgatataccagcaggctgaacaggttcttgtttggcttggtgacccgcataatggcatagaagacgttattgtcgcgtctactttgaagttacaggcgaattcgaatgtccacttgacacaggtggttgatggtgctacgtggctatgcatgtcaccctggtttcgacgggcatgggtgcagcaagaagtcttcgcggctcgatatttacgcttcatgtgtggtgggcatgaattcacccacagccatctgttgtctaatcaccggcagctcgaaaagtatcttccccgcaaagagatggcagtacgcggaaattcagtctccgctcgcagaaaatacaaagacagacaccatgagtacaggaagccaaaactggattcaactgcgagacttaagctgcgaataaatgagctatttggccatgcggatgaatatctgtcctgttttcaaaagttctcaagctcgaaacgtcttgactttgtagaagccctgctgcatacacataatactgaagcttcaaatcctctggatcatgtctatgcattcttagaaatggcgggagttcccgcaagggcactttcactgaaggactggttcaacgctagagatcaagacagtttcattccgatagactacaccacagatcttgattccgtctactgtgtagtcagtcgatatttgctatttaaactagggcttggtctactaccaagattcaaagtcagtctacaggcgccaaatgcggacgtttcagatctcccatcatgggttatagactggcggctgacaggccttcacgtccaagatatcagctccgagcgtacttgtaagcataaaatcttcaggacattagataatccgtgggacgtcaagacacgtgaaatcatcaacccgataggacccattcggcataagccaggatctccctctccagggcacaacaagttccgctctgacaataaaatcgtcgacgagcagaacttgacgaaactcaaactccgtgggaggatcgtgagaagtgccatcatcaatatagggaaccacgaaatcgtcctagaacagtctagtttctacctccgggtcgctcgaccactgcaagagaagacagggagctatggatggaagctacccgtccccttgcgggcagacgacgtcgtcgtgcaaatgttggctttctcacgagaagtctacacagactttcggctcaaggatacacccgatccctgtgattataagcaagaggggatgtggctattaagac

SEQ ID NO: 27557 - DNA, 1791 bp, Muscodor strobelii
  misc_feature: SGI cDNA ID NO. 569440
  misc_feature: Encodes the peptide sequence at SEQ ID NO 27558
atggaatgtaatggactcacaattgccattacgcaaaacctgcacgatgcgcttgttgcgattcgaggacgaaagtccgactgtgattatatatgggtagatgcgctctgcatcaaccaagccgataagcaagaattggctgttcaggtctcgcagatgttctcgatataccagcaggctgaacaggttcttgtttggcttggtgacccgcataatggcatagaagacgttattgtcgcgtctactttgaagttacaggcgaattcgaatgtccacttgacacaggtggttgatggtgctacgtggctatgcatgtcaccctggtttcgacgggcatgggtgcagcaagaagtcttcgcggctcgatatttacgcttcatgtgtggtgggcatgaattcacccacagccatctgttgtctaatcaccggcagctcgaaaagtatcttccccgcaaagagatggcagtacgcggaaattcagtctccgctcgcagaaaatacaaagacagacaccatgagtacaggaagccaaaactggattcaactgcgagacttaagctgcgaataaatgagctatttggccatgcggatgaatatctgtcctgttttcaaaagttctcaagctcgaaacgtcttgactttgtagaagccctgctgcatacacataatactgaagcttcaaatcctctggatcatgtctatgcattcttagaaatggcgggagttcccgcaagggcactttcactgaaggactggttcaacgctagagatcaagacagtttcattccgatagactacaccacagatcttgattccgtctactgtgtagtcagtcgatatttgctatttaaactagggcttggtctactaccaagattcaaagtcagtctacaggcgccaaatgcggacgtttcagatctcccatcatgggttatagactggcggctgacaggccttcacgtccaagatatcagctccgagcgtacttgtaagcataaaatcttcaggacattagataatccgtgggacgtcaagacacgtgaaatcatcaacccgataggacccattcggcataagccaggatctccctctccagggcacaacaagttccgctctgacaataaaatcgtcgacgagcagaacttgacgaaactcaaactccgtgggaggatcgtgagaagtgccatcatcaatatagggaaccacgaaatcgtcctagaacagtctagtttctacctccgggtcgctcgaccactgcaagagaagacagggagctatggatggaagctacccgtccccttgcgggcagacgacgtcgtcgtgcaaatgttggctttctcacgagaagtctacacagactttcggctcaaggatacacccgatccctgtgattataagcaagaggggatgtggctattaagacaaaccaatacgggagagcacaagctcatcgcttgtcttgcgactatcccggaacatgagattgctccatatgagaactggtcacttaaacctcggaaaaaacagctcgaagaatatgggattgctctatatgaaaatcattcccgcaaaccttgggagaaaaatcacgaaggatatgaagaggacgaagaatttgaggaggacgaggaatatgagactgctctatatgaagattacttccgtaaacctttggaggaaaggtacaaagaaccggtagtggtccctttacttgccagggcgaagtggggagctgatgttgttatgaaagaagagagtctcgggcccgttgaaacttttgttattgtctaa

SEQ ID NO: 27558 - protein, 596 aa, Muscodor strobelii
  misc_feature: SGI Peptide ID NO. 569440
  misc_feature (5)..(117): Pfam Id: PF06985 Pfam Desc: Heterokaryon incompatibility protein (HET)
  misc_feature (30)..(117): Pfam Id: PF06985 Pfam Desc: Heterokaryon incompatibility protein (HET)
  misc_feature (3)..(314): NCBI GI: 169622599 Blast Desc: SNOG_14524 [Phaeosphaeria nodorum SN15] gi|111056944|gb|EAT78064.1| SNOG_14524 [Phaeosphaeria nodorum SN15]
  misc_feature (1)..(314): NCBI GI: 46127485 Blast Desc: FG08120.1 [Gibberella zeae PH-1]
  misc_feature (3)..(140): NCBI GI: 238492901 Blast Desc: AFLA_042250 [Aspergillus flavus NRRL3357] gi|220696181|gb|EED52523.1| AFLA_042250 [Aspergillus flavus NRRL3357]
  misc_feature (3)..(141): NCBI GI: 169774653 Blast Desc: [Aspergillus oryzae RIB40] gi|83769657|dbj|BAE59792.1| protein product [Aspergillus oryzae]
  misc_feature (4)..(146): NCBI GI: 238497317 Blast Desc: AFLA_138830 [Aspergillus flavus NRRL3357] gi|220694774|gb|EED51118.1| AFLA_138830 [Aspergillus flavus NRRL3357]
  misc_feature (1)..(140): NCBI GI: 145245067 Blast Desc: An11g08370 [Aspergillus niger] gi|134079496|emb|CAK46028.1| protein product [Aspergillus niger]
  misc_feature (3)..(219): NCBI GI: 238496765 Blast Desc: conserved [Aspergillus flavus NRRL3357] gi|220694498|gb|EED50842.1| conserved [Aspergillus flavus NRRL3357]
  misc_feature (3)..(143): NCBI GI: 121715049 Blast Desc: HET domain protein [Aspergillus clavatus NRRL 1] gi|119403290|gb|EAW13708.1| HET domain protein [Aspergillus clavatus NRRL 1]
  misc_feature (8)..(314): NCBI GI: 46111023 Blast Desc: FG02393.1 [Gibberella zeae PH-1] gi|82779921|gb|ABB90278.1| heterokaryon incompatibility protein [Gibberella zeae]
  misc_feature (1)..(314): NCBI GI: 256731898 Blast Desc: NECHADRAFT_80737 [Nectria haematococca mpVI 77-13-4]
MECNGLTIAITQNLHDALVAIRGRKSDCDYIWVDALCINQADKQELAVQVSQMFSIYQQAEQVLVWLGDPHNGIEDVIVASTLKLQANSNVHLTQVVDGATWLCMSPWFRRAWVQQEVFAARYLRFMCGGHEFTHSHLLSNHRQLEKYLPRKEMAVRGNSVSARRKYKDRHHEYRKPKLDSTARLKLRINELFGHADEYLSCFQKFSSSKRLDFVEALLHTHNTEASNPLDHVYAFLEMAGVPARALSLKDWFNARDQDSFIPIDYTTDLDSVYCVVSRYLLFKLGLGLLPRFKVSLQAPNADVSDLPSWVIDWRLTGLHVQDISSERTCKHKIFRTLDNPWDVKTREIINPIGPIRHKPGSPSPGHNKFRSDNKIVDEQNLTKLKLRGRIVRSAIINIGNHEIVLEQSSFYLRVARPLQEKTGSYGWKLPVPLRADDVVVQMLAFSREVYTDFRLKDTPDPCDYKQEGMWLLRQTNTGEHKLIACLATIPEHEIAPYENWSLKPRKKQLEEYGIALYENHSRKPWEKNHEGYEEDEEFEEDEEYETALYEDYFRKPLEERYKEPVVVPLLARAKWGADVVMKEESLGPVETFVIV

SEQ ID NO: 27559 - DNA, 1272 bp, Muscodor strobelii; identical to SEQ ID NO: 27556
  misc_feature: SGI EST ID NO. CUFF.64977.0
  misc_feature: Variant of the nucleotide sequence at SEQ ID NO 27557

SEQ ID NO: 27560 - DNA, 1887 bp, Muscodor strobelii
  misc_feature: SGI cDNA ID NO. 569441
  misc_feature: Encodes the peptide sequence at SEQ ID NO 27561
atgatgggggtcttctcgttcgtccgtaacatttacgatctcgacacgctcgacactcgcttcaccaactcctcgaccactccctatagaaccgtaatagaagaaagaaaagatgcggcggccgccagcaaagcccgcgcgtcgaaatggaaaagcaaaggagcgagcccgtcgaattggaacacccccgagttctacctgtacacaggcatcaccctgctgtcgatcccctacatgttctataccgcctacgatgcctcgagaatgacacatccgaactatagaaactacgaacgagccctatcaccgggctggatacccggtcgcaagatcgacgtcaccgacaaccagtaccgcaccctccgaaacaacctcccatatctcttcgccctcctcaaattccatcctattctccggcggatatacaacaaagtcatatatcgaatacatacaaacccaaatgcgacgcgcccgacccccgaagaggcagaccagaggttgaaccagcgagcttccttcgactttggattcgccatcatatacctgttggcactacatggcgtctctgctttcaaaatcttgttcatcctgtacttgaactaccaaatcgccaccactctaccccgcaagtccgtgccggccgcgacctgggtattcaacgttggcaccttgttcgcaaacgagctatgcaaaggctatccattcgagaagatcgccgtgttcctatcaagcatcgtctctgccgggttcatcgatggctcaaacggtagcctcgcatcttggggccgatggctagatggctacggcgggctaatgagccgctgggacattctcttcaacctcaccgtgctgcgcatgataagcttcaacctagactactactggtctctcgaccgccgaagcagcagtcccgtcgaaaagaaacaactagatcccacctccctcagcgaaaaagaccgcgtccaaacccccgcccaatccaaagacttctccttccgaaactacatcgcctacaccatctacgcgcccctctacctcaccggccccatcataacattcaacgacttcatctcccagcagcggtacaaatcctccaccatcgagctctcgagaaccataaaatacgggatacggttcgccctttgtttgctagccatggaggtcatattgcattacgactacgtccaagcgatcgcgaagtacgcaccgaattggggagactacagtgcggcgcaactagcgatgctgagtttctttaacctgcacttaatctggctcaaactcctcattccctggcgattcttcagattatggtcactgatagacggtatcgacccaccagaaaacatcatccgctgcgtgagcgacaactggtcgacactagccttctggcggtcctggcatcgctctttctaccgctggtctcttcgctatctcttcatacccctcggcggctcttcattccgcaccaccgcggaggcacttcggtcggtgtttacgtatatagtggtcttcacgttcgtagcgctgtggcacgatatagagttgaacttgttgatttgggggtggctgatagtgttcttcatgttacccgagatggcggctggccagttgtttccgaagaggaagtgggaggggaggccgtgggcttatagaatgatttgttgtgcgggggctgtggtgaatgtactgatgatgattacggcgaatcttgtcggatttgcgtttggggttgatgggctgaaggctgttgttgagggcatttttacgcatttctctggatatgttttcttatctggcgcttgcattgtcatcttctgtggcgtccaggtcatgtttgagattagggagagcgagattaggagggggattaacttgaagtgttga

SEQ ID NO: 27561 - protein, 628 aa, Muscodor strobelii
  misc_feature: SGI Peptide ID NO. 569441
  misc_feature (264)..(568): Pfam Id: PF03062 Pfam Desc: MBOAT family
  misc_feature (299)..(568): Pfam Id: PF03062 Pfam Desc: MBOAT family
  misc_feature (2)..(628): NCBI GI: 256735568 Blast Desc: NECHADRAFT_75542 [Nectria haematococca mpVI 77-13-4]
  misc_feature (3)..(628): NCBI GI: 85116122 Blast Desc: NCU02591 [Neurospora crassa OR74A] gi|28926794|gb|EAA35758.1| NCU02591 [Neurospora crassa OR74A]
  misc_feature (3)..(628): NCBI GI: 171687701 Blast Desc: protein product [Podospora anserina] gi|170943812|emb|CAP69464.1| protein product [Podospora anserina]
  misc_feature (1)..(596): NCBI GI: 145616002 Blast Desc: MGG_03628 [Magnaporthe grisea 70-15] gi|145009788|gb|EDJ94444.1| MGG_03628 [Magnaporthe grisea 70-15]
  misc_feature (1)..(628): NCBI GI: 119480197 Blast Desc: glycerol:H+ symporter (Gup1), [Neosartorya fischeri NRRL 181] gi|119408281|gb|EAW18230.1| glycerol:H+ symporter (Gup1), [Neosartorya fischeri NRRL 181]
  misc_feature (1)..(628): NCBI GI: 169770079 Blast Desc: [Aspergillus oryzae RIB40] gi|83767368|dbj|BAE57507.1| protein product [Aspergillus oryzae]
  misc_feature (1)..(628): NCBI GI: 121710158 Blast Desc: glycerol:H+ symporter (Gup1), [Aspergillus clavatus NRRL 1] gi|119400845|gb|EAW11269.1| glycerol:H+ symporter (Gup1), [Aspergillus clavatus NRRL 1]
  misc_feature (1)..(628): NCBI GI: 70989571 Blast Desc: glycerol:H+ symporter (Gup1) [Aspergillus fumigatus Af293] gi|66847266|gb|EAL87597.1| glycerol:H+ symporter (Gup1), [Aspergillus fumigatus Af293] gi|159129041|gb|EDP54155.1| (Gup1),
  misc_feature (2)..(628): NCBI GI: 225563185 Blast Desc: glycerol uptake protein [Ajellomyces capsulatus G186AR]
  misc_feature (2)..(628): NCBI GI: 240275763 Blast Desc: glycerol:H+ symporter [Ajellomyces capsulatus H143]
MMGVFSFVRNIYDLDTLDTRFTNSSTTPYRTVIEERKDAAAASKARASKWKSKGASPSNWNTPEFYLYTGITLLSIPYMFYTAYDASRMTHPNYRNYERALSPGWIPGRKIDVTDNQYRTLRNNLPYLFALLKFHPILRRIYNKVIYRIHTNPNATRPTPEEADQRLNQRASFDFGFAIIYLLALHGVSAFKILFILYLNYQIATTLPRKSVPAATWVFNVGTLFANELCKGYPFEKIAVFLSSIVSAGFIDGSNGSLASWGRWLDGYGGLMSRWDILFNLTVLRMISFNLDYYWSLDRRSSSPVEKKQLDPTSLSEKDRVQTPAQSKDFSFRNYIAYTIYAPLYLTGPIITFNDFISQQRYKSSTIELSRTIKYGIRFALCLLAMEVILHYDYVQAIAKYAPNWGDYSAAQLAMLSFFNLHLIWLKLLIPWRFFRLWSLIDGIDPPENIIRCVSDNWSTLAFWRSWHRSFYRWSLRYLFIPLGGSSFRTTAEALRSVFTYIVVFTFVALWHDIELNLLIWGWLIVFFMLPEMAAGQLFPKRKWEGRPWAYRMICCAGAVVNVLMMITANLVGFAFGVDGLKAVVEGIFTHFSGYVFLSGACIVIFCGVQVMFEIRESEIRRGINLKC

SEQ ID NO: 27562 - DNA, 2277 bp, Muscodor strobelii
  misc_feature: SGI EST ID NO. CUFF.65071.1
  misc_feature: Variant of the nucleotide sequence at SEQ ID NO 27560
caaagtccgatctcctttcctcgtgtgcattggcggcgcgtaagtattgtgctgcatgcattgtttttgtccatgttgtttctaatgctgttgtaatttcaattcaactgtacacatagacttcgtggcccggcccggccttgtcttgtcgcatgatgggggtcttctcgttcgtccgtaacatttacgatctcgacacgctcgacactcgcttcaccaactcctcgaccactccctatagaaccgtaatagaagaaagaaaagatgcggcggccgccagcaaagcccgcgcgtcgaaatggaaaagcaaaggagcgagcccgtcgaattggaacacccccgagttctacctgtacacaggcatcaccctgctgtcgatcccctacatgttctataccgcctacgatgcctcgagaatgacacatccgaactatagaaactacgaacgagccctatcaccgggctggatacccggtcgcaagatcgacgtcaccgacaaccagtaccgcaccctccgaaacaacctcccatatctcttcgccctcctcaaattccatcctattctccggcggatatacaacaaagtcatatatcgaatacatacaaacccaaatgcgacgcgcccgacccccgaagaggcagaccagaggttgaaccagcgagcttccttcgactttggattcgccatcatatacctgttggcactacatggcgtctctgctttcaaaatcttgttcatcctgtacttgaactaccaaatcgccaccactctaccccgcaagtccgtgccggccgcgacctgggtattcaacgttggcaccttgttcgcaaacgagctatgcaaaggctatccattcgagaagatcgccgtgttcctatcaagcatcgtctctgccgggttcatcgatggctcaaacggtagcctcgcatcttggggccgatggctagatggctacggcgggctaatgagccgctgggacattctcttcaacctcaccgtgctgcgcatgataagcttcaacctagactactactggtctctcgaccgccgaagcagcagtcccgtcgaaaaacaactagatcccacctccctcagcgaaaaagaccgcgtccaaacccccgcccaatccaaagacttctccttccgaaactacatcgcctacaccatctacgcgcccctctacctcaccggccccatcataacattcaacgacttcatctcccagcagcggtacaaatcctccaccatcgagctctcgagaaccataaaatacgggatacggttcgccctttgtttgctagccatggaggtcatattgcattacgactacgtccaagcgatcgcgaagtacgcaccgaattggggagactacagtgcggcgcaactagcgatgctgagtttctttaacctgcacttaatctggctcaaactcctcattccctggcgattcttcagattatggtcactgatagacggtatcgacccaccagaaaacatcatccgctgcgtgagcgacaactggtcgacactagccttctggcggtcctggcatcgctctttctaccgctggtctcttcgctatctcttcatacccctcggcggctcttcattccgcaccaccgcggaggcacttcggtcggtgtttacgtatatagtggtcttcacgttcgtagcgctgtggcacgatatagagttgaacttgttgatttgggggtggctgatagtgttcttcatgttacccgagatggcggctggccagttgtttccgaagaggaagtgggaggggaggccgtgggcttatagaatgatttgttgtgcgggggctgtggtgaatgtactgatgatgattacggcgaatcttgtcggatttgcgtttggggttgatgggctgaaggctgttgttgagggcatttttacgcatttctctggatatgttttcttatctggcgcttgcattgtcatcttctgtggcgtccaggtcatgtttgagattagggagagcgagattaggagggggattaacttgaagtgttgatggccctttttttggtattgctcgaagcgatcacgagaaggaaatggatatgttagagagatttagtagatgtgtatatatggatgtataaatcaagagatgatgatcagatgcatatgtgagagatgtgagaaaagcatgggatgaggtttagtataagtaaggggatttcagccttagttgttcaagctaagtatctatgcatctctgatattagggagcagtatcaagtggttatggg

SEQ ID NO: 27563 - DNA, 1041 bp, Muscodor strobelii
  misc_feature: SGI cDNA ID NO. 569442
  misc_feature: Elevated expression when VOC is produced
  misc_feature: Encodes the peptide sequence at SEQ ID NO 27564
atggatctcgatcatacgccagcactaccacctcctccaggcgttgtgccggacttttctcagcaaagtgatgtcttgcctgtgcgatacgcactagtgagcctcactctatccctatccattctattcgttactattcgaatttatgtgcggaccaagattcaaaagacatttaatctcgatgactatgcagtgttattttctgccgctgggaccggcgctttcacgggaattattatctacaccggccttttaggtgacggaaaacaccaatggaacgtaccattctctaacctcagtttgatactcatgtacattaacatttcagagattatttatggtctgacaatcttcgccgcgaagtatgccattcttcgacagatcgaaattatcttttatagtcatcgcaaggactgccgcggctacaaagcaattcgcgctctgatttggggaaatgctctatactacaccgtgtcgactttgctagctatatttgcctgcactcccagagagaagatctggaaacctcaaatcgagggccactgtgctaaccaaaaagacgtcattgtcgcgggcggatcaatcaacgttttctcagattttacgattctaattgtccccgtggtcgaagttctcaaattgagtcttccaaccaagaagaaactcggcgcgatagcaatctttgctgttggtggtctatctctcgtcgccagcattattcgtgtttacttcggcgtagtattgaagcaaacagatgacttcacgttcgttgtagctgctctaggtcactggacattcgtagaacttctggccgtcatccttgtagcctgtttcccttatgttcctctcttgtttaggtcgaagacacacaagtccagtacttcttcttatcagctagatagcgttgaatctcatgtggattccaggcgaagggaaggtacaaaaacccgagaggcaaccggccgtggcagtagtatggaagcgatcaacacccctgttgcgcgcgacgaactacgccacaatgaagcatcttgggtatga

SEQ ID NO: 27564 - protein, 346 aa, Muscodor strobelii
  misc_feature: SGI Peptide ID NO. 569442
  misc_feature (36)..(337): NCBI GI: 16945439 Blast Desc: related to integral membrane protein PTH11 [Neurospora crassa]
  misc_feature (8)..(318): NCBI GI: 156057637 Blast Desc: SS1G_04550 [Sclerotinia sclerotiorum 1980] gi|154702335|gb|EDO02074.1| SS1G_04550 [Sclerotinia sclerotiorum 1980]
  misc_feature (67)..(342): NCBI GI: 238489453 Blast Desc: conserved [Aspergillus flavus NRRL3357] gi|220698352|gb|EED54692.1| conserved [Aspergillus flavus NRRL3357]
  misc_feature (36)..(337): NCBI GI: 164423873 Blast Desc: NCU07769 [Neurospora crassa OR74A] gi|157070267|gb|EAA29027.2| [Neurospora crassa OR74A]
  misc_feature (12)..(344): NCBI GI: 121706810 Blast Desc: ribosomal protein L36e, [Aspergillus clavatus NRRL 1] gi|119399784|gb|EAW10210.1| ribosomal protein L36e, [Aspergillus clavatus NRRL 1]
  misc_feature (7)..(291): NCBI GI: 242818275 Blast Desc: conserved [Talaromyces stipitatus ATCC 10500] gi|218713549|gb|EED12973.1| conserved [Talaromyces stipitatus ATCC 10500]
  misc_feature (56)..(286): NCBI GI: 67528508 Blast Desc: AN4452.2 [Aspergillus nidulans FGSC A4] gi|40741027|gb|EAA60217.1| AN4452.2 [Aspergillus nidulans FGSC A4] gi|259482731|tpe|CBF77490.1| TPA: 60S ribosomal protein L36
  misc_feature (48)..(319): NCBI GI: 46116180 Blast Desc: FG03932.1 [Gibberella zeae PH-1]
  misc_feature (3)..(316): NCBI GI: 256730136 Blast Desc: NECHADRAFT_82820 [Nectria haematococca mpVI 77-13-4]
  misc_feature (22)..(294): NCBI GI: 115398095 Blast Desc: conserved [Aspergillus terreus NIH2624] gi|114192830|gb|EAU34530.1| conserved [Aspergillus terreus NIH2624]
  misc_feature: Useful for introducing or modulating the production of volatile compounds
MDLDHTPALPPPPGVVPDFSQQSDVLPVRYALVSLTLSLSILFVTIRIYVRTKIQKTFNLDDYAVLFSAAGTGAFTGIIIYTGLLGDGKHQWNVPFSNLSLILMYINISEIIYGLTIFAAKYAILRQIEIIFYSHRKDCRGYKAIRALIWGNALYYTVSTLLAIFACTPREKIWKPQIEGHCANQKDVIVAGGSINVFSDFTILIVPVVEVLKLSLPTKKKLGAIAIFAVGGLSLVASIIRVYFGVVLKQTDDFTFVVAALGHWTFVELLAVILVACFPYVPLLFRSKTHKSSTSSYQLDSVESHVDSRRREGTKTREATGRGSSMEAINTPVARDELRHNEASWV

SEQ ID NO: 27565 - DNA, 1880 bp, Muscodor strobelii
  misc_feature: SGI EST ID NO. CUFF.65005.0
  misc_feature: Variant of the nucleotide sequence at SEQ ID NO 27563
tgtcaatgcgcaagcggctttttagtcacctgcattatcaccaattcaaactgtatagttgtgactgcatctcaaccactgcgcctattgtatattacaaactgtatacgagaggatgtttggatgctcacgtattttgtacgcatttcgacttcaggaataacacacaataaatattgccttctcgaacctgtccaattgagagcatgtctgagtcttagtctacatgcaaggctcttctcccaaatattgtcctcttgaaccattccgattgagaatatttcacataaaagacaaacttatcaattagcattgcacagaaatcacgaaatggatctcgatcatacgccagcactaccacctcctccaggcgttgtgccggacttttctcagcaaagtgatgtcttgcctgtgcgatacgcactagtgagcctcactctatccctatccattctattcgttactattcgaatttatgtgcggaccaagattcaaaagacatttaatctcgatgactatgcagtgttattttctgccgctgggaccggcgctttcacgggaattattatctacaccggccttttaggtgacggaaaacaccaatggaacgtaccattctctaacctcagtttgatactcatgtacattaacatttcagagattatttatggtctgacaatcttcgccgcgaagtatgccattcttcgacagatcgaaattatcttttatagtcatcgcaaggactgccgcggctacaaagcaattcgcgctctgatttggggaaatgctctatactacaccgtgtcgactttgctagctatatttgcctgcactcccagagagaagatctggaaacctcaaatcgagggccactgtgctaaccaaaaagacgtcattgtcgcgggcggatcaatcaacgttttctcagattttacgattctaattgtccccgtggtcgaagttctcaaattgagtcttccaaccaagaagaaactcggcgcgatagcaatctttgctgttggtggtctatctctcgtcgccagcattattcgtgtttacttcggcgtagtattgaagcaaacagatgacttcacgttcgttgtagctgctctaggtcactggacattcgtagaacttctggccgtcatccttgtagcctgtttcccttatgttcctctcttgtttaggtcgaagacacacaagtccagtacttcttcttatcagctagatagcgttgaatctcatgtggattccaggcgaagggaaggtacaaaaacccgagaggcaaccggccgtggcagtagtatggaagcgatcaacacccctgttgcgcgcgacgaactacgccacaatgaagcatcttgggtatgagagggtttatcactgcgcgaagtcctatcatgatgaaaaacgatttgtttctctaagtggagtgtcatatcttcctaagaagataatcacgctgatatactgtcctcgcaaaagtttaattcaaagttgggtccgggaagggaccagtcgtcgctctgcatctttctcaacactcattacgtttctttctttggggttagcttccttcatttgacgaattaggagtcatggcataattgctgtactcgttgggagcgcaggagagcacgacgggaatatcaccggcgagaagtgcgccatgcttgtgaaacttccaatctgactatgtaataaaactgaaatggtatttctgagggtgcagacttgctgctaaatccataaagactgaagcagctcagaacgaagtagttttaatgataattggtttgtcgtgcccggagacgtaggcatggtcacgccgatgataggccacatgcgcatcaaatgcagtaaagaaatggacgctttag

SEQ ID NO: 27566 - DNA, 1455 bp, Muscodor strobelii
  misc_feature: SGI cDNA ID NO. 569443
  misc_feature: Encodes the peptide sequence at SEQ ID NO 27567
atgaacactacagctggctgtccgtttgatcaaaagctttgtcgcaagcaggactccaatatacgcctagacacaggatacataagcaacgataaatttggcttcaatctccccgaagataagggattttcttggcgatacgtcatgcactgcgctccgttggtcacggagggatatgagagtactgccaataatagtttaggtattgggaaagtgaggtatcattacggcagcgaagtcagcggccccgtggacaatcaaacatttctggactacttatatgaggtgaatgatatcgactaccagtatcagatcggagtagggaggccttccctcacaggcacaaatttcctattggactatagcatattatctgtatcgggagggcagcccaccgaaagctcgtcgcattttatcccagagctcgttcgattagatggcgatactctaataatttacctatctggaaatggcgtcacctttattgaacgctcagacgatgactggtatcgagcaaacagacgttacgggaacctgaacaatccagatgcatccggaggaatatcctcgtatatcgcgagcgacgccgcttctccgatgggctgcgttcagcaatggcagtggtgcaattcctcgtcccctacggatgaaagcggatgcacacaactagctagtcagtcagatgcgcttgacgaaggtttcatgttgttcaatatcacggatgatgagctatccgctgaacctgtgccatcttcgtccgatatcgatcatgcacgttggctttggcctgctttgatgttgtcgacgagtccaacaagtcttgatgcgctgctgtcatttcttggcgcgaagtctttggatggcaaacagatgttctgcggtggtggcaaacccttctcgcttctgttcaagcatcatgttgttgctactgctcaggggtcaaaaaactcggcatttttacagtatcatacaccacccggcaataaagccgagaaacatctttgtgacagtcaaaaaattcgaagctcacaatacacatccttcagcctttttggattgttattcgtttttgtcaccgggaccgtcatcgttatgacttcttatgttcttgaaccactgctgaggtttctttatcgatacagaggatatcaaccctatgcacacttcgaatggattagcaacacggatctgcagctgcatcgtctcgctcacgaggggtttgggttgaagggttggtctgactgcaccgcttacgtcccaactacaaggcagaacgctttgttacctagtattgactttgctgatccgagtcacccgatgttaagccgacaaatcccggagagggatatatatagcagagacgagaaaatggctcatcacatagaagtgacgggtgcaagaggcagcgatgatggtgcctacattgtcagtcctgtcgactctgaggaccgctag

SEQ ID NO: 27567 - protein, 484 aa, Muscodor strobelii
  misc_feature: SGI Peptide ID NO. 569443
  misc_feature (7)..(439): NCBI GI: 169615058 Blast Desc: SNOG_10683 [Phaeosphaeria nodorum SN15] gi|111060957|gb|EAT82077.1| SNOG_10683 [Phaeosphaeria nodorum SN15]
  misc_feature (7)..(462): NCBI GI: 189194015 Blast Desc: conserved [Pyrenophora tritici-repentis Pt-1C-BFP] gi|187978910|gb|EDU45536.1| conserved [Pyrenophora tritici-repentis Pt-1C-BFP]
  misc_feature (3)..(444): NCBI GI: 115399382 Blast Desc: [Aspergillus terreus NIH2624] gi|114192163|gb|EAU33863.1| [Aspergillus terreus NIH2624]
  misc_feature (3)..(428): NCBI GI: 119474227 Blast Desc: NFIA_004500 [Neosartorya fischeri NRRL 181] gi|119407142|gb|EAW17092.1| conserved [Neosartorya fischeri NRRL 181]
  misc_feature (7)..(414): NCBI GI: 169772941 Blast Desc: [Aspergillus oryzae RIB40] gi|83768800|dbj|BAE58937.1| protein product [Aspergillus oryzae]
  misc_feature (2)..(247): NCBI GI: 169618215 Blast Desc: SNOG_12297 [Phaeosphaeria nodorum SN15] gi|160703576|gb|EAT80110.2| SNOG_12297 [Phaeosphaeria nodorum SN15]
  misc_feature (2)..(223): NCBI GI: 121699395 Blast Desc: ACLA_082720 [Aspergillus clavatus NRRL 1] gi|119396149|gb|EAW06581.1| ACLA_082720 [Aspergillus clavatus NRRL 1]
  misc_feature (3)..(213): NCBI GI: 70986226 Blast Desc: conserved [Aspergillus fumigatus Af293] gi|66846236|gb|EAL86569.1| conserved [Aspergillus fumigatus Af293]
  misc_feature (3)..(213): NCBI GI: 159128250 Blast Desc: conserved [Aspergillus fumigatus A1163]
  misc_feature (2)..(234): NCBI GI: 115433432 Blast Desc: [Aspergillus terreus NIH2624] gi|114189705|gb|EAU31405.1| [Aspergillus terreus NIH2624]
MNTTAGCPFDQKLCRKQDSNIRLDTGYISNDKFGFNLPEDKGFSWRYVMHCAPLVTEGYESTANNSLGIGKVRYHYGSEVSGPVDNQTFLDYLYEVNDIDYQYQIGVGRPSLTGTNFLLDYSILSVSGGQPTESSSHFIPELVRLDGDTLIIYLSGNGVTFIERSDDDWYRANRRYGNLNNPDASGGISSYIASDAASPMGCVQQWQWCNSSSPTDESGCTQLASQSDALDEGFMLFNITDDELSAEPVPSSSDIDHARWLWPALMLSTSPTSLDALLSFLGAKSLDGKQMFCGGGKPFSLLFKHHVVATAQGSKNSAFLQYHTPPGNKAEKHLCDSQKIRSSQYTSFSLFGLLFVFVTGTVIVMTSYVLEPLLRFLYRYRGYQPYAHFEWISNTDLQLHRLAHEGFGLKGWSDCTAYVPTTRQNALLPSIDFADPSHPMLSRQIPERDIYSRDEKMAHHIEVTGARGSDDGAYIVSPVDSEDR

SEQ ID NO: 27568 - DNA, 885 bp, Muscodor strobelii
  misc_feature: SGI EST ID NO. CUFF.65024.2
  misc_feature: Variant of the nucleotide sequence at SEQ ID NO 27566
gattttcttggcgatacgtcatgcactgcgctccgttggtcacggagggatatgagagtactgccaataatagtttaggtattgggaaagtgaggtatcattacggcagcgaagtcagcggccccgtggacaatcaaacatttctggactacttatatgaggtgaatgatatcgactaccagtatcagatcggagtagggaggccttccctcacaggcacaaatttcctattggactatagcatattatctgtatcgggagggcagcccaccgaaagctcgtcgcattttatcccagagctcgttcgattagatggcgatactctaataatttacctatctggaaatggcgtcacctttattgaacgctcagacgatgactggtatcgagcaaacagacgttacgggaacctgaacaatccagatgcatccggaggaatatcctcgtatatcgcgagcgacgccgcttctccgatgggctgcgttcagcaatggcagtggtgcaattcctcgtcccctacggatgaaagcggatgcacacaactagctagtcagtcagatgcgcttgacgaaggtttcatgttgttcaatatcacggatgatgagctatccgctgaacctgtgccatcttcgtccgatatcgatcatgcacgttggctttggcctgctttgatgttgtcgacgagtccaacaagtcttgatgcgctgctgtcatttcttggcgcgaagtctttggagtcgcaaacgcatttattgagcggtgtgcaattctcaattcttgaaacacagtggcaaacagatgttctgcggtggtggcaaacccttctcgcttctgttcaagcatcatggtcagtatcttgactcctcaaattttaagaatgccagg

SEQ ID NO: 27569 - DNA, 1077 bp, Muscodor strobelii
  misc_feature: SGI cDNA ID NO. 569444
  misc_feature: Encodes the peptide sequence at SEQ ID NO 27570
atggaagaagaagggatggggcacgtgcctattcggttcgtgtcgctgggtatgatcgtcctagacgagctacgtcttccagatggtcaggtcctttatgatgtgatcggtggctcgggtgcctacagtacgctgggtgcgcgcctcgtcactgcgccggcggaagcaggagaggtcgcatgttttataaagaagggaaatgatttccctgctgccgtcactgagcggttcgaaccctggggcgtcagggttgacggctatgtcgaccttgcccggaaatcgacacgtggtctgctcgagtatcacgatcgatcattcggccacaagacttttcggtatgtgacggacatattacaaccgacaccggatctattgcctttgcatctgctcgggtccgcctcattccacttcctgagagatccagaaagcatgacgcgagaagctgctcaattgattgcggcgcgacgcgacgccggtattctcgagaatctcttgattgtttgggagcctctaccaggccagtgtacaccagatcatctcgcgacgcatgtggctgccatccgggactcacctatcgacatcttctcacctaatcatttcgagctactggctttgtccggtactccaacacatgacagtgcgtctagcgagctagatagggcgggtctagagcgctgtgccgaatcaatcctagaagcggctctgcaccagaaagataccaaatccctgtctcttgttgttcgggccggcgaacacggctgccttgtagcgtctagatccgaaaagagacattatgtgagattttggctcccgccatattttgtaaatctcgatagcaatggcaagatcgtagatgcgacaggaggtgggaacacgtttcttggcgctttcaccattgcacttcagcgcaccggagatgtgagagaggctgccatacaggggtcagtagcagcgagttttacacttgagcagatcggtttgccggagctgacaggtgaaggtgaaggagagatgtggaatggagagacgctctctgcacgattaagccgctaccgggagaggctagaagaggggtga

SEQ ID NO: 27570 - protein, 358 aa, Muscodor strobelii
  misc_feature: SGI Peptide ID NO. 569444
  misc_feature (10)..(332): Pfam Id: PF00294 Pfam Desc: pfkB family carbohydrate kinase
  misc_feature (11)..(356): NCBI GI: 255931799 Blast Desc: Pc12g06130 [Penicillium chrysogenum Wisconsin 54-1255] gi|211582075|emb|CAP80240.1| Pc12g06130 [Penicillium chrysogenum Wisconsin 54-1255]
  misc_feature (10)..(352): NCBI GI: 169610007 Blast Desc: SNOG_08096 [Phaeosphaeria nodorum SN15] gi|111063252|gb|EAT84372.1| SNOG_08096 [Phaeosphaeria nodorum SN15]
  misc_feature (6)..(353): NCBI GI: 119500606 Blast Desc: PfkB family kinase, [Neosartorya fischeri NRRL 181] gi|119415225|gb|EAW25163.1| PfkB family kinase, [Neosartorya fischeri NRRL 181]
  misc_feature (11)..(355): NCBI GI: 212546665 Blast Desc: 60S ribosomal protein Nsa2, [Penicillium marneffei ATCC 18224] gi|210065006|gb|EEA19101.1| 60S ribosomal protein Nsa2, [Penicillium marneffei ATCC 18224]
  misc_feature (13)..(355): NCBI GI: 256723482 Blast Desc: NECHADRAFT_81108 [Nectria haematococca mpVI 77-13-4]
  misc_feature (11)..(355): NCBI GI: 67522925 Blast Desc: AN1919.2 [Aspergillus nidulans FGSC A4] gi|40745928|gb|EAA65084.1| AN1919.2 [Aspergillus nidulans FGSC A4]
  misc_feature (11)..(355): NCBI GI: 259487278 Blast Desc: TPA: pfkB family carbohydrate kinase superfamily (AFU_orthologue; AFUA_4G09500) [Aspergillus nidulans FGSC A4]
  misc_feature (2)..(355): NCBI GI: 46110078 Blast Desc: FG01921.1 [Gibberella zeae PH-1]
  misc_feature (11)..(353): NCBI GI: 70994056 Blast Desc: pfkB family carbohydrate kinase superfamily [Aspergillus fumigatus Af293] gi|66849509|gb|EAL89837.1| pfkB family carbohydrate kinase superfamily [Aspergillus fumigatus
  misc_feature (11)..(354): NCBI GI: 116195908 Blast Desc: CHGG_04552 [Chaetomium globosum CBS 148.51] gi|88180465|gb|EAQ87933.1| CHGG_04552 [Chaetomium globosum CBS 148.51]
MEEEGMGHVPIRFVSLGMIVLDELRLPDGQVLYDVIGGSGAYSTLGARLVTAPAEAGEVACFIKKGNDFPAAVTERFEPWGVRVDGYVDLARKSTRGLLEYHDRSFGHKTFRYVTDILQPTPDLLPLHLLGSASFHFLRDPESMTREAAQLIAARRDAGILENLLIVWEPLPGQCTPDHLATHVAAIRDSPIDIFSPNHFELLALSGTPTHDSASSELDRAGLERCAESILEAALHQKDTKSLSLVVRAGEHGCLVASRSEKRHYVRFWLPPYFVNLDSNGKIVDATGGGNTFLGAFTIALQRTGDVREAAIQGSVAASFTLEQIGLPELTGEGEGEMWNGETLSARLSRYRERLEEG

SEQ ID NO: 27571 - DNA, 1605 bp, Muscodor strobelii
  misc_feature: SGI cDNA ID NO. 569445
  misc_feature: Encodes the peptide sequence at SEQ ID NO 27572
atgcggccgaaaccgaatatccaaccacaactgtggctcaccaccgagtactggcgactcgagactccacaggcatcttttgcaacaagaggcggctggtcaaatgcagatgttgatgtcgtgcctgaagacaaaagaacatggcggtcaattgattatctctggctctggctggccgacggggcaaatgtcggcacaatgcaacaggctggtagtatcgtcgcattgggtttgagctggagggaggcagctgttgctatcgcaatcggtaatatcatcatcgccgccgctgtcgcattaaacggatcaatcggtgcccatcaccatgttcccttctccatcgcctcgcgggcatcaatgggattctacttctcttactttgccgtcgtctcccgacttgttctcggactgatatacttcggtatcaatacatatatcggcgcatcatgcgtcctaattatgctcctcgcaatctggccccaattcgcagaataccccaatgcccttcccgctagcgcaggacttacaagcaataaactcattgcctatctcgtcttctgggccgtccaatttcccttgcttctgattcaccctcgcaaaatgcgatggctgttcttcgtgaagtcaatcttcgccattgtcgcggcctttgccttgctaggctgggctgtccgaacaggaggcacagctcccatattctcacagcaaactgcactgaagggctcagcaaagagttgggcatacgtcgccggtgtgaacattgccatctctggcaagacgactctcgcaatcaacatctcggatctgacgcggtatgcaaggagacgtgatgcttcatactggcaactgttattcatccctctcgtgtactggactttctcgtttattggcatcgtaattacgtccgcaggcatctcaatttacgggcaaacatactgggatccgacagctatcatcgcgctatggaccaacagggcggcggcgttcttcgctgctttcgcctttggtctcgcgaccctcggcacgaacatcagcaccaattccatcgccacgagcaatgatttagcttttctgctgccgaactggctcaatatccgacgcggtgccgtcatcactgcgcttgtcggtggatgggcgacggccccatggaagattcaagcaaatgctaagagcctgacgacgtttctctcaggttacgtaattgtgttggcgccgctggtgtctatcatgaccgtagactactggcttgttcggggcaggagattaaacgtgcccgcgctgtatcagaatgagggctgttaccggtataaaaaggggttcaattggcgtgctatcgccacgttgcttgtcgttgttcctattaatttgcctggtcttatccacgcaatcgactcaacagtcaaagtgggcaatgactacgccaatttttacaaatccacctggcttacgtcagtcgccatcgcagctattgtgtatttcgggttaaacaagagttttccgccccacgagtcgatgattgattttgcagaggatgatttgtatagtcgcgatggtatcgaacatgcggataaggggcttccctcgacacgggctagcgatgcctga

SEQ ID NO: 27572 - protein, 534 aa, Muscodor strobelii
  misc_feature: SGI Peptide ID NO. 569445
  misc_feature (40)..(484): Pfam Id: PF02133 Pfam Desc: Permease for cytosine/purines, uracil, thiamine, allantoin
  misc_feature (40)..(460): Pfam Id: PF02133 Pfam Desc: Permease for cytosine/purines, uracil, thiamine, allantoin
  misc_feature (4)..(530): NCBI GI: 58261896 Blast Desc: allantoin permease [Cryptococcus neoformans var. neoformans JEC21] gi|58261898|ref|XP_568359.1| allantoin permease [Cryptococcus neoformans var. neoformans JEC21] allantoin var.
  misc_feature (4)..(530): NCBI GI: 134118223 Blast Desc: CNBM0460 [Cryptococcus neoformans var. neoformans B-3501A] gi|50254851|gb|EAL17594.1| CNBM0460 [Cryptococcus neoformans var. neoformans B-3501A]
  misc_feature (19)..(525): NCBI GI: 170097591 Blast Desc: cytosine-purine permease [Laccaria bicolor S238N-H82] gi|164645418|gb|EDR09666.1| cytosine-purine permease [Laccaria bicolor S238N-H82]
  misc_feature (18)..(524): NCBI GI: 189205208 Blast Desc: uracil permease [Pyrenophora tritici-repentis Pt-1C-BFP] gi|187986038|gb|EDU51526.1| uracil permease [Pyrenophora tritici-repentis Pt-1C-BFP]
  misc_feature (19)..(525): NCBI GI: 121704148 Blast Desc: NCS1 allantoate transporter [Aspergillus clavatus NRRL 1] gi|119398482|gb|EAW08912.1| NCS1 allantoate transporter [Aspergillus clavatus NRRL 1]
  misc_feature (18)..(521): NCBI GI: 212533011 Blast Desc: allantoin permease, [Penicillium marneffei ATCC 18224] gi|210072026|gb|EEA26115.1| allantoin permease, [Penicillium marneffei ATCC 18224]
  misc_feature (14)..(507): NCBI GI: 156057611 Blast Desc: SS1G_04537 [Sclerotinia sclerotiorum 1980] gi|154702322|gb|EDO02061.1| SS1G_04537 [Sclerotinia sclerotiorum 1980]
  misc_feature (12)..(518): NCBI GI: 242213648 Blast Desc: [Postia placenta Mad-698-R] gi|220728249|gb|EED82147.1| [Postia placenta Mad-698-R]
  misc_feature (3)..(532): NCBI GI: 226289353 Blast Desc: allantoin permease [Paracoccidioides brasiliensis Pb18]
  misc_feature (33)..(532): NCBI GI: 225682165 Blast Desc: uracil permease [Paracoccidioides brasiliensis Pb03]
MRPKPNIQPQLWLTTEYWRLETPQASFATRGGWSNADVDVVPEDKRTWRSIDYLWLWLADGANVGTMQQAGSIVALGLSWREAAVAIAIGNIIIAAAVALNGSIGAHHHVPFSIASRASMGFYFSYFAVVSRLVLGLIYFGINTYIGASCVLIMLLAIWPQFAEYPNALPASAGLTSNKLIAYLVFWAVQFPLLLIHPRKMRWLFFVKSIFAIVAAFALLGWAVRTGGTAPIFSQQTALKGSAKSWAYVAGVNIAISGKTTLAINISDLTRYARRRDASYWQLLFIPLVYWTFSFIGIVITSAGISIYGQTYWDPTAIIALWTNRAAAFFAAFAFGLATLGTNISTNSIATSNDLAFLLPNWLNIRRGAVITALVGGWATAPWKIQANAKSLTTFLSGYVIVLAPLVSIMTVDYWLVRGRRLNVPALYQNEGCYRYKKGFNWRAIATLLVVVPINLPGLIHAIDSTVKVGNDYANFYKSTWLTSVAIAAIVYFGLNKSFPPHESMIDFAEDDLYSRDGIEHADKGLPSTRASDA

SEQ ID NO: 27573 - DNA, 3437 bp, Muscodor strobelii
  misc_feature: SGI EST ID NO. CUFF.65036.0
  misc_feature: Variant of the nucleotide sequence at SEQ ID NO 27571
cgacgggagagcgtctgtcgaggaatgtcaagaatgagatttctgtatcgtgatgatatgaaccgttttttattcgtttcgacaaaccatcaccggtatgaagagaatgattagggccattgacgatgcggccgaaaccgaatatccaaccacaactgtggctcaccaccgagtactggcgactcgagactccacaggcatcttttgcaacaagaggcggctggtcaaatgcagatgttgatgtcgtgcctgaagacaaaagaacatggcggtcaattgattatctctggctctggctggccgacggggcaaatgtcggcacaatgcaacaggctggtagtatcgtcgcattgggtttgagctggagggaggcagctgttgctatgtaagtgaagttgtaaataatcgcgtgatcacaaaactaactgaaatcgaagcgcaatcggtaatatcatcatcgccgccgctgtcgcattaaacggatcaatcggtgcccatcaccatgttcccttctccatcgcctcgcgggcatcaatgggattctacttctcttactttgccgtcgtctcccgacttgttctcggactgatatacttcgggtaagccagaatcctaagaagcaagcataaaccaggacctaacaatagcctcatccagtatcaatacatatatcggcgcatcatgcgtcctaattatgctcctcgcaatctggccccaattcgcagaataccccaatgcccttcccgctagcgcaggacttacaagcaataaactcattgcctatctcgtcttctgggccgtccaatttcccttgcttctgattcaccctcgcaaaatgcgatggctgttcttcgtgaagtcaatcttcgccattgtcgcggcctttgccttgctaggctgggctgtccgaacaggaggcacagctcccatattctcacagcaaactgcactgaagggctcagcaaagagttgggcatacgtcgccggtgtgaacattgccatctctggcaagacgactctcgcaatcaacatctcggatctgacgcggtatgcaaggagacgtgatgcttcatactggcaactgttattcatccctctcgtgtactggactttctcgtttattggcatcgtaattacgtccgcaggcatctcaatttacgggcaaacatactgggatccgacagctatcatcgcgctatggaccaacagggcggcggcgttcttcgctgctttcgcctttggtctcgcgaccctcggcacgaacatcagcaccaattccatcgccacgagcaatgatttagcttttctgctgccgaactggctcaatatccgacgcggtgccgtcatcactgcgcttgtcggtggatgggcgacggccccatggaagattcaagcaaatgctaagagcctgacgacgtttctctcaggttacgtaattgtgttggcgccgctggtgtctatcatgaccgtagactactggcttgttcggggcaggagattaaacgtgcccgcgctgtatcagaatgagggctgttaccggtataaaaaggggttcaattggcgtgctatcgccacgttgcttgtcgttgttcctattaatttgcctggtcttatccacgcaatcgactcaacagtcaaagtgggcaatgactacgccaatttttacaaatccacctggcttacgtcagtcgccatcgcagctattgtgtatttcgggttaaacaagagttttccgccccacgagtcgatgattgattttgcagaggatgatttgtatagtcgcgatggtatcgaacatgcggataaggggcttccctcgacacgggctagcgatgcctgattggataagagttttttcccttttcaaagatcagatatcgtgatgtcagcagggagcagagtatctaaacacatacagcgtcttattcgtgcccactcatcactggtcatcacttgttgcctcaaaatcaataccgaaccgctttgttagtctcccttctcctataagggacgaagcagaagctgtagtctcctttcgtccccgaaaggttgtgccctcccaccaacctaagcggaactttctgcccggtaaaataaccaccggcttgcgcttgatcgtcattagtggtgcgctatcattgccacttgaagtgttgtccgaatcctcaatgagacgcgatcctgcgaaaagtgccattctagatgcaattggatatgggttcctcggtaacgttcggcgcatatcgacggagcaataagcaatcagacctgaaagtaccatcgtgccaagaaatgactgcaggatgatcttcgatgtttggtttagttttagacgtgagaccgtgaccgttacggtaccgttgactacaccattatttggaaccggttgcaccgccgggcttctgtttgtcaggttggttcgatagacgatatcgatgacctgcaccatatatcgctgatacacgttgttcattgctgccgcgagcgcatctaccttatgttttcctaggtaatcttcagggacctttttggatccagggctcaacaatgcgtaggtgaaaaatacgtcgaaagggtagttttcgttttcgaagaagctagcggcataatctatgatctccccaacagctagttggagagatgacatcccagttctggcgtccttgacgagttgtgggggagatgaagtcagtttcatggggctgctcatatccggcgtgaaggaagagctgcgcaagtaagggaccgttgcttcaacgtagtacagtcgttgcgtgcatataagaaccgttagattgttttgttcgaatgggtttctgggttcccaaatgccgtagatggaaatgagagagggacacccatggtaaagcgagttgtttagttttgtcgagatttcactatcgaataggtttccgaaccaaatcggctcgctcgagctggggtcgggcgtgggaatcgaaaacaatgtattggcgagatcatgcgacaatccagccttctcggacttacatccagctggaagttccgccgtgatgttaaaatatgtatttttataaaggccgttggtgtaattgtccctttgctgagtaatttgaatatgtgccaccgagcattcgagcgccggtgttagagcagtcaaggacatctcatattgcaggctacttctgttcgcccattgcgcatatttttgcgaaggaaccacttcgggcttagttatagtcggcaaaacgaaggcattgtccttgataaatgctgagacgtctgtaataccgtgctgatactcattgaaagccgtcatcacctcctccactgcctgctgtccagcttccgaaacgccgccggaaagcgaggtgaaattgattccccaagtcgagttgatccgcgcggtagtgggcagcgacagttgcactgatgaatctagataccagagacctgag

SEQ ID NO: 27574 - DNA, 771 bp, Muscodor strobelii
  misc_feature: SGI cDNA ID NO. 569446
  misc_feature: Encodes the peptide sequence at SEQ ID NO 27575
atgagcagccccatgaaactgacttcatctcccccacaactcgtcaaggacgccagaactgggatgtcatctctccaactagctgttggggagatcatagattatgccgctagcttcttcgaaaacgaaaactaccctttcgacgtatttttcacctacgcattgttgagccctggatccaaaaaggtccctgaagattacctaggaaaacataaggtagatgcgctcgcggcagcaatgaacaacgtgtatcagcgatatatggtgcaggtcatcgatatcgtctatcgaaccaacctgacaaacagaagcccggcggtgcaaccggttccaaataatggtgtagtcaacggtaccgtaacggtcacggtctcacgtctaaaactaaaccaaacatcgaagatcatcctgcagtcatttcttggcacgatggtactttcaggtctgattgcttattgctccgtcgatatgcgccgaacgttaccgaggaacccatatccaattgcatctagaatggcacttttcgcaggatcgcgtctcattgaggattcggacaacacttcaagtggcaatgatagcgcaccactaatgacgatcaagcgcaagccggtggttattttaccgggcagaaagttccgcttaggttggtgggagggcacaacctttcggggacgaaaggagactacagcttctgcttcgtcccttataggagaagggagactaacaaagcggttcggtattgattttgaggcaacaagtgatgaccagtga

SEQ ID NO: 27575 - protein, 256 aa, Muscodor strobelii
  misc_feature: SGI Peptide ID NO. 569446
  misc_feature (12)..(248): NCBI GI: 256721372 Blast Desc: NECHADRAFT_82379 [Nectria haematococca mpVI 77-13-4]
  misc_feature (9)..(248): NCBI GI: 239610037 Blast Desc: conserved [Ajellomyces dermatitidis ER-3]
  misc_feature (9)..(248): NCBI GI: 261198575 Blast Desc: conserved [Ajellomyces dermatitidis SLH14081] gi|239594841|gb|EEQ77422.1| conserved [Ajellomyces dermatitidis SLH14081]
  misc_feature (47)..(224): NCBI GI: 240273977 Blast Desc: conserved [Ajellomyces capsulatus H143]
  misc_feature (11)..(224): NCBI GI: 225557913 Blast Desc: conserved [Ajellomyces capsulatus G186AR]
  misc_feature (42)..(251): NCBI GI: 169623034 Blast Desc: SNOG_14743 [Phaeosphaeria nodorum SN15] gi|160704899|gb|EAT77935.2| SNOG_14743 [Phaeosphaeria nodorum SN15]
  misc_feature (51)..(251): NCBI GI: 261359225 Blast Desc: conserved [Verticillium albo-atrum VaMs.102]
  misc_feature (51)..(180): NCBI GI: 256726134 Blast Desc: NECHADRAFT_81730 [Nectria haematococca mpVI 77-13-4]
  misc_feature (39)..(255): NCBI GI: 115400976 Blast Desc: [Aspergillus terreus NIH2624] gi|114190017|gb|EAU31717.1| [Aspergillus terreus NIH2624]
  misc_feature (72)..(227): NCBI GI: 169764361 Blast Desc: [Aspergillus oryzae RIB40] gi|83764506|dbj|BAE54650.1| protein product [Aspergillus oryzae]
MSSPMKLTSSPPQLVKDARTGMSSLQLAVGEIIDYAASFFENENYPFDVFFTYALLSPGSKKVPEDYLGKHKVDALAAAMNNVYQRYMVQVIDIVYRTNLTNRSPAVQPVPNNGVVNGTVTVTVSRLKLNQTSKIILQSFLGTMVLSGLIAYCSVDMRRTLPRNPYPIASRMALFAGSRLIEDSDNTSSGNDSAPLMTIKRKPVVILPGRKFRLGWWEGTTFRGRKETTASASSLIGEGRLTKRFGIDFEATSDDQ

SEQ ID NO: 27576 - DNA, 1779 bp, Muscodor strobelii
  misc_feature: SGI EST ID NO. CUFF.65037.2
  misc_feature: Variant of the nucleotide sequence at SEQ ID NO 27574
tcgctgcccactaccgcgcggatcaactcgacttggggaatcaatttcacctcgctttccggcggcgtttcggaagctggacagcaggcagtggaggaggtgatgacggctttcaatgagtatcagcacggtattacagacgtctcagcatttatcaaggacaatgccttcgttttgccgactataactaagcccgaagtggttccttcgcaaaaatatgcgcaatgggcgaacagaagtagcctgcaatatgagatgtccttgactgctctaacaccggcgctcgaatgctcggtggcacatattcaaattactcagcaaagggacaattacaccaacggcctttataaaaatacatattttaacatcacggcggaacttccagctggatgtaagtccgagaaggctggattgtcgcatgatctcgccaatacattgttttcgattcccacgcccgaccccagctcgagcgagccgatttggttcggaaacctattcgatagtgaaatctcgacaaaactaaacaactcgctttaccatgggtgtccctctctcatttccatctacggcatttgggaacccagaaacccattcgaacaaaacaatctaacggttcttatatgcacgcaacgactgtactacgttgaagcaacggtcccttacttgcgcagctcttccttcacgccggatatgagcagccccatgaaactgacttcatctcccccacaactcgtcaaggacgccagaactgggatgtcatctctccaactagctgttggggagatcatagattatgccgctagcttcttcgaaaacgaaaactaccctttcgacgtatttttcacctacgcattgttgagccctggatccaaaaaggtccctgaagattacctaggaaaacataaggtagatgcgctcgcggcagcaatgaacaacgtgtatcagcgatatatggtgcaggtcatcgatatcgtctatcgaaccaacctgacaaacagaagcccggcggtgcaaccggttccaaataatggtgtagtcaacggtaccgtaacggtcacggtctcacgtctaaaactaaaccaaacatcgaagatcatcctgcagtcatttcttggcacgatggtactttcaggtctgattgcttattgctccgtcgatatgcgccgaacgttaccgaggaacccatatccaattgcatctagaatggcacttttcgcaggatcgcgtctcattgaggattcggacaacacttcaagtggcaatgatagcgcaccactaatgacgatcaagcgcaagccggtggttattttaccgggcagaaagttccgcttaggttggtgggagggcacaacctttcggggacgaaaggagactacagcttctgcttcgtcccttataggagaagggagactaacaaagcggttcggtattgattttgaggcaacaagtgatgaccagtgatgagtgggcacgaataagacgctggaaaaaactcttatccaatcaggcatcgctagcccgtgtcgagggaagccccttatccgcatgttcgataccatcgcgactatacaaatcatcctctgcaaaatcaatcatcgactcgtggggcggaaaactcttgtttaacccgaaatacacaatagctgcgatggcgactgacgtaagccaggtggatttgtaaaaattggcgtagtcattgcccactttgactgttgagtcgattgcgtggactggagtagtcaggcaaattaataggaacaacgacaagcaacgtggcga

SEQ ID NO: 27577 - DNA, 1674 bp, Muscodor strobelii
  misc_feature: SGI cDNA ID NO. 569447
  misc_feature: Encodes the peptide sequence at SEQ ID NO 27578
atgaccccgtacgccgttttaagcagcaaagcatcgacgctcagaaacgccctaatgttcagcatcgtaaacgatataccaccagtagctctctataaagcacttcgttatgcacatgttggtgcagtgctgtcactcattgcgtcaacaattggaagtctcttggcaattgttagctcaggtctctggtatctagattcatcagtgcaactgtcgctgcccactaccgcgcggatcaactcgacttggggaatcaatttcacctcgctttccggcggcgtttcggaagctggacagcaggcagtggaggaggtgatgacggctttcaatgagtatcagcacggtattacagacgtctcagcatttatcaaggacaatgccttcgttttgccgactataactaagcccgaagtggttccttcgcaaaaatatgcgcaatgggcgaacagaagtagcctgcaatatgagatgtccttgactgctctaacaccggcgctcgaatgctcggtggcacatattcaaattactcagcaaagggacaattacaccaacggcctttataaaaatacatattttaacatcacggcggaacttccagctggatgtaagtccgagaaggctggattgtcgcatgatctcgccaatacattgttttcgattcccacgcccgaccccagctcgagcgagccgatttggttcggaaacctattcgatagtgaaatctcgacaaaactaaacaactcgctttaccatgggtgtccctctctcatttccatctacggcatttgggaacccagaaacccattcgaacaaaacaatctaacggttcttatatgcacgcaacgactgtactacgttgaagcaacggtcccttacttgcgcagctcttccttcacgccggatatgagcagccccatgaaactgacttcatctcccccacaactcgtcaaggacgccagaactgggatgtcatctctccaactagctgttggggagatcatagattatgccgctagcttcttcgaaaacgaaaactaccctttcgacgtatttttcacctacgcattgttgagccctggatccaaaaaggtccctgaagattacctaggaaaacataaggtagatgcgctcgcggcagcaatgaacaacgtgtatcagcgatatatggtgcaggtcatcgatatcgtctatcgaaccaacctgacaaacagaagcccggcggtgcaaccggttccaaataatggtgtagtcaacggtaccgtaacggtcacggtctcacgtctaaaactaaaccaaacatcgaagatcatcctgcagtcatttcttggcacgatggtactttcaggtctgattgcttattgctccgtcgatatgcgccgaacgttaccgaggaacccatatccaattgcatctagaatggcacttttcgcaggatcgcgtctcattgaggattcggacaacacttcaagtggcaatgatagcgcaccactaatgacgatcaagcgcaagccggtggttattttaccgggcagaaagttccgcttaggttggtgggagggcacaacctttcggggacgaaaggagactacagcttctgcttcgtcccttataggagaagggagactaacaaagcggttcggtattgattttgaggcaacaagtgatgaccagtga

SEQ ID NO: 27578 - protein, 557 aa, Muscodor strobelii
  misc_feature: SGI Peptide ID NO. 569447
  misc_feature (1)..(549): NCBI GI: 239610037 Blast Desc: conserved [Ajellomyces dermatitidis ER-3]
  misc_feature (1)..(549): NCBI GI: 261198575 Blast Desc: conserved [Ajellomyces dermatitidis SLH14081] gi|239594841|gb|EEQ77422.1| conserved [Ajellomyces dermatitidis SLH14081]
  misc_feature (3)..(525): NCBI GI: 240273977 Blast Desc: conserved [Ajellomyces capsulatus H143]
  misc_feature (3)..(525): NCBI GI: 225557913 Blast Desc: conserved [Ajellomyces capsulatus G186AR]
  misc_feature (3)..(549): NCBI GI: 256721372 Blast Desc: NECHADRAFT_82379 [Nectria haematococca mpVI 77-13-4]
  misc_feature (3)..(452): NCBI GI: 154271544 Blast Desc: [Ajellomyces capsulatus NAm1] gi|150409295|gb|EDN04745.1| [Ajellomyces capsulatus NAm1]
  misc_feature (3)..(552): NCBI GI: 261359225 Blast Desc: conserved [Verticillium albo-atrum VaMs.102]
  misc_feature (3)..(481): NCBI GI: 256726134 Blast Desc: NECHADRAFT_81730 [Nectria haematococca mpVI 77-13-4]
  misc_feature (253)..(552): NCBI GI: 169623034 Blast Desc: SNOG_14743 [Phaeosphaeria nodorum SN15] gi|160704899|gb|EAT77935.2| SNOG_14743 [Phaeosphaeria nodorum SN15]
  misc_feature (1)..(528): NCBI GI: 238504406 Blast Desc: conserved [Aspergillus flavus NRRL3357] gi|220690905|gb|EED47254.1| conserved [Aspergillus flavus NRRL3357]
MTPYAVLSSKASTLRNALMFSIVNDIPPVALYKALRYAHVGAVLSLIASTIGSLLAIVSSGLWYLDSSVQLSLPTTARINSTWGINFTSLSGGVSEAGQQAVEEVMTAFNEYQHGITDVSAFIKDNAFVLPTITKPEVVPSQKYAQWANRSSLQYEMSLTALTPALECSVAHIQITQQRDNYTNGLYKNTYFNITAELPAGCKSEKAGLSHDLANTLFSIPTPDPSSSEPIWFGNLFDSEISTKLNNSLYHGCPSLISIYGIWEPRNPFEQNNLTVLICTQRLYYVEATVPYLRSSSFTPDMSSPMKLTSSPPQLVKDARTGMSSLQLAVGEIIDYAASFFENENYPFDVFFTYALLSPGSKKVPEDYLGKHKVDALAAAMNNVYQRYMVQVIDIVYRTNLTNRSPAVQPVPNNGVVNGTVTVTVSRLKLNQTSKIILQSFLGTMVLSGLIAYCSVDMRRTLPRNPYPIASRMALFAGSRLIEDSDNTSSGNDSAPLMTIKRKPVVILPGRKFRLGWWEGTTFRGRKETTASASSLIGEGRLTKRFGIDFEATSDDQ

SEQ ID NO: 27579 - DNA, 1779 bp, Muscodor strobelii; identical to SEQ ID NO: 27576
  misc_feature: SGI EST ID NO. CUFF.65037.2
  misc_feature: Variant of the nucleotide sequence at SEQ ID NO 27577

SEQ ID NO: 27580 - DNA, 1335 bp, Muscodor strobelii
  misc_feature: SGI cDNA ID NO. 569449
  misc_feature: Reduced expression when VOC is produced
  misc_feature: Encodes the peptide sequence at SEQ ID NO 27581
atgtccatgactcgcaccaatctacaccctctgaaccgccacagcgaggatgcatttgctggagcaaccatggtttcttcaaaagaggatatgaattcccacaccgacgggatggacatcacagccggtcagaagatgctctcggccattaccggaagtcttctgacctcactacttgtcacccccctagatgttgttcgtgtccgattacaagcacaaggtccaatctcacaaccgatcacaccggccgcagacttccagaaactcgccatatcatcacctaatgcctttcgaccttccaatctcggtgtcacttcgtgttgccgcgaagtgttcttcatgaacgcaagcgaagagttatgtgtagcaggaccgagagtagagggtcttgccaaaggcgccggtgaatgcgccgtggaggagacacagaagcgcaccttcaactcgacgctcgacggcatgcgcaagattgcgcgcaacgagggattcacatctttgtggagaggactatcaccgacgctagtcatggctataccagccaacatcatctacttcaccgggtacgattggctacgctacaacaagaagagcccgatcagcagattcaacagagacgacaacaaagcattggtcgctgggtccaccgcgcgtgtggtagcagtggctgccgtaagccctattgagctattcaagacccgactacaagcttctacaggctcgactgcgaccaaccaccttgccaatacattcaagggcattcgggagttgatatccgagagcggctaccgatcgctctggcgaggcttcaaccttcacttgtggcgcgatgtgcccttttcgggcatgtactggctgggttacgagacgatcaggggcaagcttaccgacatgcgcgaggagcggcggggacgaacaatgtcgcgcgatcgccaatctcggtctagacagagagccagatcccaaagtgaggagaatcatggtgctgtcttggcagacagcttcgcagcgggggctttatcaggagctattgcgtctatggctacgatgcccttcgacgttggcaagacacgaacccaagtattccaggactcggcaaagggctctaacgggcaggctctcgcacctgagcagcggaacatggtacgattgctgtggcatatcttcaagacggaaggtgtctccgggctgtggatgggatggataccacgtactctcaaggtggcgccggcatgtgccatcatgatcagtagctacgaggttggcaagacggtgttccggagtatgaacgagcgacaggcgagaaaacaacaaggcactcaggagcgagacctgtga

SEQ ID NO: 27581 - protein, 444 aa, Muscodor strobelii
  misc_feature: SGI Peptide ID NO. 569449
  misc_feature (329)..(429): Pfam Id: PF00153 Pfam Desc: Mitochondrial carrier protein
  misc_feature (41)..(197): Pfam Id: PF00153 Pfam Desc: Mitochondrial carrier protein
  misc_feature (206)..(298): Pfam Id: PF00153 Pfam Desc: Mitochondrial carrier protein
  misc_feature (208)..(298): Pfam Id: PF00153 Pfam Desc: Mitochondrial carrier protein
  misc_feature (142)..(197): Pfam Id: PF00153 Pfam Desc: Mitochondrial carrier protein
  misc_feature (41)..(79): Pfam Id: PF00153 Pfam Desc: Mitochondrial carrier protein
  misc_feature (29)..(437): NCBI GI: 85111097 Blast Desc: NCU07478 [Neurospora crassa OR74A] gi|28925502|gb|EAA34536.1| conserved [Neurospora crassa OR74A]
  misc_feature (31)..(436): NCBI GI: 39943102 Blast Desc: MGG_03631 [Magnaporthe grisea 70-15] gi|145009783|gb|EDJ94439.1| MGG_03631 [Magnaporthe grisea 70-15]
  misc_feature (34)..(438): NCBI GI: 256735566 Blast Desc: [Nectria haematococca mpVI 77-13-4]
  misc_feature (31)..(441): NCBI GI: 171695974 Blast Desc: protein product [Podospora anserina] gi|170948229|emb|CAP60393.1| protein product [Podospora anserina]
  misc_feature (14)..(432): NCBI GI: 46134949 Blast Desc: FG09323.1 [Gibberella zeae PH-1]
  misc_feature (14)..(436): NCBI GI: 154320506 Blast Desc: BC1G_01725 [Botryotinia fuckeliana B05.10] gi|150853414|gb|EDN28606.1| BC1G_01725 [Botryotinia fuckeliana B05.10]
  misc_feature (14)..(437): NCBI GI: 156054844 Blast Desc: SS1G_06270 [Sclerotinia sclerotiorum 1980] gi|154704050|gb|EDO03789.1| SS1G_06270 [Sclerotinia sclerotiorum 1980]
  misc_feature (9)..(438): NCBI GI: 261355178 Blast Desc: solute carrier family 25 member 39 [Verticillium albo-atrum VaMs.102]
  misc_feature (26)..(430): NCBI GI: 240275750 Blast Desc: solute carrier family 25 member 40 [Ajellomyces capsulatus H143]
  misc_feature (26)..(430): NCBI GI: 225563172 Blast Desc: membrane transporter [Ajellomyces capsulatus G186AR]
  misc_feature: Useful for introducing or modulating the production of volatile compounds
MSMTRTNLHPLNRHSEDAFAGATMVSSKEDMNSHTDGMDITAGQKMLSAITGSLLTSLLVTPLDVVRVRLQAQGPISQPITPAADFQKLAISSPNAFRPSNLGVTSCCREVFFMNASEELCVAGPRVEGLAKGAGECAVEETQKRTFNSTLDGMRKIARNEGFTSLWRGLSPTLVMAIPANIIYFTGYDWLRYNKKSPISRFNRDDNKALVAGSTARVVAVAAVSPIELFKTRLQASTGSTATNHLANTFKGIRELISESGYRSLWRGFNLHLWRDVPFSGMYWLGYETIRGKLTDMREERRGRTMSRDRQSRSRQRARSQSEENHGAVLADSFAAGALSGAIASMATMPFDVGKTRTQVFQDSAKGSNGQALAPEQRNMVRLLWHIFKTEGVSGLWMGWIPRTLKVAPACAIMISSYEVGKTVFRSMNERQARKQQGTQERDL

SEQ ID NO: 27582 - DNA, 2301 bp, Muscodor strobelii
  misc_feature: SGI EST ID NO. CUFF.65040.0
  misc_feature: Variant of the nucleotide sequence at SEQ ID NO 27580
gaagaagcgtctagatatgccatcgaggggccgggatcgcagcgatcgtagaagctgcataagtcacgaacaactacaatccaccttcaatcctctttttctccgtctctagggcgcccctccgcgccgtctaacctgtctaacctcgtctgttacctcaattacccaaacatcgatgaaccatgttccccccgtgccaccaacagctcctctccaactctggtctaatccgaagctaaattcataaaggtcctcaattcccgacgcttaaccacccgcgctgctgcaccatcttccctcaacaaacacctctttgacacttggcgacccggataacgacagacttcataaggtataattatcaacagcttcatcaaattgcgactgagcttgggggttcaacatccccggcgcagtgccttgtccgacgggcgcctcccgaattttccgggtcgagcccgccactgcgacaaaaagacaacaccataatgtccatgactcgcaccaatctacaccctctgaaccgccacagcgaggatgcatttgctggagcaaccatggtttcttcaaaagaggatatgaattcccacaccgacgggatggacatcacagccggtcagaagatgctctcggccattaccggaagtcttctgacctcactacttgtcacccccctagatgttgttcgtgtccgattacaagcacaaggtccaatctcacaaccgatcacaccggccgcagacttccagaaactcgccatatcatcacctaatgcctttcgaccttccaatctcggtgtcacttcgtgttgccgcgaagtgttcttcatgaacgcaagcgaagagttatgtgtagcaggaccgagagtagagggtcttgccaaaggcgccggtgaatgcgccgtggaggagacacagaagcgcaccttcaactcgacgctcgacggcatgcgcaagattgcgcgcaacgagggattcacatctttgtggagaggactatcaccgacgctagtcatggctataccagccaacatcatctacttcaccgggtacgattggctacgctacaacaagaagagcccgatcagcagattcaacagagacgacaacaaagcattggtcgctgggtccaccgcgcgtgtggtagcagtggctgccgtaagccctattgagctattcaagacccgactacaagcttctacaggctcgactgcgaccaaccaccttgccaatacattcaagggcattcgggagttgatatccgagagcggctaccgatcgctctggcgaggcttcaaccttcacttgtggcgcgatgtgcccttttcgggcatgtactggctgggttacgagacgatcaggggcaagcttaccgacatgcgcgaggagcggcggggacgaacaatgtcgcgcgatcgccaatctcggtctagacagagagccagatcccaaagtgaggagaatcatggtgctgtcttggcagacagcttcgcagcgggggctttatcaggagctattgcgtctatggctacgatgcccttcgacgttggcaagacacgaacccaagtattccaggactcggcaaagggctctaacgggcaggctctcgcacctgagcagcggaacatggtacgattgctgtggcatatcttcaagacggaaggtgtctccgggctgtggatgggatggataccacgtactctcaaggtggcgccggcatgtgccatcatgatcagtagctacgaggttggcaagacggtgttccggagtatgaacgagcgacaggcgagaaaacaacaaggcactcaggagcgagacctgtgatcgcgacggtgatagtattgaagttggttggacatacatctgcactcgactcactgtactgcattctgcatttggccggcgttcggttaggcgttctacgtcattcatgatacctagagatgatgcgtttcacgatgcacttcgtaatgaaccggatctggagggatcactcgatccaggaaggattttggtcggtcacttaatagaactaagggatggggtcccatatggatacagaaaaaagggagcggcaccaaaaggcgaaacgagcacgattgtgtttttatccgaagcttagctacgcttcatcacgagtgttgtgttgaaggtggaggatgaggtgtgcgagtactggattctatgtacagagatattggttggactactaatgcacaacgagtccaatgagacttgtacgatataaacacgttagctcagcttgtccttgtaactacatcataattctagcaatcctcac

SEQ ID NO: 27583 - DNA, 831 bp, Muscodor strobelii
  misc_feature: SGI cDNA ID NO. 569450
  misc_feature: Encodes the peptide sequence at SEQ ID NO 27584
atggccactgctgaactacacaagctcgctgagacggatgtgagcaccacactttctcccaagcaatacgaaaaaatacttgctgctccaccatttgtcttcatcgatgggacttttaacacccgcgatctggggttggtgccagacagcccattgcgcgccaactttgcctttcggtctggcgctttgagtggactgaccgacaacggtaaggccgtgttagcgggaaaactgggtgtgaaacgcatcttcgaccttcggtctcccgaggagcgcacgcaggctccagacccgatcgtcgacggcgtggagaatacatggattgcaagcgcacgagccgacgccaaaatcgacctcgagaagttcgtcgagggtgagggtgaagcaggttatcaggaaatgtacctagacgtcgtcgaagtctacgaggctagttggaaggccattcttcagcatgtcagagatcgcccacgggatccatttttggtacattgcacggctggccgcgatagaactggggtcttcggcgggctacttctggcgctctctggcgcatcagaggacgtcattattctcgattggcttctatcgcgtattggaactgagcccgtgcgcgaaatgctgcttgcgtttgcaaagaaaggcaccgaatcaagtggtgagacacatgctggattccttaatcttgtcaacctaaagcgttcatgctggcaagcgttcgtccaaggggtagacagggactacggcggcttcgagaagtttgtcatcaataaacttaaattctctacgggcgacctagttaaaatacaacataatttaaaaagtgtttaa

SEQ ID NO: 27584 - protein, 276 aa, Muscodor strobelii
  misc_feature: SGI Peptide ID NO. 569450
  misc_feature (6)..(273): NCBI GI: 39970077 Blast Desc: MGG_10647 [Magnaporthe grisea 70-15] gi|145013126|gb|EDJ97767.1| MGG_10647 [Magnaporthe grisea 70-15]
  misc_feature (1)..(274): NCBI GI: 85103932 Blast Desc: NCU01010 [Neurospora crassa OR74A] gi|28923170|gb|EAA32386.1| [Neurospora crassa OR74A] gi|28950071|emb|CAD70824.1| related to protein-tyrosine crassa]
  misc_feature (1)..(274): NCBI GI: 46136915 Blast Desc: FG09973.1 [Gibberella zeae PH-1]
  misc_feature (1)..(275): NCBI GI: 225678817 Blast Desc: conserved [Paracoccidioides brasiliensis Pb03]
  misc_feature (1)..(275): NCBI GI: 256732115 Blast Desc: NECHADRAFT_69388 [Nectria haematococca mpVI 77-13-4]
  misc_feature (1)..(275): NCBI GI: 226293652 Blast Desc: conserved [Paracoccidioides brasiliensis Pb18]
  misc_feature (1)..(274): NCBI GI: 225560771 Blast Desc: conserved [Ajellomyces capsulatus G186AR]
  misc_feature (12)..(275): NCBI GI: 226281475 Blast Desc: conserved [Paracoccidioides brasiliensis Pb01]
  misc_feature (12)..(274): NCBI GI: 169773943 Blast Desc: [Aspergillus oryzae RIB40] gi|238491972|ref|XP_002377223.1| conserved [Aspergillus flavus NRRL3357] gi|83769301|dbj|BAE59438.1| protein product oryzae]
  misc_feature (1)..(274): NCBI GI: 154278168 Blast Desc: [Ajellomyces capsulatus NAm1] gi|150413489|gb|EDN08872.1| [Ajellomyces capsulatus NAm1]
MATAELHKLAETDVSTTLSPKQYEKILAAPPFVFIDGTFNTRDLGLVPDSPLRANFAFRSGALSGLTDNGKAVLAGKLGVKRIFDLRSPEERTQAPDPIVDGVENTWIASARADAKIDLEKFVEGEGEAGYQEMYLDVVEVYEASWKAILQHVRDRPRDPFLVHCTAGRDRTGVFGGLLLALSGASEDVIILDWLLSRIGTEPVREMLLAFAKKGTESSGETHAGFLNLVNLKRSCWQAFVQGVDRDYGGFEKFVINKLKFSTGDLVKIQHNLKSV

SEQ ID NO: 27585 - DNA, 2366 bp, Muscodor strobelii
  misc_feature: SGI EST ID NO. CUFF.65056.1
  misc_feature: Variant of the nucleotide sequence at SEQ ID NO 27583
cggcagtctctgcgagttttgacccgacaggagccctgaatagctttgcaaattccccggacggtgtaacagagaagcagtttgcgtctccgctcgtgtttacgtttgttctaacgccctgatagcagtatgtttcggtgaagaggtaatcaacaacggtctggcgaacattgagcaggccaattgccccaataatagctgccgaggagaaaatccaggccatatgagctaccacgaacggagaaaggtaaaactatctttgagccccaaacgaaggagaggatgtgggtgtccgggaattggttcaaatcaatacttagaccgtgcccgcatggcattcgctcattcctgacgtcggccccgataaggaaataatggaaggataggcgtggtaatcgtcacagcgaagattgacagggccaccttaacagatcacgcaagtggaggcatgagtcgaaacgtacaagatcggacgtgtagaatgaagggcgaagcgggccacacaagaatgtgaggtggagcaccacagagctaccaagttggatcattcgctacccgcccttcactgcctaaaaggagcgaaaagaatcggtgtcccataagttttaaaccgatagcaaacatgagaggaacgagggcatgggatatcacattctcgtcggcatttaggtatcgtggcccgatatcgcgataaatgtgttggttgataagataaggggctcaatagcacgcctcatgatgaagtgtcgacaactctataaagttgcaagtcgacatcagaggaaatcgatcatcaacatttatccgagcgatctcaactggaataccataactattcatttgacgactgtcgatgttgcggtaccggttgcgataagcaatgccacgggcagatatcggtcatcgaagtatccaagtcgcctcccataaagcccgggaaacccacttgtcgcgcatagataattaatcgtttttcgcttttgaatttccatatgcctatatactctcaccgaccgacaattgtcactcggtctgcatggatgcggctgcggagagccgagacgcgagctaataacgaagccgtcctttagtcagggattgtcgagtcctccggtatccgaaaacaatcaccgaggagtgccagcacaggcagttcgcatcgatgttctatccaaggatggaagaagaaatgtataaataagtgagactcacagctcgtcgcgaggggatgcaacatgtctgatatgataagcagtgaacaagaaaagaaaggtattactgacacgtagttcacataatccctaccagtcccaagaagctaccccgctacaagcttgcacttcttgcctggattcatttggaaacaactacagacaccgatttctccaagccatataattttcaatcactgaaccacgtttgtcgttcatcatggccactgctgaactacacaagctcgctgagacggatgtgagcaccacactttctcccaagcaatacgaaaaaatacttgctgctccaccatttgtcttcatcgatgggacttttaacacccgcgatctggggttggtgccagacagcccattgcgcgccaactttgcctttcggtctggcgctttgagtggactgaccgacaacggtaaggccgtgttagcgggaaaactgggtgtgaaacgcatcttcgaccttcggtctcccgaggagcgcacgcaggctccagacccgatcgtcgacggcgtggagaatacatggattgcaagcgcacgagccgacgccaaaatcgacctcgagaagttcgtcgagggtgagggtgaagcaggttatcaggaaatgtacctagacgtcgtcgaagtctacgaggctagttggaaggccattcttcagcatgtcagagatcgcccacgggatccatttttggtacattgcacgggtaggttggatcttgaatgcaattacaatttcttcacgagggtgtcgacctgccttctcttttcttatgtatacgcaacattgaacatctaattaactcactatacagctggccgcgatagaactggggtcttcggcgggctacttctggcgctctctggcgcatcagaggacgtcattattctcgattggcttctatcgcgtattggaactgagcccgtgcgcgaaatgctgcttgcgtttgcaaagaaaggcaccgaatcaagtggtgagacacatgctggattccttaatcttgtcaacctaaagcgttcatgctggcaagcgttcgtccaaggggtagacagggactacggcggcttcgagaagtttgtcatcaataaacttaaattctctacgggcgacctagttaaaatacaacataatttaaaaagtgt

SEQ ID NO: 27586 - DNA, 1746 bp, Muscodor strobelii
  misc_feature: SGI cDNA ID NO. 569451
  misc_feature: Encodes the peptide sequence at SEQ ID NO 27587
atggcctggattttctcctcggcagctattattggggcaattggcctgctcaatgttcgccagaccgttgttgattacctcttcaccgaaacatactgctatcagggcgttagaacaaacgtaaacacgagcggagacgcaaactgcttctctgttacaccgtccggggaatttgcaaagctattcagggctcctgtcgggtcaaaactcgcagagactgccgatccgggatatgtcatacctggtctctgggatggtcacgggcacttgctacaatgtactgacttcttaataatggagagtttgctgaactctgtagacttgtttggatcgagatctatggatgatattaggagtcgcgttcgaacttatgttgaagaccatcccggtgttggcacggcgcagcaatgggtgagaggtgttgggtgggatcaaatggctttgggcgcgatgcccaccgcaaaagacttatcgacagacgagaaacttaaagacctatatatcatgctcgaccgcgtagacgtgcattgtatctgggtatcccaggctgtattggatctcctgccagataatttggccgacattcctggaggcgaaattgtgcgcaatcctggcatgggtgtattctgcgacaacgctatggaaatggtgcaaacaacatactggcccaaaccaaatgtggagaggaagacatccttcgtgacaagtgccatggcgaaactcaaccaatacgggctcgtcggtatgcacgacgcgggcgtcacacctggaaatctgaacctatacaaggacctggcctggagtaaagactggacattgagagtctatagtatggcagaatgcgatattcgcaatacattttgccctgccgatgttccgaaatacgcacacccctctggcttcctcaacattcaaagcgtcaaaatcttcgccgatggagctctgggaagctggggaagtgccatgctagaaccgtattcagatcggccaaccgtatcaggctccctcctcatcaatgcgtcagaattaacgtaccaggccattgcctgggcctcagcaggctatcaggtgaacatccacgctataggcgatttagcaaatcggaatgccatagacgccatgtctagtgctctgcgcacagtttgcccagatgaatcgccagcaatatgtcaaggacggcaccgatttcgtattgagcattcccagattgttgataaagacgaccaagctcgtatgcacagcatcggcattatcccctccatacagccgactcacgccacttcagacatggcatacgccgagctgcgccttggggcactgcgtacttctgtagaagcatatcgaatgcgttcctttttagacatccacccggttctaggtagcgatttccccgttgaaccctccgatccattccaaggcatctatgctgctgtgacaagaaagagcccacatacgggattgggcttcaatggctccttgagcggctggcacgatgaagaatcccttacactcgatcaagcaatccgcggattcacggtgggacctgcctacggcggattcaccgaaggtaaaacaggtgtgattcagccaggggcttacgctgactgggtcgttctcgacgagccgctagaggacatcgatattgaagatctcagggctctccgtgttagagagacgtgggttgcagggaaggagagtttttcctcgggattaattttcagtcccattgttcgcaccgctttataa

SEQ ID NO: 27587 - protein, 581 aa, Muscodor strobelii
  misc_feature: SGI Peptide ID NO. 569451
  misc_feature (78)..(538): Pfam Id: PF07969 Pfam Desc: Amidohydrolase family
  misc_feature (486)..(540): Pfam Id: PF01979 Pfam Desc: Amidohydrolase family
  misc_feature (31)..(568): NCBI GI: 46137133 Blast Desc: FG10082.1 [Gibberella zeae PH-1]
  misc_feature (8)..(564): NCBI GI: 189208548 Blast Desc: amidohydrolase 3 [Pyrenophora tritici-repentis Pt-1C-BFP] gi|187976700|gb|EDU43326.1| amidohydrolase 3 [Pyrenophora tritici-repentis Pt-1C-BFP]
  misc_feature (27)..(567): NCBI GI: 164426637 Blast Desc: NCU03948 [Neurospora crassa OR74A] gi|40882334|emb|CAF06156.1| conserved [Neurospora crassa] gi|157071417|gb|EAA28351.2| conserved [Neurospora crassa OR74A]
  misc_feature (29)..(569): NCBI GI: 145613199 Blast Desc: MGG_01812 [Magnaporthe grisea 70-15] gi|145020329|gb|EDK04458.1| MGG_01812 [Magnaporthe grisea 70-15]
  misc_feature (30)..(567): NCBI GI: 11359481 Blast Desc: MGG_01812 [Magnaporthe grisea 70-15] gi|145020329|gb|EDK04458.1| MGG_01812 [Magnaporthe grisea 70-15]
  misc_feature (157)..(568): NCBI GI: 116201547 Blast Desc: CHGG_08658 [Chaetomium globosum CBS 148.51] gi|88177176|gb|EAQ84644.1| CHGG_08658 [Chaetomium globosum CBS 148.51]
  misc_feature (172)..(568): NCBI GI: 171677921 Blast Desc: protein product [Podospora anserina] gi|170937029|emb|CAP61687.1| protein product [Podospora anserina]
  misc_feature (32)..(568): NCBI GI: 154289992 Blast Desc: BC1G_15808 [Botryotinia fuckeliana B05.10] gi|150848503|gb|EDN23696.1| BC1G_15808 [Botryotinia fuckeliana B05.10]
  misc_feature (22)..(564): NCBI GI: 156035811 Blast Desc: SS1G_13110 [Sclerotinia sclerotiorum 1980] gi|154698514|gb|EDN98252.1| SS1G_13110 [Sclerotinia sclerotiorum 1980]
  misc_feature (23)..(569): NCBI GI: 85711049 Blast Desc: metal-dependent amidohydrolase with the TIM-barrel fold [Idiomarina baltica OS145] gi|85694962|gb|EAQ32900.1| metal-dependent amidohydrolase with the TIM-barrel fold baltica
MAWIFSSAAIIGAIGLLNVRQTVVDYLFTETYCYQGVRTNVNTSGDANCFSVTPSGEFAKLFRAPVGSKLAETADPGYVIPGLWDGHGHLLQCTDFLIMESLLNSVDLFGSRSMDDIRSRVRTYVEDHPGVGTAQQWVRGVGWDQMALGAMPTAKDLSTDEKLKDLYIMLDRVDVHCIWVSQAVLDLLPDNLADIPGGEIVRNPGMGVFCDNAMEMVQTTYWPKPNVERKTSFVTSAMAKLNQYGLVGMHDAGVTPGNLNLYKDLAWSKDWTLRVYSMAECDIRNTFCPADVPKYAHPSGFLNIQSVKIFADGALGSWGSAMLEPYSDRPTVSGSLLINASELTYQAIAWASAGYQVNIHAIGDLANRNAIDAMSSALRTVCPDESPAICQGRHRFRIEHSQIVDKDDQARMHSIGIIPSIQPTHATSDMAYAELRLGALRTSVEAYRMRSFLDIHPVLGSDFPVEPSDPFQGIYAAVTRKSPHTGLGFNGSLSGWHDEESLTLDQAIRGFTVGPAYGGFTEGKTGVIQPGAYADWVVLDEPLEDIDIEDLRALRVRETWVAGKESFSSGLIFSPIVRTAL

SEQ ID NO: 27588 - DNA, 1906 bp, Muscodor strobelii
  misc_feature: SGI EST ID NO. CUFF.65059.0
  misc_feature: Variant of the nucleotide sequence at SEQ ID NO 27586
gtaagtagtagcttgctccaactgaaaaacatgacaccggccgggattatctggaatagaataactcgatcttgggccacaacgactggaaaccaggactaataagcctttgtccattagctgaactctgtagacttgtttggatcgagatctatggatgatattaggagtcgcgttcgaacttatgttgaagaccatcccggtgttggcacggcgcagcaatgggtgagaggtgttgggtgggatcaaatggctttgggcgcgatgcccaccgcaaaagacttatcgacagacgagaaacttaaagacctatatatcatgctcgaccgcgtagacgtgcattgtatctgggtatcccaggctgtattggatctcctgccagataatttggccgacattcctggaggcgaaattgtgcgcaatcctggcatgggtgtattctgcgacaacgctatggaaatggtgcaaacaacatactggcccaaaccaaatgtggagaggaagacatccttcgtgacaagtgccatggcgaaactcaaccaatacgggctcgtcggtatgcacgacgcgggcgtcacacctggaaatctgaacctatacaaggacctggcctggagtaaagactggacattgagagtctatagtatggcagaatgcgatattcgcaatacattttgccctgccgatgttccgaaatacgcacacccctctggcttcctcaacattcaaagcgtcaaaatcttcgccgatggagctctgggaagctggggaagtgccatgctagaaccgtattcagatcggccaaccgtatcaggctccctcctcatcaatgcgtcagaattaacgtaccaggccattgcctgggcctcagcaggctatcaggtgaacatccacgctataggcgatttagcaaatcggaatgccatagacgccatgtctagtgctctgcgcacagtttgcccagatgaatcgccagcaatatgtcaaggacggcaccgatttcgtattgagcattcccagattgttgataaagacgaccaagctcgtatgcacagcatcggcattatcccctccatacagccgactcacgccacttcagacatggcatacgccgagctgcgccttggggcactgcgtacttctgtagaagcatatcgaatgcgttcctttttagacatccacccggttctaggtagcgatttccccgttgaaccctccgatccattccaaggcatctatgctgctgtgacaagaaagagcccacatacgggattgggcttcaatggctccttgagcggctggcacgatgaagaatcccttacactcgatcaagcaatccgcggattcacggtgggacctgcctacggcggattcaccgaaggtaaaacaggtgtgattcagccaggggcttacgctgactgggtcgttctcgacgagccgctagaggacatcgatattgaagatctcagggctctccgtgttagagagacgtgggttgcagggtaagtactacttgtttcgacttaaagaccgggcggcggctggggaattctaaacagatcgattccttgccgtacgataacgaataaaagaaaggactaacatgttttgatgcactagaaggagagtttttcctcgggattaattttcagtcccattgttcgcaccgctttataaaattcatgttgaagagtgtggagtagtaggcagtcatctagaatgataatgtatggcttaataacggccatatcagctgaaatcccaatgcatcatatttgatatacatccaagatgatctctatgaccttgagctgtcaaactgaactactctttgatcataattttgttatcaacgctgtcccctctctacaaatgaagcattagaagccaatataggaggatacag

SEQ ID NO: 27589 - DNA, 732 bp, Muscodor strobelii
  misc_feature: SGI cDNA ID NO. 569452
  misc_feature: Encodes the peptide sequence at SEQ ID NO 27590
atgtcgcttaggatcgtccttgcgacggcagtcggcttcgccgcctcggtactcggtcatggaaacgtccagactttcaacactgatgggaagtcgaaccagggtttcttattggactattactaccagaaggtgaacaccggatcatttcccaatattgccgcctggtacgccgaagatttggacttgggattcgtggcgccaaatcaatatggtaccgcagacatcaactgccataaaaacgcagcacctggtgccctgactgcgagcgtcgcggccggcggctcgattcagtttaactgggggacggatggacccattataacgtacgtcgctgcttgcaacggcgactgcagcaaggtcaacaaagcaagtctacagtgggtcaagatcgaagcgtccggtatagactatagcacacaagtctgggcatcccaagtgcttatcaacaacaacaacaaatggaccaccaaggtccccgcgtcactcaagcctggtaactacgttttccgtcacgagatcatcgcattacatggcgcagcaagtgcaaacggcgcacagaattatccccagtgcttcaacgtggcagtgacaggttcaggcaccaagtctttgcctgcaggcacacttggcaccgcgctgtacaaatcgaacgaccctggaattttgatgaacccatatacgacgatcacgaactatgttatgccaggtccggctctatggacgggatag

SEQ ID NO: 27590 - protein, 243 aa, Muscodor strobelii
  misc_feature: SGI Peptide ID NO. 569452
  misc_feature (1)..(235): Pfam Id: PF03443 Pfam Desc: Glycosyl hydrolase family 61
  misc_feature (13)..(243): NCBI GI: 116204319 Blast Desc: CHGG_10043 [Chaetomium globosum CBS 148.51] gi|88176171|gb|EAQ83639.1| CHGG_10043 [Chaetomium globosum CBS 148.51]
  misc_feature (1)..(243): NCBI GI: 187766736 Blast Desc: endoglucanase VII [Trichoderma viride]
  misc_feature (1)..(243): NCBI GI: 74619304 Blast Desc: GUN7_TRIRE RecName: Full=Endoglucanase-7; AltName: Full=Endoglucanase VII; AltName: Full=Endo-1,4-beta-glucanase VII; Short=EGVII; AltName: Full=Endoglucanase-61B; AltName: Chain
  misc_feature (13)..(241): NCBI GI: 256722571 Blast Desc: NECHADRAFT_19032 [Nectria haematococca mpVI 77-13-4]
  misc_feature (1)..(241): NCBI GI: 46119467 Blast Desc: FG04773.1 [Gibberella zeae PH-1]
  misc_feature (20)..(243): NCBI GI: 156061791 Blast Desc: SS1G_03041 [Sclerotinia sclerotiorum 1980] gi|154700442|gb|EDO00181.1| SS1G_03041 [Sclerotinia sclerotiorum 1980]
  misc_feature (1)..(243): NCBI GI: 121701491 Blast Desc: endoglucanase, [Aspergillus clavatus NRRL 1] gi|119397153|gb|EAW07584.1| endoglucanase, [Aspergillus clavatus NRRL 1]
  misc_feature (16)..(242): NCBI GI: 212532291 Blast Desc: endoglucanase, [Penicillium marneffei ATCC 18224] gi|210071666|gb|EEA25755.1| endoglucanase, [Penicillium marneffei ATCC 18224]
  misc_feature (1)..(241): NCBI GI: 212274995 Blast Desc: LOC100191768 [Zea mays] gi|194689780|gb|ACF78974.1| [Zea mays] gi|238011426|gb|ACR36748.1| [Zea mays]
  misc_feature (16)..(243): NCBI GI: 242775172 Blast Desc: endoglucanase, [Talaromyces stipitatus ATCC 10500] gi|218722209|gb|EED21627.1| endoglucanase, [Talaromyces stipitatus ATCC 10500]
  misc_feature (1)..(243): SWISSPROT Homolog: EC 3.2.1.4 Cellulase
MSLRIVLATAVGFAASVLGHGNVQTFNTDGKSNQGFLLDYYYQKVNTGSFPNIAAWYAEDLDLGFVAPNQYGTADINCHKNAAPGALTASVAAGGSIQFNWGTDGPIITYVAACNGDCSKVNKASLQWVKIEASGIDYSTQVWASQVLINNNNKWTTKVPASLKPGNYVFRHEIIALHGAASANGAQNYPQCFNVAVTGSGTKSLPAGTLGTALYKSNDPGILMNPYTTITNYVMPGPALWTG

SEQ ID NO: 27591 - DNA, 650 bp, Muscodor strobelii
  misc_feature: SGI EST ID NO. CUFF.65047.0
  misc_feature: Variant of the nucleotide sequence at SEQ ID NO 27589
agacgcgttgccaagtcactaatgctatgattagtccagtatgaatcaatgtgtatgagtattacttcaatttcccacgaatagaccatcatcgcaagtcgcggacggcgttgaatatctactagtgctgtcctacgccgcggtgcggacagcgtgcctccgcgtccggcaatatgtctaatcacggcattctagttcgctcgcttctccggataaaagataatgtgcttccatttacttagtggaaaagtcctatatatgctacgagagacagtgttcagggtcgagcaagtctacggaatgcagacacagcgaacatagtttcaggctttagttacggccgcctcttctcacaatgtcgcttaggatcgtccttgcgacggcagtcggcttcgccgcctcggtactcggtcatggaaacgtccagactttcaacactgatgggaagtcgaaccagggtttcttattggactattactaccagaaggtgaacaccggatcatttcccaatattgccgcctggtacgccgaagatttggacttgggattcgtggcgccaaatcaatatggtaccgcagacatcaactgccataaaaacgcagcacctggtgccctgactgcgagcgtcgcggccggcggctcgattcagt

SEQ ID NO: 27592 - DNA, 270 bp, Muscodor strobelii
  misc_feature: SGI cDNA ID NO. 569453
  misc_feature: Reduced expression when VOC is produced
  misc_feature: Encodes the peptide sequence at SEQ ID NO 27593
atgccccatcgtcgtactcaccaccacaccaccacaacgaccacaactcggcgtcatgggctttttagtcgttccaaacctgtccatcatcagaaacgccatgccaccatcggtgacaaggtcagtggcgccttgttaaagctcaagggaaccctcacccaccgaccaggtcagaaggctgcaggtacacgacgcatgcacggcactgatggtcgaggcagccgccgaagccccaggttgaccgcgtctcgccgcaagtactatcactaa

SEQ ID NO: 27593 - protein, 89 aa, Muscodor strobelii
  misc_feature: SGI Peptide ID NO. 569453
  misc_feature (4)..(76): NCBI GI: 171692023 Blast Desc: protein product [Podospora anserina] gi|170945960|emb|CAP72761.1| protein product [Podospora anserina]
  misc_feature (2)..(88): NCBI GI: 70983992 Blast Desc: conserved [Aspergillus fumigatus Af293] gi|66845147|gb|EAL85483.1| conserved [Aspergillus fumigatus Af293] gi|159123499|gb|EDP48618.1| conserved [Aspergillus A1163]
  misc_feature (25)..(76): NCBI GI: 169604568 Blast Desc: SNOG_05298 [Phaeosphaeria nodorum SN15] gi|111066569|gb|EAT87689.1| SNOG_05298 [Phaeosphaeria nodorum SN15]
  misc_feature (29)..(77): NCBI GI: 116180084 Blast Desc: [Chaetomium globosum CBS 148.51] gi|88184967|gb|EAQ92435.1| [Chaetomium globosum CBS 148.51]
  misc_feature (25)..(75): NCBI GI: 189196162 Blast Desc: conserved [Pyrenophora tritici-repentis Pt-1C-BFP] gi|187980298|gb|EDU46924.1| conserved [Pyrenophora tritici-repentis Pt-1C-BFP]
  misc_feature (25)..(79): NCBI GI: 256732114 Blast Desc: [Nectria haematococca mpVI 77-13-4]
  misc_feature (19)..(88): NCBI GI: 119485843 Blast Desc: NFIA_100040 [Neosartorya fischeri NRRL 181] gi|119410420|gb|EAW20367.1| conserved [Neosartorya fischeri NRRL 181]
  misc_feature (27)..(76): NCBI GI: 121720138 Blast Desc: conserved [Aspergillus clavatus NRRL 1] gi|119404979|gb|EAW15341.1| conserved [Aspergillus clavatus NRRL 1]
  misc_feature (7)..(77): NCBI GI: 242773474 Blast Desc: conserved [Talaromyces stipitatus ATCC 10500] gi|218721866|gb|EED21284.1| conserved [Talaromyces stipitatus ATCC 10500]
  misc_feature (25)..(75): NCBI GI: 46136913 Blast Desc: FG09972.1 [Gibberella zeae PH-1]
  misc_feature: Useful for introducing or modulating the production of volatile compounds
MPHRRTHHHTTTTTTTRRHGLFSRSKPVHHQKRHATIGDKVSGALLKLKGTLTHRPGQKAAGTRRMHGTDGRGSRRSPRLTASRRKYYH

SEQ ID NO: 27594 - DNA, 967 bp, Muscodor strobelii
  misc_feature: SGI EST ID NO. CUFF.65392.1
  misc_feature: Variant of the nucleotide sequence at SEQ ID NO 27592
gcagggtccagcgaaagatgacggtgcttgggctgctcagatctagtcatataagagcgacatgatcccattgatttcgtgatttttaagcatctttaatattaagttacattgactgcaagaagagatcaatatctcttgacactcgaaaaaggctttgaattgaacttaagttgacacccaccacccaccatgccccatcgtcgtactcaccaccacaccaccacaacgaccacaactcggcgtcatgggctttttagtcgttccaaacctgtccatcatcagaaacgccatgccaccatcggtgacaaggtcagtggcgccttgttaaagctcaagggaaccctcacccaccgaccaggtcagaaggctgcaggtacacgacgcatgcacggcactgatggtcgaggcagccgccgaagccccaggttgaccgcgtctcgccgcaagtactatcactaaatggtgatcggcaaataactagaaatgccattatgatgatgaggatcgcagactaatcagaaggcacgcggccacggggccgttctgagcatagtacccaaagagtttcgactacgcggagtacgatgagtgcccgaggagtcacgtttactgggaaactgtattatatgtgtatcaaagtaatttgtattggtatttaatgatgagtgatgatatttcgctatctggaacggtgcgtcgaattgcaggccgaagtgagtggaattttaatatggccgtgcaatgcactttaactctgataacgttatgctccttagtttgtgttaccgagtaggattttcagcatgtgtgtaagccactttcgttagccaactggactgccggtatcaggcaataggaacatcgcaattctcttcttcccttgcgtccaatcgttgttcagcgatccatgctcgaatctcccgttcttctctctctggtgcatcaagggcgatggcatgtccgc

SEQ ID NO: 27595 - DNA, 1029 bp, Muscodor strobelii
  misc_feature: SGI cDNA ID NO. 569454
  misc_feature: Encodes the peptide sequence at SEQ ID NO 27596
atggacaagatacttcagcgagctggtttccaagagcatgactttcatactggtgaagtgatcctcaactatgtcgtcggcccagctcgcaaaggtccagccatcatcttcatccacggccagtcagtcacatgggaagaatacactttcataatgcccccgctgagctcggatttcaccgtctacgccgtcagcttgcgcggtcatggcaaatcaagttggacgccaggacaatacacgttcaacactctcgggaaggacatgacggcctttctcagtcatattgtacgcgaacctgccatcgtcgttggcaactcatccggcggcgtcttgacgtcgtggctggctgccaatgctaagccatggtacgtgaaggctattgtgttagaggatccaccgctcttccgctgcgaccatgcaaacatcacgacgaccgccgtttacgatctttggctggctttcgcgcgggccaccgtgcctaatgggggcggcttcgctgccttctatcgcgactttttggtgccgaccatttcgagatccgacggagttatgacttctgagaagcgtgcaccgacatcactactgaagatggtcggtcggctcatcgtgatgcagcagatgttccatccagggaagcctgtcgattttgccttcatgcctacgaagccacgcatcatgatacggggtatgtcacagttcgatggtaatttcgcccgggcatttgtagacgggactgtcgggcaggagtttgatcatgcggagacgctttcccgcatcgacgtccctgtcctatttttgcatgctaggtactatatgcgggaagatcgcctgcttggggcactcacggatgaagacgtggaacgcgtgaagcagctggtcagaggttcgtggaagtatgtcaggatggactgcggacatgccatcgcccttgatgcaccagagagagaagaacgggagattcgagcatggatcgctgaacaacgattggacgcaagggaagaagagaattgcgatgttcctattgcctga

SEQ ID NO: 27596 - protein, 342 aa, Muscodor strobelii
  misc_feature: SGI Peptide ID NO. 569454
  misc_feature (59)..(322): Pfam Id: PF00561 Pfam Desc: alpha/beta hydrolase fold
  misc_feature (59)..(133): Pfam Id: PF00561 Pfam Desc: alpha/beta hydrolase fold
  misc_feature (10)..(325): NCBI GI: 73748922 Blast Desc: hydrolase [Dehalococcoides sp. CBDB1] gi|73660638|emb|CAI83245.1| hydrolase [Dehalococcoides sp. CBDB1]
  misc_feature (10)..(325): NCBI GI: 147669690 Blast Desc: alpha/beta hydrolase fold [Dehalococcoides sp. BAV1] gi|146270638|gb|ABQ17630.1| alpha/beta hydrolase fold [Dehalococcoides sp. BAV1]
  misc_feature (10)..(325): NCBI GI: 269920706 Blast Desc: alpha/beta hydrolase fold protein [Dehalococcoides sp. GT] gi|269200659|gb|EEZ73287.1| alpha/beta hydrolase fold protein [Dehalococcoides sp. GT]
  misc_feature (2)..(315): NCBI GI: 229829887 Blast Desc: GCWU000342_01993 [Shuttleworthia satelles DSM 14600] gi|229791185|gb|EEP27299.1| GCWU000342_01993 [Shuttleworthia satelles DSM 14600]
  misc_feature (2)..(314): NCBI GI: 24379467 Blast Desc: hydrolase or acyltransferase [Streptococcus mutans UA159] gi|24377404|gb|AAN58728.1|AE014942_4 hydrolase or acyltransferase [Streptococcus mutans UA159]
  misc_feature (20)..(328): NCBI GI: 238064211 Blast Desc: hydrolase/acyltransferase [Micromonospora sp. ATCC 39149] gi|237886022|gb|EEP74850.1| hydrolase/acyltransferase [Micromonospora sp. ATCC 39149]
  misc_feature (2)..(315): NCBI GI: 160946194 Blast Desc: PEPMIC_00156 [Parvimonas micra ATCC 33270] gi|158447717|gb|EDP24712.1| PEPMIC_00156 [Parvimonas micra ATCC 33270]
  misc_feature (5)..(308): NCBI GI: 269216375 Blast Desc: hydrolase or acyltransferase [Slackia exigua ATCC 700122] gi|269130634|gb|EEZ61712.1| hydrolase or acyltransferase [Slackia exigua ATCC 700122]
  misc_feature (3)..(313): NCBI GI: 138895229 Blast Desc: alpha/beta fold family hydrolase [Geobacillus thermodenitrificans NG80-2] gi|196248183|ref|ZP_03146884.1| alpha/beta hydrolase fold protein [Geobacillus sp. G11MC16] fold
  misc_feature (10)..(325): NCBI GI: 21226030 Blast Desc: hydrolase [Streptomyces coelicolor A3(2)] gi|11061568|emb|CAC14505.1| hydrolase [Streptomyces coelicolor A3(2)]
  misc_feature (32)..(313): SWISSPROT Homolog: EC 3.3.2.10 Soluble epoxide hydrolase
MDKILQRAGFQEHDFHTGEVILNYVVGPARKGPAIIFIHGQSVTWEEYTFIMPPLSSDFTVYAVSLRGHGKSSWTPGQYTFNTLGKDMTAFLSHIVREPAIVVGNSSGGVLTSWLAANAKPWYVKAIVLEDPPLFRCDHANITTTAVYDLWLAFARATVPNGGGFAAFYRDFLVPTISRSDGVMTSEKRAPTSLLKMVGRLIVMQQMFHPGKPVDFAFMPTKPRIMIRGMSQFDGNFARAFVDGTVGQEFDHAETLSRIDVPVLFLHARYYMREDRLLGALTDEDVERVKQLVRGSWKYVRMDCGHAIALDAPEREEREIRAWIAEQRLDAREEENCDVPIA

SEQ ID NO: 27597 - DNA, 876 bp, Muscodor strobelii
  misc_feature: SGI cDNA ID NO. 569455
  misc_feature: Encodes the peptide sequence at SEQ ID NO 27598
atgcccccgctgagctcggatttcaccgtctacgccgtcagcttgcgcggtcatggcaaatcaagttggacgccaggacaatacacgttcaacactctcgggaaggacatgacggcctttctcagtcatattgtacgcgaacctgccatcgtcgttggcaactcatccggcggcgtcttgacgtcgtggctggctgccaatgctaagccatggtacgtgaaggctattgtgttagaggatccaccgctcttccgctgcgaccatgcaaacatcacgacgaccgccgtttacgatctttggctggctttcgcgcgggccaccgtgcctaatgggggcggcttcgctgccttctatcgcgactttttggtgccgaccatttcgagatccgacggagttatgacttctgagaagcgtgcaccgacatcactactgaagatggtcggtcggctcatcgtgatgcagcagatgttccatccagggaagcctgtcgattttgccttcatgcctacgaagccacgcatcatgatacggggtatgtcacagttcgatggtaatttcgcccgggcatttgtagacgggactgtcgggcaggagtttgatcatgcggagacgctttcccgcatcgacgtccctgtcctatttttgcatgctaggtactatatgcgggaagatcgcctgcttggggcactcacggatgaagacgtggaacgcgtgaagcagctggtcagaggttcgtggaagtatgtcaggatggactgcggacatgccatcgcccttgatgcaccagagagagaagaacgggagattcgagcatggatcgctgaacaacgattggacgcaagggaagaagagaattgcgatgttcctattgcctga

SEQ ID NO: 27598 - protein, 291 aa, Muscodor strobelii
  misc_feature: SGI Peptide ID NO. 569455
  misc_feature (8)..(271): Pfam Id: PF00561 Pfam Desc: alpha/beta hydrolase fold
  misc_feature (8)..(82): Pfam Id: PF00561 Pfam Desc: alpha/beta hydrolase fold
  misc_feature (1)..(274): NCBI GI: 73748922 Blast Desc: hydrolase [Dehalococcoides sp. CBDB1] gi|73660638|emb|CAI83245.1| hydrolase [Dehalococcoides sp. CBDB1]
  misc_feature (1)..(274): NCBI GI: 147669690 Blast Desc: alpha/beta hydrolase fold [Dehalococcoides sp. BAV1] gi|146270638|gb|ABQ17630.1| alpha/beta hydrolase fold [Dehalococcoides sp. BAV1]
  misc_feature (1)..(274): NCBI GI: 269920706 Blast Desc: alpha/beta hydrolase fold protein [Dehalococcoides sp. GT] gi|269200659|gb|EEZ73287.1| alpha/beta hydrolase fold protein [Dehalococcoides sp. GT]
  misc_feature (1)..(277): NCBI GI: 238064211 Blast Desc: hydrolase/acyltransferase [Micromonospora sp. ATCC 39149] gi|237886022|gb|EEP74850.1| hydrolase/acyltransferase [Micromonospora sp. ATCC 39149]
  misc_feature (3)..(264): NCBI GI: 24379467 Blast Desc: hydrolase or acyltransferase [Streptococcus mutans UA159] gi|24377404|gb|AAN58728.1|AE014942_4 hydrolase or acyltransferase [Streptococcus mutans UA159]
  misc_feature (3)..(257): NCBI GI: 269216375 Blast Desc: hydrolase or acyltransferase [Slackia exigua ATCC 700122] gi|269130634|gb|EEZ61712.1| hydrolase or acyltransferase [Slackia exigua ATCC 700122]
  misc_feature (3)..(264): NCBI GI: 229829887 Blast Desc: GCWU000342_01993 [Shuttleworthia satelles DSM 14600] gi|229791185|gb|EEP27299.1| GCWU000342_01993 [Shuttleworthia satelles DSM 14600]
  misc_feature (3)..(264): NCBI GI: 160946194 Blast Desc: PEPMIC_00156 [Parvimonas micra ATCC 33270] gi|158447717|gb|EDP24712.1| PEPMIC_00156 [Parvimonas micra ATCC 33270]
  misc_feature (4)..(274): NCBI GI: 21226030 Blast Desc: hydrolase [Streptomyces coelicolor A3(2)] gi|11061568|emb|CAC14505.1| hydrolase [Streptomyces coelicolor A3(2)]
  misc_feature (4)..(274): NCBI GI: 256782904 Blast Desc: hydrolase [Streptomyces lividans TK24]
MPPLSSDFTVYAVSLRGHGKSSWTPGQYTFNTLGKDMTAFLSHIVREPAIVVGNSSGGVLTSWLAANAKPWYVKAIVLEDPPLFRCDHANITTTAVYDLWLAFARATVPNGGGFAAFYRDFLVPTISRSDGVMTSEKRAPTSLLKMVGRLIVMQQMFHPGKPVDFAFMPTKPRIMIRGMSQFDGNFARAFVDGTVGQEFDHAETLSRIDVPVLFLHARYYMREDRLLGALTDEDVERVKQLVRGSWKYVRMDCGHAIALDAPEREEREIRAWIAEQRLDAREEENCDVPIA

SEQ ID NO: 27599 - DNA, 2049 bp, Muscodor strobelii
  misc_feature: SGI cDNA ID NO. 569456
  misc_feature: Encodes the peptide sequence at SEQ ID NO 27600
atgctccctcaccttgctagcctcttgtgcgccgccggcctcaccacggcttacctcaacgagccacacaacgttcacgaggaacgagccgagcatagctcgcgatgggtcaagagaggtcgtgtgcccgctttcaagcggcttcccgtcaggattgggttgacacagtccaacctcgacaacgcccccgacttcttacttgatgtctctcaccccagctcccataactatggtaagctgtggacatcggatgaggtcatcgaggcattccagccgagcgaggacgccgtcaagtctgtccgcgactggttggctgcccacggcattttggacgtcacccactccgacaacaagggctggttggcctttgacgcaccggcatccaaggtcgagtcgctcttgaggacccagtatcatgagtttgaggacaccgtcacgggtggtgtcatcccggctgccgacaagtatcacgttccccagtccgttcagaagcacatcgattacatcaccccgggcatcaagctaatggctcccgtcgagtcgcccatggctgatttgagaaagcgaggcctcaagaagcgtgctcatagccgttcaagacggccaactaggctccagaagattgatggtgggctgcaggccatcatgaaacagaacagcagcgatctgagcacttgtgatgtggccattacgcccgcctgcgtagcagcgctgtacaatattcctaaaggcaaactcgcccatccttccaactcgatgggtatcttcgaggccgagttgcaattctgggaccaggtcgacctggatctgttctacgccaactacacgcgttggatccccaagggcactcatcccatagatcgaaacatcgatggcggccaggccaagacagataacatctcgctagccggcggggaatcgatgcttgacctcgaccttgcttacccaatcgtctaccctcagactatcaccgtcttcaacgtcgatgacctgcattatcagacatgggcaaacgatacctacacatggggtttcaacactttcttggatgccattgatggctcttattgcacttattctgcatacggcgagacgggcaatgcgcctggtattgatccaacctatcccgatcctgctccggatggctacaatggaactttgcagtgcggagtttataactcgactaatgtagtgtcattttcctacggcggccaggaggctgatgtgccaatcgcctatcagaaacgacaatgcaacgagtatctcaaactcggcctccagggaatctcctttgttttcgcttccggcgactcgggtgtgtccaactacccagagccgtatggcgacgacggcccgacgggctgtcttggaccagacttgaatatcttcaatccgacatggccaaataactgtccgtggatcaccaatgtaggggccaccaaggtctatccaggcaaaaccgtgttcgagccagagagcgcagtctacgaccccgcaggtcatccatattccgtaaactactcttctggtggaggtttcagcaatatttatccagttccgaaatatcaaaagtcggcggtggatacctttttcaaggatcataacccgccatacccgtactatagtgctctcgcgcctgacgctcccaacccggcgctgctcaatatcacagctttagctggtgataccggcggcatctacaacagaatcggtcggggcatcccagatgtggctgccaacggagacaacatcgcagtctatgtgaatggtgaattcgacttgagtggcggtacatcggcaagcacccctatattcgcggctgtgctgaaccgcatcaacgaggaacgcatagcaattggcaagaagccagtcgggttcgtcaacccggtactctacgagcatcctgaagtgctcaacgacatcaccaatgggaccaatccaggttgtgacacagtcggcttcagtgcggtgaaaggctgggatccagttactgggttgggaacaccaaactatccgaaaatgctagaactttttctacgtctaccttag

SEQ ID NO: 27600 - protein, 682 aa, Muscodor strobelii
  misc_feature: SGI Peptide ID NO. 569456
  misc_feature (33)..(175): Pfam Id: PF09286 Pfam Desc: Pro-kumamolisin, activation domain
  misc_feature (23)..(682): NCBI GI: 212545452 Blast Desc: protease S8 tripeptidyl peptidase I, [Penicillium marneffei ATCC 18224] gi|210065849|gb|EEA19943.1| protease S8 tripeptidyl peptidase I, [Penicillium marneffei ATCC 18224]
  misc_feature (25)..(679): NCBI GI: 154313831 Blast Desc: BC1G_05765 [Botryotinia fuckeliana B05.10] gi|150849347|gb|EDN24540.1| BC1G_05765 [Botryotinia fuckeliana B05.10]
  misc_feature (25)..(682): NCBI GI: 156061427 Blast Desc: SS1G_02857 [Sclerotinia sclerotiorum 1980] gi|154700260|gb|EDN99998.1| SS1G_02857 [Sclerotinia sclerotiorum 1980]
  misc_feature (7)..(682): NCBI GI: 145228611 Blast Desc: An01g01750 [Aspergillus niger] gi|134054705|emb|CAK43546.1| protein product [Aspergillus niger]
  misc_feature (68)..(682): NCBI GI: 154304168 Blast Desc: BC1G_08354 [Botryotinia fuckeliana B05.10] gi|150854156|gb|EDN29348.1| BC1G_08354 [Botryotinia fuckeliana B05.10]
  misc_feature (25)..(682): NCBI GI: 169774229 Blast Desc: [Aspergillus oryzae RIB40] gi|94730360|sp|Q8NK92.2|AORSN_ASPOR RecName: Full=Aorsin; Flags: Precursor gi|83769445|dbj|BAE59580.1| protein product oryzae]
  misc_feature (25)..(682): NCBI GI: 21321299 Blast Desc: aorsin [Aspergillus oryzae]
  misc_feature (25)..(682): NCBI GI: 238497265 Blast Desc: protease S8 tripeptidyl peptidase I, [Aspergillus flavus NRRL3357] gi|220694748|gb|EED51092.1| protease S8 tripeptidyl peptidase I, [Aspergillus flavus NRRL3357]
  misc_feature (26)..(682): NCBI GI: 156059012 Blast Desc: SS1G_03518 [Sclerotinia sclerotiorum 1980] gi|154701305|gb|EDO01044.1| SS1G_03518 [Sclerotinia sclerotiorum 1980]
  misc_feature (23)..(682): NCBI GI: 145234709 Blast Desc: An03g01010 [Aspergillus niger] gi|134057676|emb|CAK38074.1| protein product [Aspergillus niger]
  misc_feature (34)..(682): SWISSPROT Homolog: EC 3.4.21.103 Physarolisin
MLPHLASLLCAAGLTTAYLNEPHNVHEERAEHSSRWVKRGRVPAFKRLPVRIGLTQSNLDNAPDFLLDVSHPSSHNYGKLWTSDEVIEAFQPSEDAVKSVRDWLAAHGILDVTHSDNKGWLAFDAPASKVESLLRTQYHEFEDTVTGGVIPAADKYHVPQSVQKHIDYITPGIKLMAPVESPMADLRKRGLKKRAHSRSRRPTRLQKIDGGLQAIMKQNSSDLSTCDVAITPACVAALYNIPKGKLAHPSNSMGIFEAELQFWDQVDLDLFYANYTRWIPKGTHPIDRNIDGGQAKTDNISLAGGESMLDLDLAYPIVYPQTITVFNVDDLHYQTWANDTYTWGFNTFLDAIDGSYCTYSAYGETGNAPGIDPTYPDPAPDGYNGTLQCGVYNSTNVVSFSYGGQEADVPIAYQKRQCNEYLKLGLQGISFVFASGDSGVSNYPEPYGDDGPTGCLGPDLNIFNPTWPNNCPWITNVGATKVYPGKTVFEPESAVYDPAGHPYSVNYSSGGGFSNIYPVPKYQKSAVDTFFKDHNPPYPYYSALAPDAPNPALLNITALAGDTGGIYNRIGRGIPDVAANGDNIAVYVNGEFDLSGGTSASTPIFAAVLNRINEERIAIGKKPVGFVNPVLYEHPEVLNDITNGTNPGCDTVGFSAVKGWDPVTGLGTPNYPKMLELFLRLP

SEQ ID NO: 27601 - DNA, 3917 bp, Muscodor strobelii
  misc_feature: SGI EST ID NO. CUFF.65241.0
  misc_feature: Variant of the nucleotide sequence at SEQ ID NO 27599
gtcagcagcgtctcgtagcccggctccgcctcgatctgcttgaggtcgcggggcgccttctggcccaggaagccgaggaacgtcctccgctgcgacgctcgcgggctacggccgtgggcatgggtgcgggcgcgggagggacagctgcacaagacgggccgtgacggtgtgcatctgctggagagtggccgaagagaagaggaggaggaggaagcaaaagaaggaggagcagaagaagaaagctgtctcgtggcgccggctatgcgggagacagtggtggtagtgatggcagtggtggcagctgcggtgatagtcggtggccgtcgcaggacatggcgagtgacttgcgaccgcatggtcggatgtgtagggggggataagtatcaattgacacgctcaattgactcgcgtgcgtgtctgcgcatggctgaggcgatgtgtccggcctgggtgcgctggaggtgacgtggtgagcgtggtgggcggcccggatcgacgactgactgcaagctgaggtcgacgttttgaagctccaaaaaagaattataattgcagctgctgggccctctgcacaatccacagcgccagctccagcctggcggcgcgtcatctaagctcctacctttccattccccgtatctcccctatgtccgatatggactagtgggccttgtcgactgctatcagcccggccagataagttgccagccgcagtggccgacatctgcacgctgccgtcagagccaaaatccatgtctcctctccagtggaacttctcgaccgactactactggaattattccccgagaccaaggtcgaacgtgagaccatgcttgaccattgatcggtcgtgatccagaaaccacgtttgccctcagagcttgaaatgtgcccaatcgataataatacccagtactccatacatgcggtgatacatatgctttatctacggtcatagtgcaccaggtagagcagagtagatgcagtattgatgaatctctgctgctgccaggcccatctgcagatcgtctgtccctctacccgcacaaggcaggcgagcggatcacccctattcctgttgtcttgtacgcggaatcatcccctccaatcatcgttctctctcccgcctcttatcgtcggcttacttgaattgcgacatctctctcgcttgtcctgcctcgccttcctccatgttaatgacacacatcactcatcaacgcccaatcgccgctctgcctttgaggaccggtcagagctcagatagctgtctctcggctgttaagctacgtcctttacatattcaagaaattcacccctgcaacaccccggcatcaccacatccactaatgtccttcgagaagctcatatgcacccattctccagtcactgcaacgagtacctgcatttgctccccccgtcctctcacccgatacctaggtgacctcgtcttcggctcgtccactgcgttgctttgccctacgcacagccatgtagatcgggccatgatgacattgaccagaaatggaagctacctaaccacgacccgtcgctcacggcgcatccccccagcatgtagtcataactcgagtacaaataaagacatcgtgccgcttggcactcccatcatgggttcctcttcctctgcctgcattgagcctcaagtcttggtattgctgtagattgacgtcgtgaccatgctccctcaccttgctagcctcttgtgcgccgccggcctcaccacggcttacctcaacgagccacacaacgttcacgaggaacgagccgagcatagctcgcgatgggtcaagagaggtcgtgtgcccgctttcaagcggcttcccgtcaggattgggttgacacagtccaacctcgacaacgcccccgacttcttacttgatgtctctcaccccagctcccataactatggtaagctgtggacatcggatgaggtcatcgaggcattccagccgagcgaggacgccgtcaagtctgtccgcgactggttggctgcccacggcattttggacgtcacccactccgacaacaagggctggttggcctttgacgcaccggcatccaaggtcgagtcgctcttgaggacccagtatcatgagtttgaggacaccgtcacgggtggtgtcatcccggctgccgacaagtatcacgttccccagtccgttcagaagcacatcgattacatcaccccgggcatcaagctaatggctcccgtcgagtcgcccatggctgatttgagaaagcgaggcctcaagaagcgtgctcatagccgttcaagacggccaactaggctccagaagattgatggtgggctgcaggccatcatgaaacagaacagcagcgatctgagcacttgtgatgtggccattacgcccgcctgcgtagcagcgctgtacaatattcctaaaggcaaactcgcccatccttccaactcgatgggtatcttcgaggccgagttgcaattctgggaccaggtcgacctggatctgttctacgccaactacacgcgttggatccccaagggcactcatcccatagatcgaaacatcgatggcggccaggccaagacagataacatctcgctagccggcggggaatcgatgcttgacctcgaccttgcttacccaatcgtctaccctcagactatcaccgtcttcaacgtcgatgacctgcattatcagacatgggcaaacgatacctacacatggggtttcaacactttcttggatgccattgatggctcttattgcacttattctgcatacggcgagacgggcaatgcgcctggtattgatccaacctatcccgatcctgctccggatggctacaatggaactttgcagtgcggagtttataactcgactaatgtagtgtcattttcctacggcggccaggaggctgatgtgccaatcgcctatcagaaacgacaatgcaacgagtatctcaaactcggcctccagggaatctcctttgttttcgcttccggcgactcgggtgtgtccaactacccagagccgtatggcgacgacggcccgacgggctgtcttggaccagacttgaatatcttcaatccgacatggccaaataactgtccgtggatcaccaatgtaggggccaccaaggtctatccaggcaaaaccgtgttcgagccagagagcgcagtctacgaccccgcaggtcatccatattccgtaaactactcttctggtggaggtttcagcaatatttatccagttccgaaatatcaaaagtcggcggtggatacctttttcaaggatcataacccgccatacccgtactatagtgctctcgcgcctgacgctcccaacccggcgctgctcaatatcacagctttagctggtgataccggcggcatctacaacagaatcggtcggggcatcccagatgtggctgccaacggagacaacatcgcagtctatgtgaatggtgaattcgacttgagtggcggtacatcggcaagcacccctatattcgcggctgtggtaggttgttttcatatactggtatttcgttgccctgaaatcgatgtgtactgacccagagggccagctgaaccgcatcaacgaggaacgcatagcaattggcaagaagccagtcgggttcgtcaacccggtactctacgagcatcctgaagtgctcaacgacatcaccaatgggaccaatccaggttgtgacacagtcggcttcagtgcggtgaaaggctgggatccagttactgggttgggaacaccaaactatccgaaaatgctagaactttttctacgtctaccttagcttttcagatttgggtctttccttcattggtgtatttagctgcaatgattcggatctatatcagtagtatacaataagaccagcatactaccgacattgaccactcc

SEQ ID NO: 27602 - DNA, 2061 bp, Muscodor strobelii
  misc_feature: SGI cDNA ID NO. 569457
  misc_feature: Encodes the peptide sequence at SEQ ID NO 27603
atgctccctcaccttgctagcctcttgtgcgccgccggcctcaccacggcttacctcaacgagccacacaacgttcacgaggaacgagccgagcatagctcgcgatgggtcaagagaggtcgtgtgcccgctttcaagcggcttcccgtcaggattgggttgacacagtccaacctcgacaacgcccccgacttcttacttgatgtctctcaccccagctcccataactatggtaagctgtggacatcggatgaggtcatcgaggcattccagccgagcgaggacgccgtcaagtctgtccgcgactggttggctgcccacggcattttggacgtcacccactccgacaacaagggctggttggcctttgacgcaccggcatccaaggtcgagtcgctcttgaggacccagtatcatgagtttgaggacaccgtcacgggtggtgtcatcccggctgccgacaagtatcacgttccccagtccgttcagaagcacatcgattacatcaccccgggcatcaagctaatggctcccgtcgagtcgcccatggctgatttgagaaagcgaggcctcaagaagcgtgctcatagccgttcaagacggccaactaggctccagaagattgatggtgggctgcaggccatcatgaaacagaacagcagcgatctgagcacttgtgatgtggccattacgcccgcctgcgtagcagcgctgtacaatattcctaaaggcaaactcgcccatccttccaactcgatgggtatcttcgaggccgagttgcaattctgggaccaggtcgacctggatctgttctacgccaactacacgcgttggatccccaagggcactcatcccatagatcgaaacatcgatggcggccaggccaagacagataacatctcgctagccggcggggaatcgatgcttgacctcgaccttgcttacccaatcgtctaccctcagactatcaccgtcttcaacgtcgatgacctgcattatcagacatgggcaaacgatacctacacatggggtttcaacactttcttggatgccattgatggctcttattgcacttattctgcatacggcgagacgggcaatgcgcctggtattgatccaacctatcccgatcctgctccggatggctacaatggaactttgcagtgcggagtttataactcgactaatgtagtgtcattttcctacggcggccaggaggctgatgtgccaatcgcctatcagaaacgacaatgcaacgagtatctcaaactcggcctccagggaatctcctttgttttcgcttccggcgactcgggtgtgtccaactacccagagccgtatggcgacgacggcccgacgggctgtcttggaccagacttgaatatcttcaatccgacatggccaaataactgtccgtggatcaccaatgtaggggccaccaaggtctatccaggcaaaaccgtgttcgagccagagagcgcagtctacgaccccgcaggtcatccatattccgtaaactactcttctggtggaggtttcagcaatatttatccagttccgaaatatcaaaagtcggcggtggatacctttttcaaggatcataacccgccatacccgtactatagtgctctcgcgcctgacgctcccaacccggcgctgctcaatatcacagctttagctggtgataccggcggcatctacaacagaatcggtcggggcatcccagatgtggctgccaacggagacaacatcgcagtctatgtgaatggtgaattcgacttgagtggcggtacatcggcaagcacccctatattcgcggctgtggtagagggccagctgaaccgcatcaacgaggaacgcatagcaattggcaagaagccagtcgggttcgtcaacccggtactctacgagcatcctgaagtgctcaacgacatcaccaatgggaccaatccaggttgtgacacagtcggcttcagtgcggtgaaaggctgggatccagttactgggttgggaacaccaaactatccgaaaatgctagaactttttctacgtctaccttag

SEQ ID NO: 27603 - protein, 686 aa, Muscodor strobelii
  misc_feature: SGI Peptide ID NO. 569457
  misc_feature (33)..(175): Pfam Id: PF09286 Pfam Desc: Pro-kumamolisin, activation domain
  misc_feature (23)..(686): NCBI GI: 212545452 Blast Desc: protease S8 tripeptidyl peptidase I, [Penicillium marneffei ATCC 18224] gi|210065849|gb|EEA19943.1| protease S8 tripeptidyl peptidase I, [Penicillium marneffei ATCC 18224]
  misc_feature (25)..(683): NCBI GI: 154313831 Blast Desc: BC1G_05765 [Botryotinia fuckeliana B05.10] gi|150849347|gb|EDN24540.1| BC1G_05765 [Botryotinia fuckeliana B05.10]
  misc_feature (25)..(686): NCBI GI: 156061427 Blast Desc: SS1G_02857 [Sclerotinia sclerotiorum 1980] gi|154700260|gb|EDN99998.1| SS1G_02857 [Sclerotinia sclerotiorum 1980]
  misc_feature (7)..(686): NCBI GI: 145228611 Blast Desc: An01g01750 [Aspergillus niger] gi|134054705|emb|CAK43546.1| protein product [Aspergillus niger]
  misc_feature (68)..(686): NCBI GI: 154304168 Blast Desc: BC1G_08354 [Botryotinia fuckeliana B05.10] gi|150854156|gb|EDN29348.1| BC1G_08354 [Botryotinia fuckeliana B05.10]
  misc_feature (25)..(686): NCBI GI: 169774229 Blast Desc: [Aspergillus oryzae RIB40] gi|94730360|sp|Q8NK92.2|AORSN_ASPOR RecName: Full=Aorsin; Flags: Precursor gi|83769445|dbj|BAE59580.1| protein product oryzae]
  misc_feature (25)..(686): NCBI GI: 21321299 Blast Desc: aorsin [Aspergillus oryzae]
  misc_feature (25)..(686): NCBI GI: 238497265 Blast Desc: protease S8 tripeptidyl peptidase I, [Aspergillus flavus NRRL3357] gi|220694748|gb|EED51092.1| protease S8 tripeptidyl peptidase I, [Aspergillus flavus NRRL3357]
  misc_feature (26)..(686): NCBI GI: 156059012 Blast Desc: SS1G_03518 [Sclerotinia sclerotiorum 1980] gi|154701305|gb|EDO01044.1| SS1G_03518 [Sclerotinia sclerotiorum 1980]
  misc_feature (23)..(686): NCBI GI: 145234709 Blast Desc: An03g01010 [Aspergillus niger] gi|134057676|emb|CAK38074.1| protein product [Aspergillus niger]
  misc_feature (34)..(686): SWISSPROT Homolog: EC 3.4.21.103 Physarolisin
MLPHLASLLCAAGLTTAYLNEPHNVHEERAEHSSRWVKRGRVPAFKRLPVRIGLTQSNLDNAPDFLLDVSHPSSHNYGKLWTSDEVIEAFQPSEDAVKSVRDWLAAHGILDVTHSDNKGWLAFDAPASKVESLLRTQYHEFEDTVTGGVIPAADKYHVPQSVQKHIDYITPGIKLMAPVESPMADLRKRGLKKRAHSRSRRPTRLQKIDGGLQAIMKQNSSDLSTCDVAITPACVAALYNIPKGKLAHPSNSMGIFEAELQFWDQVDLDLFYANYTRWIPKGTHPIDRNIDGGQAKTDNISLAGGESMLDLDLAYPIVYPQTITVFNVDDLHYQTWANDTYTWGFNTFLDAIDGSYCTYSAYGETGNAPGIDPTYPDPAPDGYNGTLQCGVYNSTNVVSFSYGGQEADVPIAYQKRQCNEYLKLGLQGISFVFASGDSGVSNYPEPYGDDGPTGCLGPDLNIFNPTWPNNCPWITNVGATKVYPGKTVFEPESAVYDPAGHPYSVNYSSGGGFSNIYPVPKYQKSAVDTFFKDHNPPYPYYSALAPDAPNPALLNITALAGDTGGIYNRIGRGIPDVAANGDNIAVYVNGEFDLSGGTSASTPIFAAVVEGQLNRINEERIAIGKKPVGFVNPVLYEHPEVLNDITNGTNPGCDTVGFSAVKGWDPVTGLGTPNYPKMLELFLRLP

SEQ ID NO: 27604 - DNA, 3917 bp, Muscodor strobelii; identical to SEQ ID NO: 27601
  misc_feature: SGI EST ID NO. CUFF.65241.0
  misc_feature: Variant of the nucleotide sequence at SEQ ID NO 27602

SEQ ID NO: 27605 - DNA, 1167 bp, Muscodor strobelii
  misc_feature: SGI cDNA ID NO. 569458
  misc_feature: Elevated expression when VOC is produced
  misc_feature: Encodes the peptide sequence at SEQ ID NO 27606
atgctatcgacatcgctattcaccttactctcactaagctcaacaaccttggcctgggaatggggcaaatcagggcactgggatttgcactgggacattgagcaatggctcgacggtcacggcacgacctcaaacatcaactacacaacaatcacaggcttcttcttacaagatgatgcagcaacagatccgtcaacctttgactatacaaccgttaactatggactaatcaaccgatcatacaccacagatcgtgtcttcgatcctctgaagtccaagacgcaatggcagcgcttcgagtactacgtgaactacttaaatcacctcgcagacccaaacacacagtataaagtcctatacctggcccgtcacggcgagggctaccacaacgcagcagagacatattacgggacaccagcctggaactgctactggagcgagctaaacggcaacgggacaacagtctggcgcgacgccctcctaacacccgccggcctctcacaatgcacaaaagcgaacacattctggtcctccgcactctcctcatctaaaatccccgctccgcaatcatactacagcagtcccctactacgctcagcgacaaccgccaatttgaccttcagttccctccccttaccaaaagaccggcccttccgccccattatcaaggagttactccgggagggaatatcaatgcacacatgtgacagccgatccaccaaatcacacatctccagtgtgttagacaataaattcaggttcgaagcaggattcaccgagaaggacttattatggaaagggtacgaggccgagaccgacgaagcctcgatggcgcgcgcaaagagggtgatggatgatatattctcccacgacgagtcgacgttcatcagcatgacgacgcattcgggacagataagatctgcgctggaggtccttgggcatcgagctttcagcttgtcgacggggcaggccattccggttctggtgaaggcgaagaaggagaaagttaggctcccaacgacgacgatacagagttgggaggctcaggctacttgtacggcgccgccgattagtagtgatgccgtgagtgggtgtgtttgtgctactgggacgggtggaagtggagacgcgacggctacggctactgctactgctgttgcagtatga

SEQ ID NO: 27606 - protein, 388 aa, Muscodor strobelii
  misc_feature: SGI Peptide ID NO. 569458
  misc_feature (118)..(308): Pfam Id: PF00300 Pfam Desc: Phosphoglycerate mutase family
  misc_feature (1)..(383): NCBI GI: 116200374 Blast Desc: CHGG_10732 [Chaetomium globosum CBS 148.51] gi|88175446|gb|EAQ82914.1| CHGG_10732 [Chaetomium globosum CBS 148.51]
  misc_feature (45)..(380): NCBI GI: 46117460 Blast Desc: FG04572.1 [Gibberella zeae PH-1]
  misc_feature (46)..(381): NCBI GI: 256729546 Blast Desc: NECHADRAFT_84235 [Nectria haematococca mpVI 77-13-4]
  misc_feature (44)..(369): NCBI GI: 145239457 Blast Desc: An08g02590 [Aspergillus niger] gi|134076886|emb|CAK45295.1| protein product [Aspergillus niger]
  misc_feature (44)..(367): NCBI GI: 238498466 Blast Desc: GPI anchored protein, [Aspergillus flavus NRRL3357] gi|220693742|gb|EED50087.1| GPI anchored protein, [Aspergillus flavus NRRL3357]
  misc_feature (44)..(367): NCBI GI: 255940016 Blast Desc: Pc16g04220 [Penicillium chrysogenum Wisconsin 54-1255] gi|211585400|emb|CAP93092.1| Pc16g04220 [Penicillium chrysogenum Wisconsin 54-1255]
  misc_feature (35)..(374): NCBI GI: 261359892 Blast Desc: phosphoglycerate mutase family protein [Verticillium albo-atrum VaMs.102]
  misc_feature (48)..(369): NCBI GI: 70995335 Blast Desc: GPI anchored protein [Aspergillus fumigatus Af293] gi|66850060|gb|EAL90387.1| GPI anchored protein, [Aspergillus fumigatus Af293] gi|159131179|gb|EDP56292.1| GPI anchored A1163]
  misc_feature (48)..(369): NCBI GI: 119495870 Blast Desc: phosphoglycerate mutase family protein [Neosartorya fischeri NRRL 181] gi|119412873|gb|EAW22814.1| phosphoglycerate mutase family protein [Neosartorya fischeri NRRL 181]
  misc_feature (46)..(370): NCBI GI: 242776588 Blast Desc: GPI anchored protein, [Talaromyces stipitatus ATCC 10500] gi|218722484|gb|EED21902.1| GPI anchored protein, [Talaromyces stipitatus ATCC 10500]
  misc_feature: Useful for introducing or modulating the production of volatile compounds
MLSTSLFTLLSLSSTTLAWEWGKSGHWDLHWDIEQWLDGHGTTSNINYTTITGFFLQDDAATDPSTFDYTTVNYGLINRSYTTDRVFDPLKSKTQWQRFEYYVNYLNHLADPNTQYKVLYLARHGEGYHNAAETYYGTPAWNCYWSELNGNGTTVWRDALLTPAGLSQCTKANTFWSSALSSSKIPAPQSYYSSPLLRSATTANLTFSSLPLPKDRPFRPIIKELLREGISMHTCDSRSTKSHISSVLDNKFRFEAGFTEKDLLWKGYEAETDEASMARAKRVMDDIFSHDESTFISMTTHSGQIRSALEVLGHRAFSLSTGQAIPVLVKAKKEKVRLPTTTIQSWEAQATCTAPPISSDAVSGCVCATGTGGSGDATATATATAVAV

SEQ ID NO: 27607 - DNA, 2054 bp, Muscodor strobelii
  misc_feature: SGI EST ID NO. CUFF.65360.0
  misc_feature: Variant of the nucleotide sequence at SEQ ID NO 27605
cacgtcaacaagtctcgcattgcgatatgtaatagaccgtgtactaagttgtgagcaaggcgagtccatgggcaatttagaaagtctagtgaacctcttcaattgactagcgcttgtttcaaccttgaaatcgaacatagtcttgcttcagctttcacttgaaaatgctatcgacatcgctattcaccttactctcactaagctcaacaaccttggcctgggaatggggcaaatcagggcactgggatttgcactgggacattgagcaatggctcgacggtcacggcacgacctcaaacatcaactacacaacaatcacaggcttcttcttacaagatgatgcagcaacagatccgtcaacctttgactatacaaccgttaactatggactaatcaaccgatcatacaccacagatcgtgtcttcgatcctctgaagtccaagacgcaatggcagcgcttcgagtactacgtgaactacttaaatcacctcgcagacccaaacacacagtataaagtcctatacctggcccgtcacggcgagggctaccacaacgcagcagagacatattacgggacaccagcctggaactgctactggagcgagctaaacggcaacgggacaacagtctggcgcgacgccctcctaacacccgccggcctctcacaatgcacaaaagcgaacacattctggtcctccgcactctcctcatctaaaatccccgctccgcaatcatactacagcagtcccctactacgctcagcgacaaccgccaatttgaccttcagttccctccccttaccaaaagaccggcccttccgccccattatcaaggagttactccgggagggaatatcaatgcacacatgtgacagccgatccaccaaatcacacatctccagtgtgttagacaataaattcaggttcgaagcaggattcaccgagaaggacttattatggaaagggtacgaggccgagaccgacgaagcctcgatggcgcgcgcaaagagggtgatggatgatatattctcccacgacgagtcgacgttcatcagcatgacgacgcattcgggacagataagatctgcgctggaggtccttgggcatcgagctttcagcttgtcgacggggcaggccattccggttctggtgaaggcgaagaaggagaaagttaggctcccaacgacgacgatacagagttgggaggctcaggctacttgtacggcgccgccgattagtagtgatgccgtgagtgggtgtgtttgtgctactgggacgggtggaagtggagacgcgacggctacggctactgctactgctgttgcagtatgattagagactttagagatatatgaatatgatagtaaggacgatcggcttaaatgtgcctttgtggtatcaatcgatgtattgaaatacctatctattttgatcgtgacacgtccattttgatcgcagcgccttctgtccataaaacgtgagagctaaaaaacagcaatgggaatgacaacgctttctgagatgctccgtgctccatgtgggcggcgccccatgcaagtatatcgccatcgtcttttcggagacggcaacgtgattttccgtgattcttcccggtgacgagcttgctgctgcgcgagaagggtatacagcagttgagatgctcgacttttgttcattatgcagccagccagaataatcaagactccttctgcgtctcagctccaccatcgcgggttctgttcttcggtcgcggctgcttctcgtacgcgtttgggctgggtcgcctcctagtaccctctcctcgggctcgtctgcctcctccatctggttgttcgtgattgtgtccatgttcgcagtccttggcgtggccatgatcgtgattgggatggttgggacgctgttggtctctggctctgcgctgggctagcgctctctcgcgggcatcgtactcgccgccgggatcggagtcggagtctgaagaggacgaatctgaggatgactcgtcagaggactcgcctactacgccgggtgcgtggtagatgcagcacactatag

SEQ ID NO: 27608 - DNA, 594 bp, Muscodor strobelii
  misc_feature: SGI cDNA ID NO. 569459
  misc_feature: Encodes the peptide sequence at SEQ ID NO 27609
atgtcagcttccaattcccgcccgcaagggcaggcgcaacctgcgcctgacttgcacctacgagcgcagagacgcaccgaagcaccctcaggctccgccacgcagacagagacctctgcacccgcccccgcagcacctgccattctgcgccttcgaggtgcccatccggcctcagcgaaccgcgtccagtgggccgagaacgtcgtcgacaatgaaggtctcggacgcaagagctctaaagtgtgctgcatctaccacgcacccggcgtagtaggcgagtcctctgacgagtcatcctcagattcgtcctcttcagactccgactccgatcccggcggcgagtacgatgcccgcgagagagcgctagcccagcgcagagccagagaccaacagcgtcccaaccatcccaatcacgatcatggccacgccaaggactgcgaacatggacacaatcacgaacaaccagatggaggaggcagacgagcccgaggagagggtactaggaggcgacccagcccaaacgcgtacgagaagcagccgcgaccgaagaacagaacccgcgatggtggagctgagacgcagaaggagtcttga

SEQ ID NO: 27609 - protein, 197 aa, Muscodor strobelii
  misc_feature: SGI Peptide ID NO. 569459
  misc_feature (48)..(103): Pfam Id: PF07491 Pfam Desc: Protein phosphatase inhibitor
  misc_feature (28)..(181): NCBI GI: 116204867 Blast Desc: CHGG_10317 [Chaetomium globosum CBS 148.51] gi|121776687|sp|Q2GNY7.1|YPI1_CHAGB RecName: Full=Type 1 phosphatases regulator YPI1 gi|88176445|gb|EAQ83913.1| CHGG_10317
  misc_feature (48)..(184): NCBI GI: 169604596 Blast Desc: SNOG_05312 [Phaeosphaeria nodorum SN15] gi|121935812|sp|Q0USF2.1|YPI1_PHANO RecName: Full=Type 1 phosphatases regulator YPI1 gi|111066583|gb|EAT87703.1| nodorum
  misc_feature (9)..(191): NCBI GI: 85082251 Blast Desc: NCU01670 [Neurospora crassa OR74A] gi|74625244|sp|Q9P6B0.2|YPI1_NEUCR RecName: Full=Type 1 phosphatases regulator ypi-1 gi|16944434|emb|CAB91259.2| crassa]
  misc_feature (18)..(91): NCBI GI: 256732943 Blast Desc: expressed protein [Nectria haematococca mpVI 77-13-4]
  misc_feature (21)..(185): NCBI GI: 145610563 Blast Desc: [Magnaporthe grisea 70-15] gi|189041626|sp|A4RD36.1|YPI1_MAGGR RecName: Full=Type 1 phosphatases regulator YPI1 gi|145017928|gb|EDK02207.1| grisea
  misc_feature (47)..(180): NCBI GI: 171689024 Blast Desc: protein product [Podospora anserina] gi|170944474|emb|CAP70585.1| protein product [Podospora anserina]
  misc_feature (24)..(183): NCBI GI: 189196696 Blast Desc: conserved [Pyrenophora tritici-repentis Pt-1C-BFP] gi|187980565|gb|EDU47191.1| conserved [Pyrenophora tritici-repentis Pt-1C-BFP]
  misc_feature (25)..(182): NCBI GI: 255939556 Blast Desc: Pc16g01730 [Penicillium chrysogenum Wisconsin 54-1255] gi|211585170|emb|CAP92843.1| Pc16g01730 [Penicillium chrysogenum Wisconsin 54-1255]
  misc_feature (36)..(181): NCBI GI: 145238963 Blast Desc: An08g00080 [Aspergillus niger] gi|189041622|sp|A2QPT2.1|YPI1_ASPNC RecName: Full=Type 1 phosphatases regulator ypi1 gi|134076630|emb|CAK39767.1| protein
  misc_feature (46)..(181): NCBI GI: 242786188 Blast Desc: ppp1r11-prov protein, [Talaromyces stipitatus ATCC 10500] gi|242786193|ref|XP_002480756.1| ppp1r11-prov protein, [Talaromyces stipitatus ATCC 10500] gi|218720902|gb|EED20321.1|
MSASNSRPQGQAQPAPDLHLRAQRRTEAPSGSATQTETSAPAPAAPAILRLRGAHPASANRVQWAENVVDNEGLGRKSSKVCCIYHAPGVVGESSDESSSDSSSSDSDSDPGGEYDARERALAQRRARDQQRPNHPNHDHGHAKDCEHGHNHEQPDGGGRRARGEGTRRRPSPNAYEKQPRPKNRTRDGGAETQKES

SEQ ID NO: 27610 - DNA, 2715 bp, Muscodor strobelii
  misc_feature: SGI EST ID NO. CUFF.65361.1
  misc_feature: Variant of the nucleotide sequence at SEQ ID NO 27608
gcggtggtgatcatctaccttaccttatccgcggaattgacgtcatttgggtctcgcaggttagatcgcgtgctacttaacgcgtctactggtgccgaggggtcatttcccaaaggacaattgacaacatttacctgaaaggtgtaggcccacgataacaacaactcccgcctcaagcagtacctaccttagtactcatcccactgattgaatgaaaactgttgcaatcccccattttcctcccacgcgacccaatccaacactcatcacaccctccatcttctcattcaccccgccatgtcagcttccaattcccgcccgcaagggcaggcgcaacctgcgcctgacttgcacctacgagcgcagagacgcaccgaagcaccctcaggctccgccacgcagacagagacctctgcacccgcccccgcagcacctgccattctgcgccttcgaggtgcccatccggcctcagcgaaccgcgtccagtgggccgagaacgtcgtcgacaatgaaggtctcggacgcaagagctctaaagtgtgctgcatctaccacgcacccggcgtagtaggcgagtcctctgacgagtcatcctcagattcgtcctcttcagactccgactccgatcccggcggcgagtacgatgcccgcgagagagcgctagcccagcgcagagccagagaccaacagcgtcccaaccatcccaatcacgatcatggccacgccaaggactgcgaacatggacacaatcacgaacaaccagatggaggaggcagacgagcccgaggagagggtactaggaggcgacccagcccaaacgcgtacgagaagcagccgcgaccgaagaacagaacccgcgatggtggagctgagacgcagaaggagtcttgattattctggctggctgcataatgaacaaaagtcgagcatctcaactgctgtatacccttctcgcgcagcagcaagctcgtcaccgggaagaatcacggaaaatcacgttgccgtctccgaaaagacgatggcgatatacttgcatggggcgccgcccacatggagcacggagcatctcagaaagcgttgtcattcccattgctgttttttagctctcacgttttatggacagaaggcgctgcgatcaaaatggacgtgtcacgatcaaaatagataggtatttcaatacatcgattgataccacaaaggcacatttaagccgatcgtccttactatcatattcatatatctctaaagtctctaatcatactgcaacagcagtagcagtagccgtagccgtcgcgtctccacttccacccgtcccagtagcacaaacacacccactcacggcatcactactaatcggcggcgccgtacaagtagcctgagcctcccaactctgtatcgtcgtcgttgggagcctaactttctccttcttcgccttcaccagaaccggaatggcctgccccgtcgacaagctgaaagctcgatgcccaaggacctccagcgcagatcttatctgtcccgaatgcgtcgtcatgctgatgaacgtcgactcgtcgtgggagaatatatcatccatcaccctctttgcgcgcgccatcgaggcttcgtcggtctcggcctcgtaccctttccataataagtccttctcggtgaatcctgcttcgaacctgaatttattgtctaacacactggagatgtgtgatttggtggatcggctgtcacatgtgtgcattgatattccctcccggagtaactccttgataatggggcggaagggccggtcttttggtaaggggagggaactgaaggtcaaattggcggttgtcgctgagcgtagtaggggactgctgtagtatgattgcggagcggggattttagatgaggagagtgcggaggaccagaatgtgttcgcttttgtgcattgtgagaggccggcgggtgttaggagggcgtcgcgccagactgttgtcccgttgccgtttagctcgctccagtagcactgtgaatgagtgttatattagatttggtgaagacttagggagggagaggagtaaaggtatgagggggggacgtacgttccaggctggtgtcccgtaatatgtctctgctgcgttgtggtagccctcgccgtgacgggccaggtataggactttatactgtgtgtttgggtctgcgaggtgatttaagtagttcacgtagtactcgaagcgctgccattgcgtcttggacttcagaggatcgaagacacgatctgtggtgtatgatcggttgattagtccatagttaacggttgtctggaaattgtgagtaagagctctttttttggctgtgtagagtaggaacgcacatagtcaaaggttgacggatctgttgctgcatcatcttgtaagaagaagcctgtgattgttgtgtagttgatgtttgaggtcgtgccgtgaccgtcgagccattgctcaatgtcccagtgcaaatcccagtgccctgatttgccccattcccaggccaaggttgttgagcttagtgagagtaaggtgaatagcgatgtcgatagcattttcaagtgaaagctgaagcaagactatgttcgatttcaaggttgaaacaagcgctagtcaattgaagaggttcactagactttctaaattgcccatggactcgccttgctcacaacttagtacacggtctattacatatcgcaatgcgagacttgttgacgtg

SEQ ID NO: 27611 - DNA, 2907 bp, Muscodor strobelii
  misc_feature: SGI cDNA ID NO. 569460
  misc_feature: Encodes the peptide sequence at SEQ ID NO 27612
atggcgagcggtttttcatttggccgtttacaggcggggcttacacaagtgacgcaagacttcactgttgccgccgctaacttcaattttgacttcagccttgtcaaaatcgacgcaccacctgagtaccgcggtatcgccaaagtactctcgccagcgcgtattcacgaagctgagacagggcctctccatgccacagcgcggagattgggcgccttgtttgacggtatgtgtccagccatatctgaacttatcaaggcctacggaacaagagcaaccgaaatctcgctggaagttgcagacatcgactctcgaactgcaaaatctgacaattgggttcgtgctgagtatggcggtatcgatgcggcttcaatctgggctgcggcgacctccagtaaagcggcactgccgatccatctgctcgcatgcatcattgctagaatgtggaaacatgcagaggccacgtctttatgggttgaaatggtttcagagagaaaaagcgagatcttgagagagatagagcaaggcaaatggttcgaggctggatcagcgtcgatcactcaacaagagatcacccgtgaccacttgtccaagtgggacgcaagcgccagggcctggttacagtctgcggatagcgtgcgacagaaagagtacaagcaattcctacttatcgcgcaaaatgttagcgtcgcagtcaacaaggacaacttgccactatacaagaacgtcatccatgtgtggactactgcacttgctgcgatggaaagtctggtatctgggcgtccgctcgttgttcgagacggccctgtgctattgggactctcggcgtggcacatcttcccagacatgatcgtattcaataataagtcaggcaccgtctccgtgccaatggacgatcccttggtcaaagcaggtggcactgtatcgcttggtatttcggatactggtgagcgggagcagcaaggcgtatactggtcattgtccctggctcatcatacattctatggcaaaccggctaaatatacaaaacagctcgcttccgatggttctcgacttactttaaacgagttgatgcttgtttgcatgggcgctctccttgaacgctggagcgttcctgttgagggtatggacttgggcctcaaggtgctgcaagccgtcttcacaaccccaccacctgtatacgatgataagatttccatgagcaatgcaaccagctggaaagatctctttgctccaatcttggacaagtacttagccggagacaagcagtccgcactggcgatgtccctcggtcgccgtcggccccaattcttgcctattgagattactcgagacagaagaccgctcttaagtctactacatttgccagaacttctatttctgctcaagtcaagaaatcacaaggttaaactcttacgccgcatggcagctagagcagatggtttagatacgaacagtcgtgtgttttaccgtacggaaggatctgcgaaatttcctctttgcctcggctttccccacactggacgaaatgaacaagaggcgcgtttattgagcggaaacggttctcacccgcttcctcccatcccatcattcgacgtattttgtgaggagcacttggataagattcgaaagaaaaaccgaaatgagagtgtggcatacttgacaagcaacgtgacaagcgacagctatccatggtttctcgatacactcacagagactgtgacatataagttagacacagaacacaaccttggattcttcatgggacagaaggatgatattaacccagcggagcattacccgatctgcgaacatgcagcaatctactgcgtaggctgcggaaactccgaagcccccagcgcagatcttgccgagcctgcagtaacattcgaggatatcctatggtgctttcaacacgatttagtatcacgcgggcgcctgcataccttattgaaacgcgagcctgtcgtcggctttctcaagatgctagcaactatcaaccggctctaccgggagccgtctttatgccgtgctactattgcaacctctattatcaacaacccttttcggccaccaattctagacaaaccatatgatgaagtcgattggctcgatgtagactccggtcttgcgcgcttgaatcggttcacagcgatgtgcctgatagggtatttcgaaacgggcttcaatgtagcagagggcctcaaaggggactataggatcatcggtctcagcggtggcgattcaatcttcatcttgtctagcttccttcaagacccgtcagagcggtgtgaagactataacttcacaagaattctggggaacactggccatccgggtttctcgattttgactataccttcaaatttacgggtgcgcgagctcgacttgacagcgtggaggattcaaccttctccggatactgaccctgctgcggactgctttagaaacacttctcttcacttgagctttactgaatggcgctcgcccctcgttcaaatacaggactttgggcagcgagactttgatgtgaatattatcgaggccatagtatccgttcgagactccggagaatgggtcgctgatgtggatatcgaagcggccataaatgatcccaaattgcatcgcccgagcgattgccaagatgcccgcggtcattgtcctgaagtacgaaaattttctgccgagattcccgagaacatactccttgaaacttgggatcagattcttgatgtgcccgagggctcggtaatcattcgttgttccaataactggctagccaggcttgcactggtgtctgttttgtccaaacatagccggatgatgcagtcgtctattatgctttgccgcgactcttgtggtttggagtgtcggggtaaacacagacacgctattcatatctgctga

SEQ ID NO: 27612 - protein, 968 aa, Muscodor strobelii
  misc_feature: SGI Peptide ID NO. 569460
  misc_feature (6)..(967): NCBI GI: 145609608 Blast Desc: MGG_09129 [Magnaporthe grisea 70-15] gi|145017020|gb|EDK01383.1| MGG_09129 [Magnaporthe grisea 70-15]
  misc_feature (6)..(967): NCBI GI: 149210921 Blast Desc: MGCH7_ch7g933 [Magnaporthe grisea 70-15] gi|86196888|gb|EAQ71526.1| MGCH7_ch7g933 [Magnaporthe grisea 70-15]
  misc_feature (6)..(935): NCBI GI: 46137867 Blast Desc: FG10449.1 [Gibberella zeae PH-1]
  misc_feature (5)..(926): NCBI GI: 115492241 Blast Desc: [Aspergillus terreus NIH2624] gi|114197608|gb|EAU39308.1| [Aspergillus terreus NIH2624]
  misc_feature (5)..(442): NCBI GI: 169605903 Blast Desc: SNOG_05984 [Phaeosphaeria nodorum SN15] gi|111065928|gb|EAT87048.1| SNOG_05984 [Phaeosphaeria nodorum SN15]
  misc_feature (22)..(934): NCBI GI: 255945597 Blast Desc: Pc20g10770 [Penicillium chrysogenum Wisconsin 54-1255] gi|211588301|emb|CAP86406.1| Pc20g10770 [Penicillium chrysogenum Wisconsin 54-1255]
  misc_feature (5)..(383): NCBI GI: 169604668 Blast Desc: SNOG_05349 [Phaeosphaeria nodorum SN15] gi|160706620|gb|EAT87740.2| SNOG_05349 [Phaeosphaeria nodorum SN15]
  misc_feature (7)..(386): NCBI GI: 238844746 Blast Desc: conserved [Microsporum canis CBS 113480]
  misc_feature (5)..(366): NCBI GI: 240111731 Blast Desc: CPC735_011940 [Coccidioides posadasii C735 delta SOWgp]
  misc_feature (1)..(527): NCBI GI: 256731930 Blast Desc: NECHADRAFT_80807 [Nectria haematococca mpVI 77-13-4]
MASGFSFGRLQAGLTQVTQDFTVAAANFNFDFSLVKIDAPPEYRGIAKVLSPARIHEAETGPLHATARRLGALFDGMCPAISELIKAYGTRATEISLEVADIDSRTAKSDNWVRAEYGGIDAASIWAAATSSKAALPIHLLACIIARMWKHAEATSLWVEMVSERKSEILREIEQGKWFEAGSASITQQEITRDHLSKWDASARAWLQSADSVRQKEYKQFLLIAQNVSVAVNKDNLPLYKNVIHVWTTALAAMESLVSGRPLVVRDGPVLLGLSAWHIFPDMIVFNNKSGTVSVPMDDPLVKAGGTVSLGISDTGEREQQGVYWSLSLAHHTFYGKPAKYTKQLASDGSRLTLNELMLVCMGALLERWSVPVEGMDLGLKVLQAVFTTPPPVYDDKISMSNATSWKDLFAPILDKYLAGDKQSALAMSLGRRRPQFLPIEITRDRRPLLSLLHLPELLFLLKSRNHKVKLLRRMAARADGLDTNSRVFYRTEGSAKFPLCLGFPHTGRNEQEARLLSGNGSHPLPPIPSFDVFCEEHLDKIRKKNRNESVAYLTSNVTSDSYPWFLDTLTETVTYKLDTEHNLGFFMGQKDDINPAEHYPICEHAAIYCVGCGNSEAPSADLAEPAVTFEDILWCFQHDLVSRGRLHTLLKREPVVGFLKMLATINRLYREPSLCRATIATSIINNPFRPPILDKPYDEVDWLDVDSGLARLNRFTAMCLIGYFETGFNVAEGLKGDYRIIGLSGGDSIFILSSFLQDPSERCEDYNFTRILGNTGHPGFSILTIPSNLRVRELDLTAWRIQPSPDTDPAADCFRNTSLHLSFTEWRSPLVQIQDFGQRDFDVNIIEAIVSVRDSGEWVADVDIEAAINDPKLHRPSDCQDARGHCPEVRKFSAEIPENILLETWDQILDVPEGSVIIRCSNNWLARLALVSVLSKHSRMMQSSIMLCRDSCGLECRGKHRHAIHIC

SEQ ID NO: 27613 - DNA, 2376 bp, Muscodor strobelii
  misc_feature: SGI cDNA ID NO. 569461
  misc_feature: Encodes the peptide sequence at SEQ ID NO 27614
atgagtgccactcctgagcatagtgcacagacgcttctcgcaatgttgcgcgaaacggcgcatcgtcgtgcatcagatgacagagataaggcttatgcggtatttggtcttgcagcagactgtctaaagctgtttccagactacaacgttaaagttggaacagcattatgtcaggttgcacgcgctatcatacatggacagaaaggatttcgtggtcttgtccacgatctaggccgcaaaatccaacttggagtgcccacttgggtccctgattggagctccccagttgatgatagatgttctcaacggcagttaggcaccaaactgtacaatgcctctggcgaatggacttactgttgcaatcctttgtcttactcggctagagacaagaatggtgcagtagacttcgctgagatatatagaagatggtttgatgagcattctccccggcaactaccctttggtgagaaagcacgaatatggtcaaccgtaacggaggagttgaattctcttcatcactcgtcttattcgaaaaaggatacgtttgacccttcatcctacattttccagcctttacagctctggactgaagggatttgtctgggtgaggtggacaaagtatcgcctccattcttcggagatgtggaatctcgaaactttctcccgtttatcgacagaaacgactggataccaccactcgagatcagttttgatgcttcctatggctgggatgtattgttatataagtcgcctgagcgcacgattaagttacagcagcaactaagagccttagtgttggacatgaaattcgtctcgggtcattttcagaggctacacgaagaagacttgggcgctttactcgattggctcaagatgcgtacgcagggtgtaggacaaaactacgtcaaggacccattaggctttgagtccgtgctaaggataatgtcttataaacagcggctgttcacaacgactgatggaactcagggatggggtcctataagtattcagagaggagattatttattcattgttcctggctctcaagtgccctttaccctcaggaaagcagagggcaacatcgacaagtttcaagtcattggtgactgctttctgctagggtgtatggacggaaagcacagcatcccggatcctcccagcgaccttgactcttctccggttttcgagtcagcctcgtctcatataagagatattctgagaatgcgacctcgcttcgtcgattactcacgcactacccatgacgggcgctccgaaattgcaggattcccgtttgagtttggtcaacataccgcgtgcgggaactgccagggatctccatttggatttgaccagcaaaacgatagttttatgtgcattaattatctccagtatcttatcgacgaaaatcataactattgggcatctaagattaacgtcgcatcaactgatggaatggatgctgcatcttatattctgcgtcagtacaatgtcggtgagtctcagctgcacatcaatcacccgctcgtccaagctacaatcatctccttcaccgcatacttcattggaactaatcgagactatccaaccttccccaacaaaaagcctggagtcgctcatccagctacagaaacattttttaacttcacctgtcatcggttcatcagttacattatggctactacagcgtcacctgagaagactgcgcttcttcttgtcaacatccagcaaggctacaacgacccaagctactggggtagctcgcgatccacccccgagttcgagaccaacgttgccaagctcctcaacgcgtttcgcagcgccccaaacacccttataatccacatccagcacaagtgcatggatcctgactctcctctgcatcccagcaagcctggtgccgaattcatggactacgccaagccgcagggctccgagcagatcctttacactgtcaacaatgcgcctttcattgtgcacgacctcgcgtctgtgatctcacacgccggcggcgccacgaagctcgtcgttgttggccttaccacagcccatcgcgtcactactactatacgcaccgggcgggacattggagtccttggacaaggtggtgatggatggtacagaggagatgctcccgctgagcagggccagattgtagttgtgaatgatgcaactgcaactttccttgtgaactacggcggcaaggaatatgatgctgagactgtgcaagctgttcatatcgctagtctgatgcaggggatctgtgacgttgagaatactgttgaggtcattcatcacctgcgtgtgaaggcaaacatggagactgcgggtcagggctcaagttgccagggtgtcaaggtcggaattaggaagcgatga

SEQ ID NO: 27614 - protein, 791 aa, Muscodor strobelii
  misc_feature: SGI Peptide ID NO. 569461
  misc_feature (567)..(766): NCBI GI: 119472566 Blast Desc: isochorismatase family hydrolase, [Neosartorya fischeri NRRL 181] gi|119406518|gb|EAW16469.1| isochorismatase family hydrolase, [Neosartorya fischeri NRRL 181]
  misc_feature (567)..(767): NCBI GI: 169779928 Blast Desc: [Aspergillus oryzae RIB40] gi|83773168|dbj|BAE63295.1| protein product [Aspergillus oryzae]
  misc_feature (567)..(766): NCBI GI: 121700018 Blast Desc: isochorismatase family hydrolase, [Aspergillus clavatus NRRL 1] gi|119396416|gb|EAW06848.1| isochorismatase family hydrolase, [Aspergillus clavatus NRRL 1]
  misc_feature (567)..(766): NCBI GI: 255931941 Blast Desc: Pc12g06890 [Penicillium chrysogenum Wisconsin 54-1255] gi|211582146|emb|CAP80316.1| Pc12g06890 [Penicillium chrysogenum Wisconsin 54-1255]
  misc_feature (555)..(767): NCBI GI: 212545014 Blast Desc: isochorismatase family hydrolase, [Penicillium marneffei ATCC 18224] gi|210065630|gb|EEA19724.1| isochorismatase family hydrolase, [Penicillium marneffei ATCC 18224]
  misc_feature (567)..(767): NCBI GI: 238506056 Blast Desc: isochorismatase family hydrolase, [Aspergillus flavus NRRL3357] gi|220690344|gb|EED46694.1| isochorismatase family hydrolase, [Aspergillus flavus NRRL3357]
  misc_feature (567)..(749): NCBI GI: 145245539 Blast Desc: An11g10800 [Aspergillus niger] gi|134079741|emb|CAK40878.1| protein product [Aspergillus niger]
  misc_feature (567)..(767): NCBI GI: 67525943 Blast Desc: AN3429.2 [Aspergillus nidulans FGSC A4] gi|40743718|gb|EAA62906.1| AN3429.2 [Aspergillus nidulans FGSC A4] gi|259485582|tpe|CBF82725.1| TPA: isochorismatase family FGSC
  misc_feature (568)..(766): NCBI GI: 124009245 Blast Desc: isochorismatase [Microscilla marina ATCC 23134] gi|123985127|gb|EAY25066.1| isochorismatase [Microscilla marina ATCC 23134]
  misc_feature (567)..(767): NCBI GI: 238841591 Blast Desc: isochorismatase hydrolase [Microsporum canis CBS 113480]
MSATPEHSAQTLLAMLRETAHRRASDDRDKAYAVFGLAADCLKLFPDYNVKVGTALCQVARAIIHGQKGFRGLVHDLGRKIQLGVPTWVPDWSSPVDDRCSQRQLGTKLYNASGEWTYCCNPLSYSARDKNGAVDFAEIYRRWFDEHSPRQLPFGEKARIWSTVTEELNSLHHSSYSKKDTFDPSSYIFQPLQLWTEGICLGEVDKVSPPFFGDVESRNFLPFIDRNDWIPPLEISFDASYGWDVLLYKSPERTIKLQQQLRALVLDMKFVSGHFQRLHEEDLGALLDWLKMRTQGVGQNYVKDPLGFESVLRIMSYKQRLFTTTDGTQGWGPISIQRGDYLFIVPGSQVPFTLRKAEGNIDKFQVIGDCFLLGCMDGKHSIPDPPSDLDSSPVFESASSHIRDILRMRPRFVDYSRTTHDGRSEIAGFPFEFGQHTACGNCQGSPFGFDQQNDSFMCINYLQYLIDENHNYWASKINVASTDGMDAASYILRQYNVGESQLHINHPLVQATIISFTAYFIGTNRDYPTFPNKKPGVAHPATETFFNFTCHRFISYIMATTASPEKTALLLVNIQQGYNDPSYWGSSRSTPEFETNVAKLLNAFRSAPNTLIIHIQHKCMDPDSPLHPSKPGAEFMDYAKPQGSEQILYTVNNAPFIVHDLASVISHAGGATKLVVVGLTTAHRVTTTIRTGRDIGVLGQGGDGWYRGDAPAEQGQIVVVNDATATFLVNYGGKEYDAETVQAVHIASLMQGICDVENTVEVIHHLRVKANMETAGQGSSCQGVKVGIRKR

SEQ ID NO: 27615 - DNA, 1911 bp, Muscodor strobelii
  misc_feature: SGI cDNA ID NO. 569462
  misc_feature: Encodes the peptide sequence at SEQ ID NO 27616
atgacacaagcaatcactctgagtgccctcgccctccgagtcatcgtctcagttcagactgctgcttgtacttcgatgatcgcgtctttagtcttggagaaaagactcgttcaacagtcgtatgcgccgttcttctccatattgcgtggcataaacaacggcccgcggaaactcctaagactcatgatatggtccgggccatcgatgtttgagcttgtagagttctggctgctcttgtttgctttcttgggttcgttggcgcttcaattttcatcgacgattctcatatccgacttggccgatatcacgaccataggtgacataacgccggcacaagtgcccagcctcgtggcgtacaacaaagacacatttgactttcgattagtttcaggctttattaaccgagtccctctctatcaaatgttcgccgaagttccgtccgactctgacgcaaccccgaacttcaagggactaagtgatacgggactcgtacagcgaggttttctgccacaagtagagagcgatgagcgtaccgctatcagacaatatgatggaaatctactgactatgaactcacgtgttgcctgcgtccggcctaacatggatatatcctatgctagtcaggaagtcgcagctgacacggactatcgtatcataaagggacggcttcactacctagcaagccttgaggccgcaggagtaccaactgaatcgttgtgtacctcatctgaatgtgaggaagtcccctttgaatgcacactgccgttcacgcggaacaaagaaaatagttggcaatccgagacttgcatccttggaggagtttggggtgactggggaggtattgatctgaaccctaaatgggatcctacagagggaccttgggcgcgaaattcgagcatttatcttgtttattcttcaaacttgcgaagaactgactgggagacggttcccaagagcggcaaattcgagtcgaacacgacttatgaagagtggatcagctttgaaccggtcaatgatcatcgccttaacataacagtgtgttttgcagccttcaacatggaccgccaatctgtccatcttactgcgggaagcacccttgaagaacctgagacaaactggactctaatcaatgacgattatgacacttccaatgttcaaaggttccttggtgttgacgtatcccgtggctcacatggagagaggaagatactcaccatgaataacttgggccagccggatgacggacctgccgatggcccggcctacgaaaatgtcgttctaaacggcattcgcggggctgagaaccataccatttccgacttgacagttagagtcttagaagagctggtcgattatgctctatccgaagacgagaatgctaactcaacccttctactttgcttggcttgcgatggattagctgatttacaacatccagtgattgccatgctcttcacggatattattgctgcaactggtcgagcagccaatgcgttatcgagctatatgacagtgattgcctcaacgtggtacgacgcgtacaggagttctctgcagcagacgcaaaacgcgacaatggtaacaactaaggtcgtgcgggccccaaaccgaggtcgtggcggattttggactgtcattgctcttatcatactccatttgacctacgtggccgcaatatcagttctgtttgctcggcaagtccagtactcacgactagacaacatttggcatactgtgtcacagctcatgactggagatatggcggcgcctctcgaaacgggaaatgatgcatgcgaccgatcagtcacgaagttcctcagagctcaaaatgatgaaggcgtgaaattggagagagtacctgccacgggaagagtcgagatgatccgaactctgtcacatactcatacgtag

SEQ ID NO: 27616 - protein, 636 aa, Muscodor strobelii
  misc_feature: SGI Peptide ID NO. 569462
  misc_feature (1)..(628): NCBI GI: 145605162 Blast Desc: MGG_02132 [Magnaporthe grisea 70-15] gi|145013020|gb|EDJ97661.1| MGG_02132 [Magnaporthe grisea 70-15]
  misc_feature (2)..(627): NCBI GI: 119474385 Blast Desc: NFIA_005330 [Neosartorya fischeri NRRL 181] gi|119407221|gb|EAW17171.1| conserved [Neosartorya fischeri NRRL 181]
  misc_feature (3)..(606): NCBI GI: 46139113 Blast Desc: FG11071.1 [Gibberella zeae PH-1]
  misc_feature (2)..(584): NCBI GI: 256722986 Blast Desc: NECHADRAFT_52602 [Nectria haematococca mpVI 77-13-4]
  misc_feature (3)..(196): NCBI GI: 119482479 Blast Desc: NFIA_093340 [Neosartorya fischeri NRRL 181] gi|119409422|gb|EAW19371.1| [Neosartorya fischeri NRRL 181]
  misc_feature (304)..(608): NCBI GI: 119482479 Blast Desc: NFIA_093340 [Neosartorya fischeri NRRL 181] gi|119409422|gb|EAW19371.1| [Neosartorya fischeri NRRL 181]
  misc_feature (6)..(223): NCBI GI: 256726575 Blast Desc: NECHADRAFT_79667 [Nectria haematococca mpVI 77-13-4]
  misc_feature (3)..(201): NCBI GI: 256733978 Blast Desc: NECHADRAFT_77642 [Nectria haematococca mpVI 77-13-4]
MTQAITLSALALRVIVSVQTAACTSMIASLVLEKRLVQQSYAPFFSILRGINNGPRKLLRLMIWSGPSMFELVEFWLLLFAFLGSLALQFSSTILISDLADITTIGDITPAQVPSLVAYNKDTFDFRLVSGFINRVPLYQMFAEVPSDSDATPNFKGLSDTGLVQRGFLPQVESDERTAIRQYDGNLLTMNSRVACVRPNMDISYASQEVAADTDYRIIKGRLHYLASLEAAGVPTESLCTSSECEEVPFECTLPFTRNKENSWQSETCILGGVWGDWGGIDLNPKWDPTEGPWARNSSIYLVYSSNLRRTDWETVPKSGKFESNTTYEEWISFEPVNDHRLNITVCFAAFNMDRQSVHLTAGSTLEEPETNWTLINDDYDTSNVQRFLGVDVSRGSHGERKILTMNNLGQPDDGPADGPAYENVVLNGIRGAENHTISDLTVRVLEELVDYALSEDENANSTLLLCLACDGLADLQHPVIAMLFTDIIAATGRAANALSSYMTVIASTWYDAYRSSLQQTQNATMVTTKVVRAPNRGRGGFWTVIALIILHLTYVAAISVLFARQVQYSRLDNIWHTVSQLMTGDMAAPLETGNDACDRSVTKFLRAQNDEGVKLERVPATGRVEMIRTLSHTHT

SEQ ID NO: 27617 - DNA, 670 bp, Muscodor strobelii
  misc_feature: SGI EST ID NO. CUFF.65116.0
  misc_feature: Variant of the nucleotide sequence at SEQ ID NO 27615
cgaaaatgtcgttctaaacggcattcgcggggctgagaaccataccatttccgacttgacagttagagtcttagaagagctggtcgattatgctctatccgaagacgagaatgctaactcaacccttctactttgcttggcttgcgatggattagctgatttacaacatccagtgattgccatgctcttcacggatattattgctgcaactggtcgagcagccaatgcgttatcgagctatatgacagtgattgcctcaacgtggtacgacgcgtacaggagttctctgcagcagacgcaaaacgcgacaatggtaacaactaaggtcgtgcgggccccaaaccgaggtcgtggcggattttggactgtcattgctcttatcatactccatttgacctacgtggccgcaatatcagttctgtttgctcggcaagtccagtactcacgactagacaacatttggcatactgtgtcacagctcatgactggagatatggcggcgcctctcgaaacgggaaatgatgcatgcgaccgatcagtcacgaagttcctcagagctcaaaatgatgaaggcgtgaaattggagagagtacctgccacgggaagagtcgagatgatccgaactctgtcacatactcatacgtaggcttgaatctcaggttttgttgag

SEQ ID NO: 27618 - DNA, 777 bp, Muscodor strobelii
  misc_feature: SGI cDNA ID NO. 569463
  misc_feature: Elevated expression when VOC is produced
  misc_feature: Encodes the peptide sequence at SEQ ID NO 27619
atgcattacgccctcatcctcgcttcatccttggccattggcgtttcggggacgcccaagcccatgatcacgccagcacctaagcgcctcgcggcacgagacggcctacctgcatcatcaggtagctcgacattcgcgtcagtgtacacagtcgcggcaggcgagtccttcgatggcggcttggtaatgtacgatcgcggtgtcagctgcacaggccaagaggagggtggagatagcgatgccgtctttgagatcgaagacggcggcagtctatccaacgtcattatcggtcccaatcagattgagggtgtgcactgcttcggtgcatgcacgctcacgaacgtctggtggtctgctgtatgcgaggacgctttcacggttaaggagcaggacgctggcgacacgacctacatcaacggcggtggggcctatggtgccgaggacaaggttcttcaacacaatggaggcggtaccatcagtgtctcgggattcaccgttgacgatttcggcaagctgtaccgcagctgtggaaactgtgacgaacagaccgagcgccatgtcattcttgacagcatcaccgcctcgagcggctcggcacttgttggtatcaactctaactacggtgacacggcgactttctccaatattgtcgtcgacgatgtgaacgacatctgcgttgaatacgaaggcaacgatactggtgacgagcccgagaagatcagctcaggcccctcgtcgtactgcctttacgacgatagtgatatcagcggagagtag

SEQ ID NO: 27619 - protein, 258 aa, Muscodor strobelii
  misc_feature: SGI Peptide ID NO. 569463
  misc_feature (28)..(239): Pfam Id: PF03211 Pfam Desc: Pectate lyase
  misc_feature (34)..(256): NCBI GI: 154301984 Blast Desc: BC1G_10229 [Botryotinia fuckeliana B05.10] gi|150855621|gb|EDN30813.1| BC1G_10229 [Botryotinia fuckeliana B05.10]
  misc_feature (1)..(240): NCBI GI: 46115742 Blast Desc: FG03713.1 [Gibberella zeae PH-1]
  misc_feature (37)..(242): NCBI GI: 256725288 Blast Desc: NECHADRAFT_8181 [Nectria haematococca mpVI 77-13-4]
  misc_feature (36)..(252): NCBI GI: 67524169 Blast Desc: AN2542.2 [Aspergillus nidulans FGSC A4] gi|40745491|gb|EAA64647.1| AN2542.2 [Aspergillus nidulans FGSC A4] gi|259487973|tpe|CBF87063.1| TPA: pectate lyase (Eurofung)
  misc_feature (5)..(250): NCBI GI: 67902932 Blast Desc: AN8453.2 [Aspergillus nidulans FGSC A4] gi|40747919|gb|EAA67075.1| AN8453.2 [Aspergillus nidulans FGSC A4] gi|95025961|gb|ABF50894.1| pectate lyase [Emericella TPA: ;
  misc_feature (1)..(252): NCBI GI: 115399748 Blast Desc: ATEG_06285 [Aspergillus terreus NIH2624] gi|114191129|gb|EAU32829.1| ATEG_06285 [Aspergillus terreus NIH2624]
  misc_feature (36)..(252): NCBI GI: 119483128 Blast Desc: pectate lyase, [Neosartorya fischeri NRRL 181] gi|119409747|gb|EAW19695.1| pectate lyase, [Neosartorya fischeri NRRL 181]
  misc_feature (36)..(252): NCBI GI: 70986762 Blast Desc: pectate lyase [Aspergillus fumigatus Af293] gi|66846500|gb|EAL86832.1| pectate lyase, [Aspergillus fumigatus Af293] gi|159123359|gb|EDP48479.1| pectate lyase, [Aspergillus
  misc_feature (3)..(252): NCBI GI: 189189404 Blast Desc: pectate lyase [Pyrenophora tritici-repentis Pt-1C-BFP] gi|187972647|gb|EDU40146.1| pectate lyase [Pyrenophora tritici-repentis Pt-1C-BFP]
  misc_feature (1)..(250): NCBI GI: 46111009 Blast Desc: FG02386.1 [Gibberella zeae PH-1]
  misc_feature (36)..(177): SWISSPROT Homolog: EC 4.2.2.2 Pectate lyase
  misc_feature (36)..(177): SWISSPROT Homolog: EC 4.2.2.10 Pectin lyase
  misc_feature: Useful for introducing or modulating the production of volatile compounds
MHYALILASSLAIGVSGTPKPMITPAPKRLAARDGLPASSGSSTFASVYTVAAGESFDGGLVMYDRGVSCTGQEEGGDSDAVFEIEDGGSLSNVIIGPNQIEGVHCFGACTLTNVWWSAVCEDAFTVKEQDAGDTTYINGGGAYGAEDKVLQHNGGGTISVSGFTVDDFGKLYRSCGNCDEQTERHVILDSITASSGSALVGINSNYGDTATFSNIVVDDVNDICVEYEGNDTGDEPEKISSGPSSYCLYDDSDISGE

SEQ ID NO: 27620 - DNA, 2188 bp, Muscodor strobelii
  misc_feature: SGI EST ID NO. CUFF.65128.0
  misc_feature: Variant of the nucleotide sequence at SEQ ID NO 27618
tagtctcaagatttctgtcaagactcaggcatacccctcatcgtcaccctcgctctttcatcgtatagacacgcttcatacaagacggtctcatagacgtggaacactcatatagatgtgacatcaagatatgggttcttccacccatctctgggatcgttcgatacacaacagcctcgaacgatcaatagcactgctcctcacagctagcgaagaagtgccaagccaacgacggccttggcgatgtctcagaaaacacgaggatcaatatagaattgggtgactatgactctcatgacgagtccctttgttcgtgatcatcatccgtcatatttatatttcaattgctgttcctgcgcgtaaaaatcccacctcttagcatcgaccgccaaggtcgatcactgctcccggcgccaagtattcccaggcgccatgcgcggtgtccttgcgtcctgaaaacccgacaatcagaccgccaggaacgagccggcagcctactgcgcggaccgggacagacgcggggacagagcaggcatgatgccgatctcgtgcccacatgctctccttaataggacctgatcgtcgcatgtatttagagttattgacgtctttctccaactcatgtgttactgttgctgccgtcggctctacaatctttagtatttgttcgatctggacaaatatcagacagcatatgaaccatgaagtatagctggcggcggcatggacctggcgagtactctgtctatcagagcgagactgcctctcccgagactaggccgaatcctctccactgctcgcatgatttttctgggtctactactcaccggccgttacaggtgcctagcaaaaggactactaacatccctggccgatttgtttggaatagacgactgcctcgtcaagagtgacagtggaaatgattgggtcaaaagaggcacggctccgggttgaccgcaactacgagcctccatcgtcgtcgtcaccaatatagtcaatctgatgacgatctcacggagccatattcgaatccgaagaaattgttaccctctcggtagtccactgcctgatgggaagggaggaggtcatgtataagtagaccatcgccgtcaatgtcaagaggcttcatgtctcttctcactatcaccgagcactttcacactcgtcagtgatcccaccagcttactcttgtccagtcgcttcaatcttcgtacttcttattacagatcgccatcaagatgcattacgccctcatcctcgcttcatccttggccattggcgtttcggggacgcccaagcccatgatcacgccagcacctaagcgcctcgcggcacgagacggcctacctgcatcatcaggtagctcgacattcgcgtcagtgtacacagtcgcggcaggcgagtccttcgatggcggcttggtaatgtacgatcgcggtgtcagctgcacaggccaagaggagggtggagatagcgatgccgtctttgagatcgaagacggcggcagtctatccaacgtcattatcggtcccaatcagattgagggtgtgcactgcttcggtgcatgcacgctcacgaacgtctggtggtctgctgtatgcgaggacgctttcacggttaaggagcaggacgctggcgacacgacctacatcaacggcggtggggcctatggtgccgaggacaaggttcttcaacacaatggaggcggtaccatcagtgtctcgggattcaccgttgacgatttcggcaagctgtaccgcagctgtggaaactgtgacgaacagaccgagcgccatgtcattcttgacagcatcaccgcctcgagcggctcggcacttgttggtatcaactctaactacggtgacacggcgactttctccaatattgtcgtcgacgatgtgaacgacatctgcgttgaatacgaaggcaacgatactggtgacgagcccgagaagatcagctcaggcccctcgtcgtactgcctttacgacgatagtgatatcagcggagagtagagggtaaatcgcattcggcagctgccgtcggttggatatagaagaacagccatttattgtgtgcgaatcagcacgattgagaggacaccaattgagttcgattgaatgaaagacagtctaggtcgttatgaatgccagcgcagtatgtcaagaataagaatgaacactatgac

SEQ ID NO: 27621 - DNA, 1467 bp, Muscodor strobelii
  misc_feature: SGI cDNA ID NO. 569464
  misc_feature: Encodes the peptide sequence at SEQ ID NO 27622
atgactcgaacacaacctgaggtcattgtgcataaattgacaagattgacggaattgtccaaagaagaaggtcaaatagcgaatattgccacgaagaaaaacaaggtacgcagcgagacaattgctggcattgtccaaccaccaattcgcttagacaaaaatcgaagccgggtcaattggaaacccgaaacggctctgctcagaatcttcaaattccgaagtacttgcaccggatacataattgcagtcgaacctcctgcgtggatttcgaacgtcgctttgaggttgatctacgctagatcattgggagcatgggattatactttcaattcttatgttatacggccgctagattctgaagtcttccaggtggtcgctcatggcgaaccatgcgacctcataagactcttcgcagacggacaggcgtctccatatgataaggcgatagacggatcgacgctcgcacatgttgcggctcgcaatttcaacataagtatattggtgtttctactaggtcttcaaaataactcttgggagccagatgatcaaggactatatcccctagcaactactttgcatcttgagggcactcacaaagaagccgatatttttatctccgagctcttatcatacaatcgtgtacttcaaaagtacttgatagtgactagtgccgatgaagatatcttggctcagagccgcttcttgagtccatacgagattgactcgaatagctacatttcaaggtccatggcagccctgaaggatatgtatgcctcccgatggtatttgcccaagatcttcgaacaagtgtggatagacgacgtggatcgatcatgggatcgctccgtgatcgtgaccgccgtgcccactataccccttgccattgcattagctgaaatgaactgcattcatggatgctcaaaatgcgccactcggggattagagcaaagcttctggtcatcttggctcaaggaggtcttgagcaagacacccgacctccatcaaaggcattgggacttgactatgggcccaaaggggaagatcttgactacctttacacggctgatattggctttacttcacagcatggtacacaggagatcaggaagatggtggcgggaatatttccaaggaaccatcaagctttggcttaaagagctgcagtataacgacgttgaccttcaagagtttggtcggcgtgaggtggaaatactgagcgacgaagcgacataccgtgatatgcttgcagccgtgatgtttccacggagacaagatcttccattcacctattacaatgcagaattccgtctgattgggcttcgctacggccctcagcccgaagactgggaagtgttcctgggcgagtgcacggattcgtttgccggcgacttctggaacctgctggagggttctagctgtggcattcctggtacctggggtgatttggttgagcatgaagggccataa

SEQ ID NO: 27622 - protein, 488 aa, Muscodor strobelii
  misc_feature: SGI Peptide ID NO. 569464
  misc_feature (101)..(482): NCBI GI: 256734679 Blast Desc: NECHADRAFT_75185 [Nectria haematococca mpVI 77-13-4]
  misc_feature (71)..(481): NCBI GI: 154317802 Blast Desc: [Botryotinia fuckeliana B05.10] gi|150843542|gb|EDN18735.1| [Botryotinia fuckeliana B05.10]
  misc_feature (74)..(171): NCBI GI: 67524293 Blast Desc: AN2604.2 [Aspergillus nidulans FGSC A4] gi|40745553|gb|EAA64709.1| [Aspergillus nidulans FGSC A4] gi|259488041|tpe|CBF87183.1| TPA: conserved [Aspergillus nidulans
  misc_feature (86)..(176): NCBI GI: 256724871 Blast Desc: NECHADRAFT_77012 [Nectria haematococca mpVI 77-13-4]
  misc_feature (69)..(173): NCBI GI: 261359203 Blast Desc: [Verticillium albo-atrum VaMs.102]
  misc_feature (433)..(481): NCBI GI: 261359910 Blast Desc: [Verticillium albo-atrum VaMs.102]
MTRTQPEVIVHKLTRLTELSKEEGQIANIATKKNKVRSETIAGIVQPPIRLDKNRSRVNWKPETALLRIFKFRSTCTGYIIAVEPPAWISNVALRLIYARSLGAWDYTFNSYVIRPLDSEVFQVVAHGEPCDLIRLFADGQASPYDKAIDGSTLAHVAARNFNISILVFLLGLQNNSWEPDDQGLYPLATTLHLEGTHKEADIFISELLSYNRVLQKYLIVTSADEDILAQSRFLSPYEIDSNSYISRSMAALKDMYASRWYLPKIFEQVWIDDVDRSWDRSVIVTAVPTIPLAIALAEMNCIHGCSKCATRGLEQSFWSSWLKEVLSKTPDLHQRHWDLTMGPKGKILTTFTRLILALLHSMVHRRSGRWWREYFQGTIKLWLKELQYNDVDLQEFGRREVEILSDEATYRDMLAAVMFPRRQDLPFTYYNAEFRLIGLRYGPQPEDWEVFLGECTDSFAGDFWNLLEGSSCGIPGTWGDLVEHEGP

SEQ ID NO: 27623 - DNA, 1266 bp, Muscodor strobelii
  misc_feature: SGI cDNA ID NO. 569465
  misc_feature: Encodes the peptide sequence at SEQ ID NO 27624
atggctccgacaaattacgaaccggcggctcctcgggcccgacgcaccgcgggcaaagcaacgagtatgagaggattgagcttggacgatttgctgttcgacttcaaatcggcgaaggaacttctatatctcttcgtagttcctctgaagtctcgaagcggcaaacttgggagctccccactgccgatcccacatcacactgagggcaatctcagctcggttgagcaggttcctgcccttgccgctaccacaactcgcgacacagtcacgttgcgattggaggatattgagattgatgtctcacaaagccccgagcagcctaagccatctatggtccagaagaaaaccacgctatgcagtctacccaccgagctacagctgctcgtgatatctttcctcgatattgaggatgctgtacccctgctaatgaccaatacgtacttcttctcgttcgcccctgctatgctcgaacaatactgcctctcgggttggggacaatgggcaggtaaacacttcgtcattgtgaacgaacatgtcctgcctggtgactatccacctggattgttctctgccgaagaaattgaggctttcaaccaaatggatacaccgaagggtgacgatatgggcgatgatacagatgttgattcagatgccgatctaccattcaccttctacgatcttacacgttaccctctctctcaaaaagagtcttccgaaggtgatactgtagatacagtcattgagtctatagaacgttgtcgagaagatccagcctatcgtcatattgcggtccttctaaaacgccagctcaagggcttcaagggccgccactttccactcgatcaatcgtgggttcttcgcaatctaacgacaaaggagttcgttcgggccgaatcactcgcacttgacccagacgatgttgaaggctaccacatctcagtcctagggtttggagaggtactcgcattacgcacagtctggcagtcctgcaagcctaagcaactcaacagagtgccgggtttttcgccacgcggaaagtgggcaggccatcggttcgatatcacaacgctcgagagacatgaggctacgaccctcggagagaattggagcgatgctagcgacgaagtagcaaaagatattgccaagacatgggagttcaaatatggtgtcgagtggcgcgatatcgtttgcgacaagcactgggcattcacacaagaactctccaaggttcgcttctttgggcacccctacttcaaaatgagctag

SEQ ID NO: 27624 - protein, 421 aa, Muscodor strobelii
  misc_feature: SGI Peptide ID NO. 569465
  misc_feature (111)..(349): NCBI GI: 171693581 Blast Desc: protein product [Podospora anserina] gi|170946739|emb|CAP73543.1| protein product [Podospora anserina]
  misc_feature (25)..(397): NCBI GI: 240280946 Blast Desc: conserved [Ajellomyces capsulatus H143]
  misc_feature (37)..(399): NCBI GI: 225554923 Blast Desc: conserved [Ajellomyces capsulatus G186AR]
  misc_feature (84)..(399): NCBI GI: 238843779 Blast Desc: conserved [Microsporum canis CBS 113480]
  misc_feature (25)..(399): NCBI GI: 225557266 Blast Desc: conserved [Ajellomyces capsulatus G186AR]
  misc_feature (37)..(393): NCBI GI: 261196163 Blast Desc: conserved [Ajellomyces dermatitidis SLH14081] gi|239587618|gb|EEQ70261.1| conserved [Ajellomyces dermatitidis SLH14081]
  misc_feature (37)..(393): NCBI GI: 239614574 Blast Desc: conserved [Ajellomyces dermatitidis ER-3]
  misc_feature (98)..(394): NCBI GI: 258567030 Blast Desc: [Uncinocarpus reesii 1704] gi|237905705|gb|EEP80106.1| [Uncinocarpus reesii 1704]
  misc_feature (99)..(392): NCBI GI: 119174833 Blast Desc: [Coccidioides immitis RS]
  misc_feature (101)..(394): NCBI GI: 119177310 Blast Desc: [Coccidioides immitis RS]
MAPTNYEPAAPRARRTAGKATSMRGLSLDDLLFDFKSAKELLYLFVVPLKSRSGKLGSSPLPIPHHTEGNLSSVEQVPALAATTTRDTVTLRLEDIEIDVSQSPEQPKPSMVQKKTTLCSLPTELQLLVISFLDIEDAVPLLMTNTYFFSFAPAMLEQYCLSGWGQWAGKHFVIVNEHVLPGDYPPGLFSAEEIEAFNQMDTPKGDDMGDDTDVDSDADLPFTFYDLTRYPLSQKESSEGDTVDTVIESIERCREDPAYRHIAVLLKRQLKGFKGRHFPLDQSWVLRNLTTKEFVRAESLALDPDDVEGYHISVLGFGEVLALRTVWQSCKPKQLNRVPGFSPRGKWAGHRFDITTLERHEATTLGENWSDASDEVAKDIAKTWEFKYGVEWRDIVCDKHWAFTQELSKVRFFGHPYFKMS

SEQ ID NO: 27625 - DNA, 1176 bp, Muscodor strobelii
  misc_feature: SGI cDNA ID NO. 569466
  misc_feature: Elevated expression when VOC is produced
  misc_feature: Encodes the peptide sequence at SEQ ID NO 27626
atggctccactctccaatctcgagcaagactcccttatgcggcgggtgttggaccaactccgaggctccgcgtatgcctgctctaagttgactaagttaagcggtggcacagccaatttcctctaccgtggcacgctagagcgacctctcgcagatgcaaagaccatcattgtcaaggtctcgaccagttttgttgcgatcaatcgcgatttccccctcgacattagccgatgtttgtttgagaagtccatgcttgaagccctggccgggtttcgacggacgatctccgttccgggcggccatgttattgtgcaagccccaaacatctactcttttgattcacaaactcatacgcaagtgcttgaggatttcacagacacgattgacttaaccaccattctccaatcaccctccgtgtctcttaccctcccggggcagagtgcggaaggcatcggtcattctatcggctcctggctccgcttgtttcacgcctgggcgtcggaccctgcccagagtaccctgttagcagaaatcgggccaaacgagggcatgcgtaaattgaaatgtcttatcacgtatgacagctttatcgagattcttgaacggcatccggaagtcatcgggaatcacatggacacattgcgggagatccaggttgccatgcagcacgagtttagtcggccacatactgttcaggacgacgagacacgtggtttgattcacggagatttctggggtgggaacgtgttgctaccgaatggcccatggcgtggattgggggatcaagtagactcgtccaatatcttcgtcatcgactgggaaaatgtgcagtatggacatcgcgcagtggatattggcggcatgttgggtgatctatacgaacgaaatcatttctcgggggttaaggaaagcataccgattatgcaaggcttcatcagaggctacggtcccttaaacgccgatctcgcctatcgtgtagccattcatgcaggcgtacagctgatatgctggtactaccgtcgcgatcggaatgctccattacctcatccactgcctagagtattagacgcattgaccttgggaagagacttgatcgtcagaggctgggcgaaagatagggcatggctgcgtagtagtatactggcacccatgttcaccgacgagaatctgttatag

SEQ ID NO: 27626 - protein, 391 aa, Muscodor strobelii
  misc_feature: SGI Peptide ID NO. 569466
  misc_feature (4)..(388): NCBI GI: 238845507 Blast Desc: conserved [Microsporum canis CBS 113480]
  misc_feature (16)..(388): NCBI GI: 145238810 Blast Desc: An07g09780 [Aspergillus niger] gi|134076551|emb|CAK39743.1| [Aspergillus niger]
  misc_feature (16)..(385): NCBI GI: 119496349 Blast Desc: NFIA_017520 [Neosartorya fischeri NRRL 181] gi|119413110|gb|EAW23051.1| conserved [Neosartorya fischeri NRRL 181]
  misc_feature (8)..(386): NCBI GI: 121702357 Blast Desc: conserved [Aspergillus clavatus NRRL 1] gi|119397586|gb|EAW08017.1| conserved [Aspergillus clavatus NRRL 1]
  misc_feature (5)..(385): NCBI GI: 255934110 Blast Desc: Pc12g15340 [Penicillium chrysogenum Wisconsin 54-1255] gi|211582955|emb|CAP81161.1| Pc12g15340 [Penicillium chrysogenum Wisconsin 54-1255]
  misc_feature (16)..(385): NCBI GI: 70991236 Blast Desc: conserved [Aspergillus fumigatus Af293] gi|66848099|gb|EAL88429.1| conserved [Aspergillus fumigatus Af293] gi|159130940|gb|EDP56053.1| conserved [Aspergillus A1163]
  misc_feature (16)..(377): NCBI GI: 212526096 Blast Desc: conserved [Penicillium marneffei ATCC 18224] gi|210072603|gb|EEA26690.1| conserved [Penicillium marneffei ATCC 18224]
  misc_feature (16)..(376): NCBI GI: 242780000 Blast Desc: conserved [Talaromyces stipitatus ATCC 10500] gi|218719650|gb|EED19069.1| conserved [Talaromyces stipitatus ATCC 10500]
  misc_feature (20)..(385): NCBI GI: 67516111 Blast Desc: AN0337.2 [Aspergillus nidulans FGSC A4] gi|40746587|gb|EAA65743.1| [Aspergillus nidulans FGSC A4] gi|259489429|tpe|CBF89694.1| TPA: conserved [Aspergillus nidulans
  misc_feature (1)..(385): NCBI GI: 242778097 Blast Desc: conserved [Talaromyces stipitatus ATCC 10500] gi|218722789|gb|EED22207.1| conserved [Talaromyces stipitatus ATCC 10500]
  misc_feature: Useful for introducing or modulating the production of volatile compounds
MAPLSNLEQDSLMRRVLDQLRGSAYACSKLTKLSGGTANFLYRGTLERPLADAKTIIVKVSTSFVAINRDFPLDISRCLFEKSMLEALAGFRRTISVPGGHVIVQAPNIYSFDSQTHTQVLEDFTDTIDLTTILQSPSVSLTLPGQSAEGIGHSIGSWLRLFHAWASDPAQSTLLAEIGPNEGMRKLKCLITYDSFIEILERHPEVIGNHMDTLREIQVAMQHEFSRPHTVQDDETRGLIHGDFWGGNVLLPNGPWRGLGDQVDSSNIFVIDWENVQYGHRAVDIGGMLGDLYERNHFSGVKESIPIMQGFIRGYGPLNADLAYRVAIHAGVQLICWYYRRDRNAPLPHPLPRVLDALTLGRDLIVRGWAKDRAWLRSSILAPMFTDENLL

SEQ ID NO: 27627 - DNA, 1433 bp, Muscodor strobelii
  misc_feature: SGI EST ID NO. CUFF.65151.0
  misc_feature: Variant of the nucleotide sequence at SEQ ID NO 27625
cacttagcaacttgatatcaattgatggtttctttgctagatattaatttctcaaactatcaatggctccactctccaatctcgagcaagactcccttatgcggcgggtgttggaccaactccgaggctccgcgtatgcctgctctaagttgactaagttaagcggtggcacagccaatttcctctaccgtggcacgctagagcgacctctcgcagatgcaaagaccatcattgtcaaggtctcgaccagttttgttgcgatcaatcgcgatttccccctcgacattagccgatgtttgtttgagaagtccatgcttgaagccctggccgggtttcgacggacgatctccgttccgggcggccatgttattgtgcaagccccaaacatctactcttttgattcacaaactcatacgcaagtgcttgaggatttcacagacacgattgacttaaccaccattctccaatcaccctccgtgtctcttaccctcccggggcagagtgcggaaggcatcggtcattctatcggctcctggctccgcttgtttcacgcctgggcgtcggaccctgcccagagtaccctgttagcagaaatcgggccaaacgagggcatgcgtaaattgaaatgtcttatcacgtatgacagctttatcgagattcttgaacggcatccggaagtcatcgggaatcacatggacacattgcgggagatccaggttgccatgcagcacgagtttagtcggccacatactgttcaggacgacgagacacgtggtttgattcacggagatttctggggtgggaacgtgttgctaccgaatggcccatggcgtggattgggggatcaagtagactcgtccaatatcttcgtcatcgactgggaaaatgtgcagtatggacatcgcgcagtggatattggcggcatgttgggtgatctatacgaacgaaatcatttctcgggggttaaggaaagcataccgattatgcaaggcttcatcagaggctacggtcccttaaacgccgatctcgcctatcgtgtagccattcatgcaggcgtacagctgatatgctggtactaccgtcgcgatcggaatgctccattacctcatccactgcctagagtattagacgcattgaccttgggaagagacttgatcgtcagaggctgggcgaaagatagggcatggctgcgtagtagtatactggcacccatgttcaccgacgagaatctgttatagacggttgaagtcttagaacggaaggacgaattgcattggaggtaaagcctgcattgaatgaagcttcggtatcatccagctacaagtcgatcgcgaatggggaagccaaatgccgataagcttccagaccaaatccgtggtgaccaatgcatcagcgaaagacaaaattgcagagacgatttttccaagacttcg

SEQ ID NO: 27628 - DNA, 1854 bp, Muscodor strobelii
  misc_feature: SGI cDNA ID NO. 569467
  misc_feature: Reduced expression when VOC is produced
  misc_feature: Encodes the peptide sequence at SEQ ID NO 27629
atgtttctcttttatctaagtagagcattattactcagcgtcgctattgaagctaccactgtgcatgcacatcatgtgcttcatgagcaaagacagtatcatacctcaggctggacgaaattgtccaaggccgacggagaattgagactgcatatgcatatcggcgtcaaaccaaggaactccgaactgggccatgaccacttgatgagcgtctcggatccgttttcagctcaatttggttcgcattggacagcgcagcaagtccacgagttcttctctcctagcatagagactgttgacgacatcaagacctggctgacctcatctggtatccctctctcgagcctccacgtgccggcgtctcgtggtctcatcaaattcgatgcgagcatcaatgaggtcgaatctctccttggtgcaaggtacgatctttggcgcaatgatggaactggagaactcggtgtaggttgcgatgagtattatgtccctcaatttctacagcaagacatagacttcgtaactcctacgatcagccttagtggcagtcgtcgaacgctcgcagcgggcaaaaagaggcgaagaagccctattccaggatacaaaatacacgctacttcgcaagacacatcagagctcgcctgttggcaatcgttgacgcctgaatgcattaaagctctgtatgacgtttccaacgcgacttcaagtattcagggcaatgagatgggcatatttgagtctggagatcagtatgcacaaggttctctggatgcattcttcacagtactagcccctaatatcccgaacgggactgcaccgatacttcaatcgattgacggtggtacagccccaacaaatggtagcggtgatggggagagcattctggacttggatattgcataccctttgatctaccctcagcaaatcaagctttaccaaactctacccacagatgtcggattatcctcactctacgtcttcgagccattcttggacgcgctcgatatggaatattgcgagacaagtaaccacaccatccctggctacaacgggacagttcaatgtggtgtctacaagccggcgaatgtgatatcgttatcgtatgagattgcagaggcatactttactccggcatacgcgaagcgacagtgccatgaattcatgaagcttggcttaatgggcacaacccttgtcttcgcctcaggtgacaacggcacgttatcaagggctggtatctacggctgccttgaggacggtgctcaaaacccgagcttcgcctctagctgcccttacgttacgtctgttggagcaacacagatagttccatttggcacagtcaacgaccccgaggtggctgtcaacccactcaacaacccttacgggtttcgagactatgcttattttgccagcggtggtggcttctccaacgtttttgccagaccgtcataccaagagaacgctgttacctcgtatctcagagacaacgcagacatactgcccccgaatagcacttacaacatgaatggtcgagccttcccagacgtggctgcaaatgggtggaagatcgccacattcttcggtacggacccaagtggcttaggcatcgaattgggaacctcggcatcagcaccgatatttgcgtcgatcattaatcgacttaacgaggagcggctagctattggaaaaggcccggtcggattcgtaaacccagtactttattcgaatcccgacatgttcaacgatataacgtcaggatataacttgggttgcaatgcgtcgacagcattcaatgcaaccgcaggatgggatcctgtaactggtctgggtgagttaaaaatcatgttccacatgctctga

SEQ ID NO: 27629 - protein, 617 aa, Muscodor strobelii
  misc_feature: SGI Peptide ID NO. 569467
  misc_feature (35)..(179): Pfam Id: PF09286 Pfam Desc: Pro-kumamolisin, activation domain
  misc_feature (6)..(608): NCBI GI: 159124483 Blast Desc: alkaline serine protease AorO, [Aspergillus fumigatus A1163]
  misc_feature (6)..(608): NCBI GI: 70992131 Blast Desc: alkaline serine protease AorO [Aspergillus fumigatus Af293] gi|74628146|sp|Q70DX9.1|SED1_ASPFU RecName: Full=Tripeptidyl-peptidase sed1; AltName: Full=Sedolisin-A; AorO,
  misc_feature (25)..(608): NCBI GI: 242819496 Blast Desc: protease S8 tripeptidyl peptidase I, [Talaromyces stipitatus ATCC 10500] gi|218713796|gb|EED13220.1| protease S8 tripeptidyl peptidase I, [Talaromyces stipitatus ATCC 10500]
  misc_feature (26)..(608): NCBI GI: 21321299 Blast Desc: aorsin [Aspergillus oryzae]
  misc_feature (26)..(608): NCBI GI: 169774229 Blast Desc: [Aspergillus oryzae RIB40] gi|94730360|sp|Q8NK92.2|AORSN_ASPOR RecName: Full=Aorsin; Flags: Precursor gi|83769445|dbj|BAE59580.1| protein product oryzae]
  misc_feature (26)..(608): NCBI GI: 238497265 Blast Desc: protease S8 tripeptidyl peptidase I, [Aspergillus flavus NRRL3357] gi|220694748|gb|EED51092.1| protease S8 tripeptidyl peptidase I, [Aspergillus flavus NRRL3357]
  misc_feature (24)..(608): NCBI GI: 212545945 Blast Desc: alkaline serine protease AorO, [Penicillium marneffei ATCC 18224] gi|210064646|gb|EEA18741.1| alkaline serine protease AorO, [Penicillium marneffei ATCC 18224]
  misc_feature (25)..(608): NCBI GI: 119471296 Blast Desc: protease S8 tripeptidyl peptidase I (cln2) [Neosartorya fischeri NRRL 181] gi|119406297|gb|EAW16248.1| protease S8 tripeptidyl peptidase I (cln2) [Neosartorya fischeri
  misc_feature (5)..(608): NCBI GI: 145228611 Blast Desc: An01g01750 [Aspergillus niger] gi|134054705|emb|CAK43546.1| protein product [Aspergillus niger]
  misc_feature (25)..(614): NCBI GI: 255950094 Blast Desc: Pc22g19110 [Penicillium chrysogenum Wisconsin 54-1255] gi|211592831|emb|CAP99199.1| Pc22g19110 [Penicillium chrysogenum Wisconsin 54-1255]
  misc_feature (29)..(608): SWISSPROT Homolog: EC 3.4.14.9 Tripeptidyl-peptidase I
  misc_feature: Useful for introducing or modulating the production of volatile compounds
MFLFYLSRALLLSVAIEATTVHAHHVLHEQRQYHTSGWTKLSKADGELRLHMHIGVKPRNSELGHDHLMSVSDPFSAQFGSHWTAQQVHEFFSPSIETVDDIKTWLTSSGIPLSSLHVPASRGLIKFDASINEVESLLGARYDLWRNDGTGELGVGCDEYYVPQFLQQDIDFVTPTISLSGSRRTLAAGKKRRRSPIPGYKIHATSQDTSELACWQSLTPECIKALYDVSNATSSIQGNEMGIFESGDQYAQGSLDAFFTVLAPNIPNGTAPILQSIDGGTAPTNGSGDGESILDLDIAYPLIYPQQIKLYQTLPTDVGLSSLYVFEPFLDALDMEYCETSNHTIPGYNGTVQCGVYKPANVISLSYEIAEAYFTPAYAKRQCHEFMKLGLMGTTLVFASGDNGTLSRAGIYGCLEDGAQNPSFASSCPYVTSVGATQIVPFGTVNDPEVAVNPLNNPYGFRDYAYFASGGGFSNVFARPSYQENAVTSYLRDNADILPPNSTYNMNGRAFPDVAANGWKIATFFGTDPSGLGIELGTSASAPIFASIINRLNEERLAIGKGPVGFVNPVLYSNPDMFNDITSGYNLGCNASTAFNATAGWDPVTGLGELKIMFHML

SEQ ID NO: 27630 - DNA, 1668 bp, Muscodor strobelii
  misc_feature: SGI cDNA ID NO. 569468
  misc_feature: Encodes the peptide sequence at SEQ ID NO 27631
atggtatacgactatgcaccatcaagcgcactatacgctgcaatctattctagcaagctacgtcaccctaacccagagttgatccagagctttgtggatgcggccgtcaaccgcgacagagcgatcgcattcattttgcgcacctacctcatcgatacagatccgcgggtaggtctcgaacagttcctgatcaactggaagcgcctgatttcactgtttgcattccctcgatatccctccccaccactgcaggactccgaattagcccaaaaagtcatcaagagagataaagtatgcttcttgactcaaagaaccggttcattcgttgatccgttaatggtggtacccatattccctgacattgatcgaaaatcgttgagcaagagtcggtgtttgagaaaaatgttagaggcctttctagatcgggaacttctcgactggctcatctcattctgccatgaaccaacgtacggtgcaactgagagtctctggcttctcagaaagtcagccctacttgcattctctagaggcttctacaaagtttctcctgtggggtcatactatctcattcataccactgaggttgacccgttggccaagccgtcattcatcgaacagtggggatcagtcagggtatcaccaccagatcacactcgtctgggaattagatccccggatcattccgccttgaccatcttgtcacacttcgcggaacctattcggtggatggatatgtcatacgaccttgccaaccaacagactagccgcaagcagttggtcgatctcccgccaacatcacagtgtacttcagtcttggggctgtggtcgatgattacagatggaatgcttaaggcatggcttcatgtacctatcggcttccgcattctcacgtaccgcacactagcgcgtaccggtaagtttctgtacggcacttcttctagtctgaatgtccaacggctgccgttcggcatgtatttgaagatgcgacctataagtggacagcctggtctggccaacgagcgtagtgccctcgatttagtccggcgattcacgaacatacccattcctcgccccttggatttcatctcgcacggttcagacgcgtatctcatcacgtcacggcttcgaggcactccaattggaatgacgatcgatactatgagcgatgatgccacagccacattagtctccgatctaagaaagcacatccagcaactccgcgcaatacccaaaacagttgctcgggactttgcaatcacggatacccgagggcaagcggtctttgatggtcgtgttgtcgtcaaagcgccgtacgatgaggagagaggcgattaccatggcccttttgcgaccgagcgagaattcaatactcttctcagatcatatcatctccctgatgttgagcataaagattcacatgcaatggttctgtcacatgccgatattaacatgcgcaatgtactcgtcgataaccgtgggaggctcactggcttggttgattgggaaatggcgggctggtaccctgagtattgggagtatacaaagactcatttcacggtaaaacgcaagtggcgatggttgatgatgatggatgacctcttcgccgaagttggcgactatagcacggaaattgagattgagagacagttgtggaattactgtgattga

SEQ ID NO: 27631 - protein, 555 aa, Muscodor strobelii
  misc_feature: SGI Peptide ID NO. 569468
  misc_feature (243)..(554): NCBI GI: 116178998 Blast Desc: CHGG_00127 [Chaetomium globosum CBS 148.51] gi|88184424|gb|EAQ91892.1| CHGG_00127 [Chaetomium globosum CBS 148.51]
  misc_feature (216)..(553): NCBI GI: 154312278 Blast Desc: BC1G_06172 [Botryotinia fuckeliana B05.10] gi|150850135|gb|EDN25328.1| BC1G_06172 [Botryotinia fuckeliana B05.10]
  misc_feature (13)..(547): NCBI GI: 149210377 Blast Desc: MGCH7_ch7g666 [Magnaporthe grisea 70-15] gi|86196621|gb|EAQ71259.1| MGCH7_ch7g666 [Magnaporthe grisea 70-15]
  misc_feature (13)..(547): NCBI GI: 145609886 Blast Desc: MGG_02902 [Magnaporthe grisea 70-15] gi|145017273|gb|EDK01636.1| MGG_02902 [Magnaporthe grisea 70-15]
  misc_feature (284)..(550): NCBI GI: 255954483 Blast Desc: Pc21g09570 [Penicillium chrysogenum Wisconsin 54-1255] gi|211589705|emb|CAP95854.1| Pc21g09570 [Penicillium chrysogenum Wisconsin 54-1255]
  misc_feature (226)..(550): NCBI GI: 225555826 Blast Desc: conserved [Ajellomyces capsulatus G186AR]
  misc_feature (324)..(553): NCBI GI: 156064235 Blast Desc: SS1G_00125 [Sclerotinia sclerotiorum 1980] gi|154690987|gb|EDN90725.1| SS1G_00125 [Sclerotinia sclerotiorum 1980]
  misc_feature (315)..(550): NCBI GI: 258574983 Blast Desc: [Uncinocarpus reesii 1704] gi|237901939|gb|EEP76340.1| [Uncinocarpus reesii 1704]
  misc_feature (282)..(550): NCBI GI: 154282633 Blast Desc: [Ajellomyces capsulatus NAm1] gi|150410292|gb|EDN05680.1| [Ajellomyces capsulatus NAm1]
  misc_feature (346)..(550): NCBI GI: 238841599 Blast Desc: conserved [Microsporum canis CBS 113480]
MVYDYAPSSALYAAIYSSKLRHPNPELIQSFVDAAVNRDRAIAFILRTYLIDTDPRVGLEQFLINWKRLISLFAFPRYPSPPLQDSELAQKVIKRDKVCFLTQRTGSFVDPLMVVPIFPDIDRKSLSKSRCLRKMLEAFLDRELLDWLISFCHEPTYGATESLWLLRKSALLAFSRGFYKVSPVGSYYLIHTTEVDPLAKPSFIEQWGSVRVSPPDHTRLGIRSPDHSALTILSHFAEPIRWMDMSYDLANQQTSRKQLVDLPPTSQCTSVLGLWSMITDGMLKAWLHVPIGFRILTYRTLARTGKFLYGTSSSLNVQRLPFGMYLKMRPISGQPGLANERSALDLVRRFTNIPIPRPLDFISHGSDAYLITSRLRGTPIGMTIDTMSDDATATLVSDLRKHIQQLRAIPKTVARDFAITDTRGQAVFDGRVVVKAPYDEERGDYHGPFATEREFNTLLRSYHLPDVEHKDSHAMVLSHADINMRNVLVDNRGRLTGLVDWEMAGWYPEYWEYTKTHFTVKRKWRWLMMMDDLFAEVGDYSTEIEIERQLWNYCD

SEQ ID NO: 27632 - DNA, 305 bp, Muscodor strobelii
  misc_feature: SGI EST ID NO. CUFF.65163.0
  misc_feature: Variant of the nucleotide sequence at SEQ ID NO 27630
tccgaattagcccaaaaagtcatcaagagagataaagtatgcttcttgactcaaagaaccggttcattcgttgatccgttaatggtggtacccatattccctgacattgatcgaaaatcgttgagcaagagtcggtgtttgagaaaaatgttagaggcctttctagatcgggaacttctcgactggctcatctcattctgccatgaaccaacgtacggtgcaactgagagtctctggcttctcagaaagtcagccctacttgcattctctagaggcttctacaaagtttctcctgtggggtcata

SEQ ID NO: 27633 - DNA, 477 bp, Muscodor strobelii
  misc_feature: SGI cDNA ID NO. 569469
  misc_feature: Elevated expression when VOC is produced
  misc_feature: Encodes the peptide sequence at SEQ ID NO 27634
atgactcttattggctctctcaaaccgaactcggtctatgtatctttgaattctaggccgaagcctggcgaataccattggggacttatcttcacttccaagggcggcaaatccgtgttatgtcatgcaactaatcgaaatggaccttggacatttgagaagagagatgctgatcctggaaaatcgatgtctcttatagctttgatttacgttagccctcttaagcaatcggagtatctcaatattgtcaaatcggttcctgctgatggcaatgcttccagccgaaatggcgaaaactttacctgtcgtacttgggtcaaagatgttttagtcgctctccagcaaagcggaactatatcgctgccctctgacatcgacatcctagagaaggacgctgcacgccaaggagccaagtaccttcagacatgcgagtctggacagggtactactgtcgtcaatgatatcactgaaggatag

SEQ ID NO: 27634 - protein, 158 aa, Muscodor strobelii
  misc_feature: SGI Peptide ID NO. 569469
  misc_feature (14)..(131): NCBI GI: 238841600 Blast Desc: conserved [Microsporum canis CBS 113480]
  misc_feature (6)..(155): NCBI GI: 119181467 Blast Desc: [Coccidioides immitis RS]
  misc_feature (7)..(136): NCBI GI: 169858001 Blast Desc: [Coprinopsis cinerea okayama7#130] gi|116503323|gb|EAU86218.1| [Coprinopsis cinerea okayama7#130]
  misc_feature (7)..(142): NCBI GI: 261201304 Blast Desc: conserved [Ajellomyces dermatitidis SLH14081] gi|239592111|gb|EEQ74692.1| conserved [Ajellomyces dermatitidis SLH14081] gi|239611726|gb|EEQ88713.1| conserved [Ajellomyces
  misc_feature (7)..(121): NCBI GI: 238842401 Blast Desc: conserved [Microsporum canis CBS 113480]
  misc_feature (7)..(152): NCBI GI: 154282631 Blast Desc: [Ajellomyces capsulatus NAm1] gi|150410291|gb|EDN05679.1| [Ajellomyces capsulatus NAm1]
  misc_feature (7)..(136): NCBI GI: 226284709 Blast Desc: conserved [Paracoccidioides brasiliensis Pb01]
  misc_feature (7)..(132): NCBI GI: 145233377 Blast Desc: An02g09280 [Aspergillus niger] gi|134056989|emb|CAK44336.1| protein product [Aspergillus niger]
  misc_feature (7)..(123): NCBI GI: 225556989 Blast Desc: conserved [Ajellomyces capsulatus G186AR]
  misc_feature (7)..(136): NCBI GI: 225684336 Blast Desc: [Paracoccidioides brasiliensis Pb03]
  misc_feature: Useful for introducing or modulating the production of volatile compounds
MTLIGSLKPNSVYVSLNSRPKPGEYHWGLIFTSKGGKSVLCHATNRNGPWTFEKRDADPGKSMSLIALIYVSPLKQSEYLNIVKSVPADGNASSRNGENFTCRTWVKDVLVALQQSGTISLPSDIDILEKDAARQGAKYLQTCESGQGTTVVNDITEG

SEQ ID NO: 27635 - DNA, 860 bp, Muscodor strobelii
  misc_feature: SGI EST ID NO. CUFF.65168.0
  misc_feature: Variant of the nucleotide sequence at SEQ ID NO 27633
tcgagattgaatttgttaaaaccattaatcatgactcttattggctctctcaaaccgaactcggtctatgtatctttgaattctaggccgaagcctggcgaataccattggggacttatcttcacttccaagggcggcaaatccgtgttatgtcatgcaactaatcgaaatggaccttggacatttgagaagagagatgctgatcctggaaaatcgatgtctcttatagctttgatttacgttagccctcttaagcaatcggagtatctcaatattgtcaaatcggttcctgctgatggcaatgcttccagccgaaatggcgaaaactttacctgtcgtacttgggtcaaagatgttttagtcgctctccagcaaagcggaactatatcgctgccctctgacatcgacatcctagagaaggacgctgcacgccaaggagccaagtaccttcagacatgcgagtctggacagggtactactgtcgtcaatgatatcactgaaggatagctgatataagtcgagctggaaactgagacagttgatggtcaaagttgggaaatgggcaacttggaaaatagatttgtcgttaggggtcagatgtctttcttttttttcttcctgggttccatggtcttgtagtgtgggagtcacattcattcaatattacaggtacctttgtaaggccaacccaggggacagcaacagtctacaatgtcgttcgttatattatcggagtcgcttagcaaaactaggtattggcagatgcaaaaatgtgtccgatgggtcattgatgtactgcgcgttaagcgacttatacagctctcattgacttgttcttataacgggttaaagcattcaag

SEQ ID NO: 27636 - DNA, 825 bp, Muscodor strobelii
  misc_feature: SGI cDNA ID NO. 569470
  misc_feature: Encodes the peptide sequence at SEQ ID NO 27637
atgtctttcacaactattgcaagtgtatcgatatcgagcataattttcctcggtatgacctctgctatgtttcccgccgatttcgtcttgatcatgatgataattgcaccaaatgaaaatctctggaaaccgcagaaaccacatcatacatataataaggatgtgcagcccttggtcaagttcgattggaaacacagagtgccgatgccttgccggcttttcgaatacttgcaacgcgtaacaatgggtattaaggaagctcccaaggcagagtggatacgcatcgacaacggatacctaaatcgtatcacacagcaccggcgaattatggacgcctatcgttccaaagtctttggccagagaactcaagccaacccagtaatcggaagtggaatcatcgtcaatcttgcgatcgaggagctctatgtcaccctgatgacatttctccctcgacgcttcccaacaattttcgaactacaacaccacactcttagaaacctcgtcacggaaaaatcttacgtaattgacatatcagcaatagaccaccgcactatgcttcgtagcatagggggaaatgtcgaagacaatttctacttcctgtgtccggatgcagacggcgacgcgcgactagcaggctggatctcgtgttttccaggtggattctcgacaataaagcgtaggggtatgacaatggatgggattcatgcgcctcttcccggatatggtgagcctatggcgaagggcacggatcgtttaattccacaactcgagccgggccaattctttgagcggtttaacgtaagcgtaacttcgctcctcaaatga

SEQ ID NO: 27637 - protein, 274 aa, Muscodor strobelii
  misc_feature: SGI Peptide ID NO. 569470
  misc_feature (55)..(271): NCBI GI: 238487030 Blast Desc: conserved [Aspergillus flavus NRRL3357] gi|220699632|gb|EED55971.1| conserved [Aspergillus flavus NRRL3357]
  misc_feature (55)..(271): NCBI GI: 169770549 Blast Desc: [Aspergillus oryzae RIB40] gi|83767603|dbj|BAE57742.1| protein product [Aspergillus oryzae]
  misc_feature (55)..(271): NCBI GI: 119491556 Blast Desc: NFIA_065660 [Neosartorya fischeri NRRL 181] gi|119411459|gb|EAW21402.1| conserved [Neosartorya fischeri NRRL 181]
  misc_feature (55)..(271): NCBI GI: 159127471 Blast Desc: AFUB_037520 [Aspergillus fumigatus A1163]
  misc_feature (43)..(269): NCBI GI: 256728047 Blast Desc: NECHADRAFT_95312 [Nectria haematococca mpVI 77-13-4]
  misc_feature (55)..(271): NCBI GI: 70999470 Blast Desc: AFUA_3G11650 [Aspergillus fumigatus Af293] gi|66852091|gb|EAL92416.1| AFUA_3G11650 [Aspergillus fumigatus Af293]
  misc_feature (49)..(269): NCBI GI: 261352359 Blast Desc: conserved [Verticillium albo-atrum VaMs.102]
  misc_feature (55)..(271): NCBI GI: 226284237 Blast Desc: conserved [Paracoccidioides brasiliensis Pb01]
  misc_feature (55)..(271): NCBI GI: 226288863 Blast Desc: conserved [Paracoccidioides brasiliensis Pb18]
  misc_feature (38)..(266): NCBI GI: 171680715 Blast Desc: protein product [Podospora anserina] gi|170939985|emb|CAP65211.1| protein product [Podospora anserina]
MSFTTIASVSISSIIFLGMTSAMFPADFVLIMMIIAPNENLWKPQKPHHTYNKDVQPLVKFDWKHRVPMPCRLFEYLQRVTMGIKEAPKAEWIRIDNGYLNRITQHRRIMDAYRSKVFGQRTQANPVIGSGIIVNLAIEELYVTLMTFLPRRFPTIFELQHHTLRNLVTEKSYVIDISAIDHRTMLRSIGGNVEDNFYFLCPDADGDARLAGWISCFPGGFSTIKRRGMTMDGIHAPLPGYGEPMAKGTDRLIPQLEPGQFFERFNVSVTSLLK

SEQ ID NO: 27638 - DNA, 1743 bp, Muscodor strobelii
  misc_feature: SGI cDNA ID NO. 569471
  misc_feature: Encodes the peptide sequence at SEQ ID NO 27639
atgcggctgataaactgccgcactctctcaatagaggagcacatcgaatcaatcccgccttacgccgtactatcccatacctggagcgacggcgaggtatctctccaagatctcacaaatctcagtagtacagcagagctcccgggctaccgcaagataacacaaacatgcgcacgtgcactgcggcaaggcatagaatacgcatggatagacacctgttgcatcgataagtcgtcctctgcagagctatccgaggcgataaactccatgttcgcatggtatcgtgatgcaagagtctgttacgcctggctatctgattactcacccgatcgggacttcgacataagtagtgcggaagtagtactcagtttcgaggctcgggaaaatgtcgcagagcagtccaaggcacattccgatgtcccgcagctcagcgtggccgagctagagatgcggaataggataaacaagaacctcaaacaatgccgatggttctcacggggctggacacttcaagaattggtcgcgccggggaaagtggaatttcttgacaaaaattgggattatttcggttcgaaagccgaactggcgcccgtgctatcatacataacaggcatcgacacatccgtcctccgtggcagctcactaaatgacgttctcgttggtcggcgcatgtcatgggcagcaaaccggcaaacaagacgagtagaagacatggcatactgtctcctgggtctcttcgacatcaacatgccactcctctacggcgagggcgaaaaggcattcacgcgcctccaagaagagattataagatccagcaacgatctctcaatcttcgcctggaccgccccactaaacgacaagcggcaattccggagtctctgggccagttcccctcacgaattcaaatcctgccaatggctcgtgaagcccgcactagaatggaacgggcgaggcgaatacagcatcacgtcccgcggtctccgcacaaccgacatgatccgcatcgtgcgaaacatgtcaacgcgcgcaggaagctatttcctacccctcgactgcgtagatgctagacatacaaaggatatgcggtttgtatctctagaacaatacggaccttctctattcgcgcggagaaaaccctggctctacgatacggtcgtcgacatcgacgtctcgctcgcctttcgattacctcaaccgcagtatatccacagtcgcgagagccacgatctagataacatggtgacgacgagccgtataggctcagtacagatcgacttcgacctcgaagcgttcgacgaggagactatcgtcgtgcatcccgagacagactgggatctgcggaactctatcttactttcgtatcgtcggagacacttctgggggtgttggaagatccagactgtaggtgatgaagagggagtcgcagtcgtatgcgcacagtctgacggatggttgttatacggaattttcaaatgggctgatctgccgcctatattagagcagagcgatatactaccctcgaaagttggagatgagctgcagaagtatcgcaaccggacctcgctcatatcttcacggtggaaacataccgtggagctcagtgagcataatcttggcgagaatgaggataaaatccgcggcacattgctacagattaaaagtcagagacttgatggcgtacaggacgggacgaagatgaggtctaggatagggcggttgttcaaaaaccggacttggccatga

SEQ ID NO: 27639 - protein, 580 aa, Muscodor strobelii
  misc_feature: SGI Peptide ID NO. 569471
  misc_feature (21)..(172): Pfam Id: PF06985 Pfam Desc: Heterokaryon incompatibility protein (HET)
  misc_feature (1)..(328): NCBI GI: 256722404 Blast Desc: NECHADRAFT_44368 [Nectria haematococca mpVI 77-13-4]
  misc_feature (1)..(467): NCBI GI: 46139005 Blast Desc: FG11017.1 [Gibberella zeae PH-1]
  misc_feature (1)..(327): NCBI GI: 145249734 Blast Desc: An14g05830 [Aspergillus niger] gi|134081889|emb|CAK42144.1| protein product [Aspergillus niger]
  misc_feature (1)..(380): NCBI GI: 116205926 Blast Desc: CHGG_02256 [Chaetomium globosum CBS 148.51] gi|88182853|gb|EAQ90321.1| CHGG_02256 [Chaetomium globosum CBS 148.51]
  misc_feature (1)..(366): NCBI GI: 46126619 Blast Desc: FG07687.1 [Gibberella zeae PH-1]
  misc_feature (1)..(328): NCBI GI: 169780438 Blast Desc: [Aspergillus oryzae RIB40] gi|83773423|dbj|BAE63550.1| protein product [Aspergillus oryzae]
  misc_feature (1)..(494): NCBI GI: 256734168 Blast Desc: NECHADRAFT_78015 [Nectria haematococca mpVI 77-13-4]
  misc_feature (1)..(352): NCBI GI: 256720502 Blast Desc: NECHADRAFT_55867 [Nectria haematococca mpVI 77-13-4]
  misc_feature (1)..(328): NCBI GI: 145605569 Blast Desc: MGG_09177 [Magnaporthe grisea 70-15] gi|145013388|gb|EDJ98029.1| MGG_09177 [Magnaporthe grisea 70-15]
  misc_feature (1)..(328): NCBI GI: 256722255 Blast Desc: NECHADRAFT_52327 [Nectria haematococca mpVI 77-13-4]
MRLINCRTLSIEEHIESIPPYAVLSHTWSDGEVSLQDLTNLSSTAELPGYRKITQTCARALRQGIEYAWIDTCCIDKSSSAELSEAINSMFAWYRDARVCYAWLSDYSPDRDFDISSAEVVLSFEARENVAEQSKAHSDVPQLSVAELEMRNRINKNLKQCRWFSRGWTLQELVAPGKVEFLDKNWDYFGSKAELAPVLSYITGIDTSVLRGSSLNDVLVGRRMSWAANRQTRRVEDMAYCLLGLFDINMPLLYGEGEKAFTRLQEEIIRSSNDLSIFAWTAPLNDKRQFRSLWASSPHEFKSCQWLVKPALEWNGRGEYSITSRGLRTTDMIRIVRNMSTRAGSYFLPLDCVDARHTKDMRFVSLEQYGPSLFARRKPWLYDTVVDIDVSLAFRLPQPQYIHSRESHDLDNMVTTSRIGSVQIDFDLEAFDEETIVVHPETDWDLRNSILLSYRRRHFWGCWKIQTVGDEEGVAVVCAQSDGWLLYGIFKWADLPPILEQSDILPSKVGDELQKYRNRTSLISSRWKHTVELSEHNLGENEDKIRGTLLQIKSQRLDGVQDGTKMRSRIGRLFKNRTWP

SEQ ID NO: 27640 - DNA, 2083 bp, Muscodor strobelii
  misc_feature: SGI EST ID NO. CUFF.65174.0
  misc_feature: Variant of the nucleotide sequence at SEQ ID NO 27638
cagagtccttgattcattattgaagagagtctcgcgtcccgcgtcgcgctctatacgtcactcataattcacttggatttaggatcatgaagctgatagataagggcataaatgagtgattgagaacttcgtactcaggaaccactcagcgccgcccactacggcccagcaggtcatgcaggcctcccgcaccgaccaagaaccaccaatgagatgaggtcagcgagggcacgcgcatagcacctcattcgcaatgcggctgataaactgccgcactctctcaatagaggagcacatcgaatcaatcccgccttacgccgtactatcccatacctggagcgacggcgaggtatctctccaagatctcacaaatctcagtagtacagcagagctcccgggctaccgcaagataacacaaacatgcgcacgtgcactgcggcaaggcatagaatacgcatggatagacacctgttgcatcgataagtcgtcctctgcagagctatccgaggcgataaactccatgttcgcatggtatcgtgatgcaagagtctgttacgcctggctatctgattactcacccgatcgggacttcgacataagtagtgcggaagtagtactcagtttcgaggctcgggaaaatgtcgcagagcagtccaaggcacattccgatgtcccgcagctcagcgtggccgagctagagatgcggaataggataaacaagaacctcaaacaatgccgatggttctcacggggctggacacttcaagaattggtcgcgccggggaaagtggaatttcttgacaaaaattgggattatttcggttcgaaagccgaactggcgcccgtgctatcatacataacaggcatcgacacatccgtcctccgtggcagctcactaaatgacgttctcgttggtcggcgcatgtcatgggcagcaaaccggcaaacaagacgagtagaagacatggcatactgtctcctgggtctcttcgacatcaacatgccactcctctacggcgagggcgaaaaggcattcacgcgcctccaagaagagattataagatccagcaacgatctctcaatcttcgcctggaccgccccactaaacgacaagcggcaattccggagtctctgggccagttcccctcacgaattcaaatcctgccaatggctcgtgaagcccgcactagaatggaacgggcgaggcgaatacagcatcacgtcccgcggtctccgcacaaccgacatgatccgcatcgtgcgaaacatgtcaacgcgcgcaggaagctatttcctacccctcgactgcgtagatgctagacatacaaaggatatgcggtttgtatctctagaacaatacggaccttctctattcgcgcggagaaaaccctggctctacgatacggtcgtcgacatcgacgtctcgctcgcctttcgattacctcaaccgcagtatatccacagtcgcgagagccacgatctagataacatggtgacgacgagccgtataggctcagtacagatcgacttcgacctcgaagcgttcgacgaggagactatcgtcgtgcatcccgagacagactgggatctgcggaactctatcttactttcgtatcgtcggagacacttctgggggtgttggaagatccagactgtaggtgatgaagagggagtcgcagtcgtatgcgcacagtctgacggatggttgttatacggaattttcaaatgggctgatctgccgcctatattagagcagagcgatatactaccctcgaaagttggagatgagctgcagaagtatcgcaaccggacctcgctcatatcttcacggtggaaacataccgtggagctcagtgagcataatcttggcgagaatgaggataaaatccgcggcacattgctacagattaaaagtcagagacttgatggcgtacaggacgggacgaagatgaggtctaggatagggcggttgttcaaaaaccggacttggccatgatgtggcagttcgtattttgatatactaatactctagtgcaagctaaggtgtttgtctttaatgaaaatgaatctactattaggcgat

SEQ ID NO: 27641 - DNA, 660 bp, Muscodor strobelii
  misc_feature: SGI cDNA ID NO. 569472
  misc_feature: Encodes the peptide sequence at SEQ ID NO 27642
atggatgcaccagatccccgtcctccactgaggaaacgaagttcgtcgtctattaatcaccacgatagcgccagtgatgatccaggttctgacgacgatattaacgatacagttggagccattgctatcgaccaggacgggtatatcgcagcgggctcttcctcaggcggcatcggaatgaagcaccgtggccgcgttgggcctgccgctcttgtcgggatcggaactgccgtcattccagcggcagaagaggatccagacggcgtttgcgtggcagcagtcacgagcgggacaggcgagcatatggcaacgaccatggcgtcacaacgctgcgctgaacgcctctaccaggaacgcgtccggctgtcttctggcaaagaagtcgaggagtacgacgaaacggctatattgatttccttcattaaaaatgaattcctcaatcacccaggtgtggccaactcttgcagtacgccggccattggcgtcatggccgtcaaaaagggccctaatggatactacctctcttttgcccataacaccgattcatttgcgctagcaagcatgagctcgaacgatcgagagccgctctgtgtcatgtctcgccttaacgaggtgaagggtgacaggatctccgctggcggacataagatcgcacgatga

SEQ ID NO: 27642 - protein, 219 aa, Muscodor strobelii
  misc_feature: SGI Peptide ID NO. 569472
  misc_feature (36)..(76): Pfam Id: PF01112 Pfam Desc: Asparaginase
  misc_feature (6)..(217): NCBI GI: 256729097 Blast Desc: NECHADRAFT_40402 [Nectria haematococca mpVI 77-13-4]
  misc_feature (24)..(218): NCBI GI: 145606951 Blast Desc: MGG_03878 [Magnaporthe grisea 70-15] gi|145014574|gb|EDJ99142.1| MGG_03878 [Magnaporthe grisea 70-15]
  misc_feature (24)..(218): NCBI GI: 261357026 Blast Desc: threonine aspartase [Verticillium albo-atrum VaMs.102]
  misc_feature (28)..(216): NCBI GI: 46138685 Blast Desc: FG10857.1 [Gibberella zeae PH-1]
  misc_feature (31)..(217): NCBI GI: 85083759 Blast Desc: NCU01757 [Neurospora crassa OR74A] gi|7800880|emb|CAB91238.1| related to asparaginase [Neurospora crassa] gi|28918267|gb|EAA27944.1| [Neurospora crassa OR74A]
  misc_feature (29)..(207): NCBI GI: 171689224 Blast Desc: protein product [Podospora anserina] gi|170944574|emb|CAP70685.1| protein product [Podospora anserina]
  misc_feature (32)..(209): NCBI GI: 154310841 Blast Desc: BC1G_06399 [Botryotinia fuckeliana B05.10] gi|150851198|gb|EDN26391.1| BC1G_06399 [Botryotinia fuckeliana B05.10]
  misc_feature (32)..(209): NCBI GI: 156034242 Blast Desc: SS1G_13424 [Sclerotinia sclerotiorum 1980] gi|154698827|gb|EDN98565.1| SS1G_13424 [Sclerotinia sclerotiorum 1980]
  misc_feature (32)..(217): NCBI GI: 116204607 Blast Desc: CHGG_10187 [Chaetomium globosum CBS 148.51] gi|88176315|gb|EAQ83783.1| CHGG_10187 [Chaetomium globosum CBS 148.51]
  misc_feature (29)..(214): NCBI GI: 258567550 Blast Desc: conserved [Uncinocarpus reesii 1704] gi|237905965|gb|EEP80366.1| conserved [Uncinocarpus reesii 1704]
MDAPDPRPPLRKRSSSSINHHDSASDDPGSDDDINDTVGAIAIDQDGYIAAGSSSGGIGMKHRGRVGPAALVGIGTAVIPAAEEDPDGVCVAAVTSGTGEHMATTMASQRCAERLYQERVRLSSGKEVEEYDETAILISFIKNEFLNHPGVANSCSTPAIGVMAVKKGPNGYYLSFAHNTDSFALASMSSNDREPLCVMSRLNEVKGDRISAGGHKIAR

SEQ ID NO: 27643 - DNA, 834 bp, Muscodor strobelii
  misc_feature: SGI EST ID NO. CUFF.65177.0
  misc_feature: Variant of the nucleotide sequence at SEQ ID NO 27641
gggacatggatgcaccagatccccgtcctccactgaggaaacgaagttcgtcgtctattaatcaccacgatagcgccagtgatgatccaggttctgacgacgatattaacgatacagttggagccattgctatcgaccaggacgggtatatcgcagcgggctcttcctcaggcggcatcggaatgaagcaccgtggccgcgttgggcctgccgctcttgtcgggatcggaactgccgtcattccagcggcagaagaggatccagacggcgtttgcgtggcagcagtcacgagcgggacaggcgagcatatggcaacgaccatggcgtcacaacgctgcgctgaacgcctctaccaggaacgcgtccggctgtcttctggcaaagaagtcgaggagtacgacgaaacggctatattgatttccttcattaaaaatgaattcctcaatcacccaggtgtggccaactcttgcagtacgccggccattggcgtcatggccgtcaaaaagggccctaatggatactacctctcttttgcccataacaccgattcatttgcgctagcaagcatgagctcgaacgatcgagagccgctctgtgtcatgtctcgccttaacgaggtgaagggtgacaggatctccgctggcggacataagatcgcacgatgataacctaggacgagaaaattgacgatggggactgcgacgggattatgaacggtggaaaggttgcaattctggatcctagtagttgactaccctctatgcctaaggcgcttcttattgatacccatagactctatccatcgttatttggcattagaatatatataacgct

SEQ ID NO: 27644 - DNA, 354 bp, Muscodor strobelii
  misc_feature: SGI cDNA ID NO. 569473
  misc_feature: Encodes the peptide sequence at SEQ ID NO 27645
atgatcaaggccgctcgtgctcaaagcgacgtcgtcacatatgtcatgatgctccgaaaggacactaaatgtaagccggcgacggacaagactaagctcatcgactacttgcgaaaccgaattccgaacagaaactcagactccaaggtaactagagccggtaccagtgtctccgtcgcaaacccagctgccgtctatatggtgggtgtcgatttctcttccctcagcttagatatcaaggaaactggtgcagacatgattcctggtggcatcattggcacaggtcctgatgacaagggccgccagcgcaccgccagcgctcgcgtagacacgggcaacaacgatgacatctag

SEQ ID NO: 27645 - protein, 117 aa, Muscodor strobelii
  misc_feature: SGI Peptide ID NO. 569473
  misc_feature (7)..(114): NCBI GI: 116201459 Blast Desc: CHGG_08614 [Chaetomium globosum CBS 148.51] gi|88177132|gb|EAQ84600.1| CHGG_08614 [Chaetomium globosum CBS 148.51]
MIKAARAQSDVVTYVMMLRKDTKCKPATDKTKLIDYLRNRIPNRNSDSKVTRAGTSVSVANPAAVYMVGVDFSSLSLDIKETGADMIPGGIIGTGPDDKGRQRTASARVDTGNNDDI

SEQ ID NO: 27646 - DNA, 429 bp, Muscodor strobelii
  misc_feature: SGI cDNA ID NO. 569474
  misc_feature: Encodes the peptide sequence at SEQ ID NO 27647
atgatgcgagctacaaactgccttaccgctatcgctgccctcgccccattggcgatcgctgagcaatggcaaggtctcgcaatcactgtcaacgccaccgacttcgttttcaacataactgccgcccctgattgggatcgcatccaaggaagtgacttgggcttcaccattaattgtgcgatgtcactctccgcagctggcactttatgcacaccacttccaccgtacacaccaatcccaaacactggtgaagtcctggccttcactcagtacagccaggacaatccggctgctggagtcgaagtctctgtctattttgggccatatctagctttgatggccatcggtcgcattcctgatcccaccactctatctccgaacaccacttttgatatattcgtcaatatacctgacccactcaaagcttga

SEQ ID NO: 27647 - protein, 142 aa, Muscodor strobelii
  misc_feature: SGI Peptide ID NO. 569474
MMRATNCLTAIAALAPLAIAEQWQGLAITVNATDFVFNITAAPDWDRIQGSDLGFTINCAMSLSAAGTLCTPLPPYTPIPNTGEVLAFTQYSQDNPAAGVEVSVYFGPYLALMAIGRIPDPTTLSPNTTFDIFVNIPDPLKA

SEQ ID NO: 27648 - DNA, 876 bp, Muscodor strobelii
  misc_feature: SGI EST ID NO. CUFF.65186.0
  misc_feature: Variant of the nucleotide sequence at SEQ ID NO 27646
cttacgatgacttacaattttagtcttctataagattgctgcagaatagacagttacgctcatccatgttacggatagctctcagcaatcaaaccccaccttacgacccaccactcactctcgcaagaccatgatgcgagctacaaactgccttaccgctatcgctgccctcgccccattggcgatcgctgagcaatggcaaggtctcgcaatcactgtcaacgccaccgacttcgttttcaacataactgccgcccctgattgggatcgcatccaaggaagtgacttgggcttcaccattaattgtgcgatgtcactctccgcagctggcactttatgcacaccacttccaccgtacacaccaatcccaaacactggtgaagtcctggccttcactcagtacagccaggacaatccggctgctggagtcgaagtctctgtctattttgggccatatctagctttgatggccatcggtcgcattcctgatcccaccactctatctccgaacaccacttttgatatattcgtcaatatacctgacccactcaaagcttgatctgaataagattctcgccgaaggatgattgagaaacccgcttaagtagtctatctcacagaggtaagactggtggtcgtggaagctaccggaaatgctataaacgcttatatagaaataataataataatacgataccgccttgtatatggccgctcgatgtttattgcaaatgaggtagcctcaatattagtattcagcagaacaaaaacacaatagtcggcggaagcatggaataaaccgcaacataaagccttaaagatatttatgtgtaaccattggagctcttgatatatgtgtatggtggtcgcctttat

SEQ ID NO: 27649 - DNA, 327 bp, Muscodor strobelii
  misc_feature: SGI cDNA ID NO. 569475
  misc_feature: Encodes the peptide sequence at SEQ ID NO 27650
atggtcttaacgaacaatatgggtactggaacccagctattcgagcctaacagggtcgaactggcgaatactgacatgaccgttttcaacgataaatctcaaaccatggtcgtaacagtcgataacaatacgcacatgtcaaatacgtatcctagccctactagcattgcttctggggatagctacaaaggttatgtcaaggccaacaactaccccaatctggagaatgtgggtaaggttgagaagtttgtgcttgagcaggcgagaaggatctttgaggaggagttcttctatgcacttgatgtctgtttgaaaggtcaagattga

SEQ ID NO: 27650 - protein, 108 aa, Muscodor strobelii
  misc_feature: SGI Peptide ID NO. 569475
  misc_feature (67)..(98): NCBI GI: 258563184 Blast Desc: conserved [Uncinocarpus reesii 1704] gi|259495520|sp|C4JY59.1|MDM12_UNCRE RecName: Full=Mitochondrial distribution and morphology protein 12; AltName: inheritance
  misc_feature (67)..(98): NCBI GI: 226278829 Blast Desc: mitochondrial inheritance component mdm12 [Paracoccidioides brasiliensis Pb01]
  misc_feature (67)..(98): NCBI GI: 259495606 Blast Desc: mitochondrial inheritance component mdm12 [Paracoccidioides brasiliensis Pb01]
  misc_feature (67)..(98): NCBI GI: 261189949 Blast Desc: mitochondrial inheritance component mdm12 [Ajellomyces dermatitidis SLH14081] gi|259495501|sp|C5K0S2.1|MDM12_AJEDS RecName: Full=Mitochondrial distribution and morphology protein
  misc_feature (67)..(98): NCBI GI: 259495500 Blast Desc: MDM12_AJEDR RecName: Full=Mitochondrial distribution and morphology protein 12; AltName: Full=Mitochondrial inheritance component MDM12 gi|239612847|gb|EEQ89834.1| component
  misc_feature (67)..(98): NCBI GI: 259495607 Blast Desc: MDM12_AJEDR RecName: Full=Mitochondrial distribution and morphology protein 12; AltName: Full=Mitochondrial inheritance component MDM12 gi|239612847|gb|EEQ89834.1| component
  misc_feature (67)..(98): NCBI GI: 259495608 Blast Desc: MDM12_AJEDR RecName: Full=Mitochondrial distribution and morphology protein 12; AltName: Full=Mitochondrial inheritance component MDM12 gi|239612847|gb|EEQ89834.1| component
  misc_feature (67)..(98): NCBI GI: 225677567 Blast Desc: mitochondrial inheritance component mdm12 [Paracoccidioides brasiliensis Pb03]
  misc_feature (67)..(98): NCBI GI: 240274643 Blast Desc: mitochondrial inheritance component mdm12 [Ajellomyces capsulatus H143]
  misc_feature (74)..(98): NCBI GI: 240108568 Blast Desc: CPC735_009180 [Coccidioides posadasii C735 delta SOWgp]
MVLTNNMGTGTQLFEPNRVELANTDMTVFNDKSQTMVVTVDNNTHMSNTYPSPTSIASGDSYKGYVKANNYPNLENVGKVEKFVLEQARRIFEEEFFYALDVCLKGQD

SEQ ID NO: 27651 - DNA, 1887 bp, Muscodor strobelii
  misc_feature: SGI cDNA ID NO. 569476
  misc_feature: Elevated expression when VOC is produced
  misc_feature: Encodes the peptide sequence at SEQ ID NO 27652
atggaggaccaaccggaaaatccgtgggcaaatgttgagcctattccgccaaatccaacaaagcgtggctggccccatcggctgctttatgtcccgacttggacctcttattgtaacgtcaacaactcctacgatgaccaattggagccacggtataatgttctaagctacacctggggctactatcgtgatcagtcagacagccgtgtgaagatcaacaacgttaactgggaaattccctccatcaagacatcccatttcagcccagctcagtttcgccaagcaatggagacagccgccaagggggtccagaagcccaaatgcgagtggttatgggttgacatagcgtgcatcccccaagaaaaggataacgaggatccactgtccgtcgacctacggaagcaggagattggccgtcaagtggaaatcttcgccggggcacaagaatgtttcacatggctatcaggactcaagacaaccgatctgcccggcgcagaagagccacgtattcgcgtggagggcttcgaaaactacaccacggttctacaagccattccagtctcgaaacttgaccatgcagcgaccttactaagagaactgaattgggagtcaattttgtacgagctgcgactggatcgcataatcagccatccgtggttccagtctttatggacgctacaggagatggtgctccgaccggactcttggattctcttcgacgacggactgctcgagatagatcgacagcaggacagggtcctagaaacgaaatttccggcctcgatgatgagagaccttggtaaaagtgaagcctggacgaaaaacacgacagacaaatggtctctttctgacatgaagttcgagatgtatgggttgaggttcctggttattgctgaaaaggaaagatgggagatcttgaacttgatcgaggcgtgtttgcgggaggggtccgaacacatgaccccaaggccacatatcccgccagtctcgaatatacgcaaacgtctacatgaaatatacctacggatggaagagcgcgggattgattccctgcacatatccttaccgcacactgcctactccgctgccaacaatcgaagggtgtcgcggcccttggataggatctatggcattgtccaggcgtatgggattagctgtaactccaacccatctaagggatcaagcgaagcaacactagaagagcttgaagacgattttggaagacaacttgttgaacaatctccggtcaagtcgcaacttttcattcatgcctcggggtcgggtcaagaaccccgtcggagctggcttattacccaaggatgcaaagtggacggatggtggtctgcatttgaaggtaacatacatactgttagccttgtggacgacttccgaatcaaatccgagtccacaacagacctttatgtggagttcaaaggccgtgcttggtacctcgactcattcgttgaaaagaggtccgacaacatattcagtccctctgaagcacgccaccgcccacacgactcgaatggaatgctccttgattcccacgtctcgaggaaggttctaggccaccaagttgattacttcaccagctttgagaagatggaagaagctatccaaaggctcaacaaacattatcagcgagatgtgaacctggttgaccacttcaggatgcgagttgcaagtcttggctgcgcgcttgaaggttcttgggtatatcatgtgggtgttctattggcaccggtctttacaagcagcagggacgagcccaagtggtggatacgagttggtttaatgaggtggattgagatttactaccacaaaagcccattcacgaagcacccggatcttccaccacctcacgattttcaatgtatcataagatga

SEQ ID NO: 27652 - protein, 628 aa, Muscodor strobelii
  misc_feature: SGI Peptide ID NO. 569476
  misc_feature (24)..(437): NCBI GI: 46127463 Blast Desc: FG08109.1 [Gibberella zeae PH-1]
  misc_feature (18)..(446): NCBI GI: 189192619 Blast Desc: [Pyrenophora tritici-repentis Pt-1C-BFP] gi|187978212|gb|EDU44838.1| [Pyrenophora tritici-repentis Pt-1C-BFP]
  misc_feature (12)..(248): NCBI GI: 238839479 Blast Desc: conserved [Microsporum canis CBS 113480]
  misc_feature (52)..(237): NCBI GI: 255955047 Blast Desc: Pc21g12470 [Penicillium chrysogenum Wisconsin 54-1255] gi|211589987|emb|CAP96144.1| Pc21g12470 [Penicillium chrysogenum Wisconsin 54-1255]
  misc_feature (15)..(269): NCBI GI: 238497283 Blast Desc: conserved [Aspergillus flavus NRRL3357] gi|220694757|gb|EED51101.1| conserved [Aspergillus flavus NRRL3357]
  misc_feature (15)..(275): NCBI GI: 67526053 Blast Desc: AN3484.2 [Aspergillus nidulans FGSC A4] gi|40739855|gb|EAA59045.1| AN3484.2 [Aspergillus nidulans FGSC A4] gi|259482004|tpe|CBF76060.1| TPA: conserved [Aspergillus FGSC
  misc_feature (15)..(269): NCBI GI: 169774215 Blast Desc: [Aspergillus oryzae RIB40] gi|83769438|dbj|BAE59573.1| protein product [Aspergillus oryzae]
  misc_feature (7)..(240): NCBI GI: 154305446 Blast Desc: BC1G_08492 [Botryotinia fuckeliana B05.10] gi|150853279|gb|EDN28471.1| BC1G_08492 [Botryotinia fuckeliana B05.10]
  misc_feature (38)..(230): NCBI GI: 169614844 Blast Desc: SNOG_10572 [Phaeosphaeria nodorum SN15] gi|111060846|gb|EAT81966.1| SNOG_10572 [Phaeosphaeria nodorum SN15]
  misc_feature (47)..(413): NCBI GI: 168043828 Blast Desc: [Physcomitrella patens subsp. patens] gi|162674237|gb|EDQ60748.1| [Physcomitrella patens subsp. patens]
  misc_feature: Useful for introducing or modulating the production of volatile compounds
MEDQPENPWANVEPIPPNPTKRGWPHRLLYVPTWTSYCNVNNSYDDQLEPRYNVLSYTWGYYRDQSDSRVKINNVNWEIPSIKTSHFSPAQFRQAMETAAKGVQKPKCEWLWVDIACIPQEKDNEDPLSVDLRKQEIGRQVEIFAGAQECFTWLSGLKTTDLPGAEEPRIRVEGFENYTTVLQAIPVSKLDHAATLLRELNWESILYELRLDRIISHPWFQSLWTLQEMVLRPDSWILFDDGLLEIDRQQDRVLETKFPASMMRDLGKSEAWTKNTTDKWSLSDMKFEMYGLRFLVIAEKERWEILNLIEACLREGSEHMTPRPHIPPVSNIRKRLHEIYLRMEERGIDSLHISLPHTAYSAANNRRVSRPLDRIYGIVQAYGISCNSNPSKGSSEATLEELEDDFGRQLVEQSPVKSQLFIHASGSGQEPRRSWLITQGCKVDGWWSAFEGNIHTVSLVDDFRIKSESTTDLYVEFKGRAWYLDSFVEKRSDNIFSPSEARHRPHDSNGMLLDSHVSRKVLGHQVDYFTSFEKMEEAIQRLNKHYQRDVNLVDHFRMRVASLGCALEGSWVYHVGVLLAPVFTSSRDEPKWWIRVGLMRWIEIYYHKSPFTKHPDLPPPHDFQCIIR

SEQ ID NO: 27653 - DNA, 3438 bp, Muscodor strobelii
  misc_feature: SGI EST ID NO. CUFF.65198.0
  misc_feature: Variant of the nucleotide sequence at SEQ ID NO 27651
tagaatcgtactaaccacctaatattcatactttagcctcaatacagtctcgacagctacaacaagctcaattgtgcgaagtcaattgaatcatgaatatcggcacaaaacaaggggcctgcaaaaatggatacttgtctatccatatcacgaagagtattgagcagggatacgttcttggcattccagattgtgctcaattgggtcagttcaaggtggcaatgcgtcccccacaaacgatggagaaatgtatcacggcccaactggtggcggtctccaatattcatcgaaagaagctgcggctgagcatcttgccttttcggtatcgatctgcaagattcggtccccatagctgcaggtcaaaggaggctcgtctcagaaggcagaaagggctgtgtcggtctttgaaaaaagcagaaggatgccgaagttgtgcacgtaacaggcacctctacagtcgaaagagccttgcttctgtgggcattaatcaccggaatgcacgctacgttcactcatcgcccccattcaatccaactaggcgtctgacaatgacttcacatttgtaatagcttcaagcgtatgttgccgatgttcatttataggcatatctgcttgttgatgcctgacgaggaagcgtcagaaaaaccactctagacacttaagcaaccccttcccttctcaattcgaagaccatttacttcttacctcaatggtccatagcctagcaaacaactttcttcctagttcgctattattgtccctgcaacaatagaaccaatgagcgtcacataatcctgctatggaggaccaaccggaaaatccgtgggcaaatgttgagcctattccgccaaatccaacaaagcgtggctggccccatcggctgctttatgtcccgacttggacctcttattgtaacgtcaacaactcctacgatgaccaattggagccacggtataatgttctaagctacacctggggctactatcgtgatcagtcagacagccgtgtgaagatcaacaacgttaactgggaaattccctccatcaagacatcccatttcagcccagctcagtttcgccaagcaatggagacagccgccaagggggtccagaagcccaaatgcgagtggttatgggttgacatagcgtgcatcccccaagaaaaggataacgaggatccactgtccgtcgacctacggaagcaggagattggccgtcaagtggaaatcttcgccggggcacaagaatgtttcacatggctatcaggactcaagacaaccgatctgcccggcgcagaagagccacgtattcgcgtggagggcttcgaaaactacaccacggttctacaagccattccagtctcgaaacttgaccatgcagcgaccttactaagagaactgaattgggagtcaattttgtacgagctgcgactggatcgcataatcagccatccgtggttccagtctttatggacgctacaggagatggtgctccgaccggactcttggattctcttcgacgacggactgctcgagatagatcgacagcaggacagggtcctagaaacgaaatttccggcctcgatgatgagagaccttggtaaaagtgaagcctggacgaaaaacacgacagacaaatggtctctttctgacatgaagttcgagatgtatgggttgaggttcctggttattgctgaaaaggaaagatgggagatcttgaacttgatcgaggcgtgtttgcgggaggggtccgaacacatgaccccaaggccacatatcccgccagtctcgaatatacgcaaacgtctacatgaaatatacctacggatggaagagcgcgggattgattccctgcacatatccttaccgcacactgcctactccgctgccaacaatcgaagggtgtcgcggcccttggataggatctatggcattgtccaggcgtatgggattagctgtaactccaacccatctaagggatcaagcgaagcaacactagaagagcttgaagacgattttggaagacaacttgttgaacaatctccggtcaagtcgcaacttttcattcatgcctcggggtcgggtcaagaaccccgtcggagctggcttattacccaaggatgcaaagtggacggatggtggtctgcatttgaaggtaacatacatactgttagccttgtggacgacttccgaatcaaatccgagtccacaacagacctttatgtggagttcaaaggccgtgcttggtacctcgactcattcgttgaaaagaggtccgacaacatattcagtccctctgaagcacgccaccgcccacacgactcgaatggaatgctccttgattcccacgtctcgaggaaggttctaggccaccaagttgattacttcaccagctttgagaagatggaagaagctatccaaaggctcaacaaacattatcagcgagatgtgaacctggttgaccacttcaggatgcgagttgcaagtcttggctgcgcgcttgaaggttcttgggtatatcatgtgggtgttctattggcaccggtctttacaagcagcagggacgagcccaagtggtggatacgagttggtttaatgaggtggattgagatttactaccacaaaagcccattcacgaagcacccggatcttccaccacctcacgattttcaatgtatcataagatgattgacagacggagcttcaaaagctataacatagacaataaacaacttaagcgtgatttggtttagccgagtctaggtgatgttcaagacggcttggggatatgaaatagattgttggcacgtgccaagttcagcatttgcccccgacgaacatgtcctgataggtaggtaggtatatgtagatttcgctttgccttcgagaccacccaggcatcaactttgaggacgaagaggaagcatggagactcacgcaacacggcatcaatcaggtttatgtaacgctcgttggcggctacagccgggcatatcaagataagtgcagttgcgtctgcctaaattgtatgcctaggtaaataacaaagtcaagtcataatttacttttctccctctctcgccttctgtgcctcttccccctccttatattgacaagattgggagactcgtaaataaaagatgaaggtgtgatgaaaactgagctccgatgttcattatatcatgcgttgacaatggcctagtcaagtgtgcccaccccccgcttccataggggagcgatccccgtcatcaactttgcactaggtacctgatgtacgccgccaaccgccaggtccgccgttgaccatatgtaaaatccaagcctgcggtagtatattcatggataccttgcatcctggcctctgcagcgaagaaggagcaagccaacaagcaccctcggctcttcgccacttctagacctttcgcgtctgccaagtagca

SEQ ID NO: 27654 - DNA, 4737 bp, Muscodor strobelii
  misc_feature: SGI cDNA ID NO. 569477
  misc_feature: Elevated expression when VOC is produced
  misc_feature: Encodes the peptide sequence at SEQ ID NO 27655
atgggtcaagtacaaggtagtgtgttgtcatcgacaatcaaagaagggccaggatcgaacttgctaagcgtgcgggcaggtaaaccgagaggatcatctgatgctaatgtcgataatcttgccactgataacggggccatcgacagaggacccgtcgcatctcatcatataatccccggctggttccgcagccaagccatttggatgcccgaagatatagatgcgaaaccgatcaatctacgaatcatcgatgatacagttcgacaggacgcagagcatacttcgaaagacgctacccagggcagccagggctcgaacaccgagcttgaagcggaagttcgctctttcacggttcataaagatgtctattcagatcttcgggatatcatcgcagcagcatgtgtcaccgatactcagggccaacttcgtgcctcagaaaccagcgtacatgccaaatacaattcaagcgatgggctagcgctttgtaacgcggtcgtcaactatctggccaaggacatgtgtgcctctcttgtcttcttcgacttggaaagcatgaaagatctagccctggattttcatgagcaagataaagccaagcgtgaactcgatgcccccgtctcggacaagagcgagccgagcaacgatgacgatctcgagagcgagatagacgacaacgatgaatatgcattattcaatcactacttcgacccaaaacccaagcgtaacacaagaaaggaggcgaggaagggatcgatatcggaaattgcgtctttgctccccagtcttgacatagaagagaccaaggagccgacaactacttcccaccagtcggcgttgctgttgtgtgttcatattccggaaatgtcatattatggggacgggttcaaatccactttcctcgacaacgtctgggatgctgtcgaagaaaggagaaagaaaggcaatcctagcgttctcatttgtaccacgaaaaacaacacatcgtctcatgttctaggaaggaagctacgaatcggtaaagcaaacaccgtggatctagtttcttgcgacaacaacaacaacaacaacgacgacaacaacgacgacaacaacaacaacgggaaggagaacacgaccttagaccttcaaataggattgaccaacgtgcgacaactcaagcgcatgctacggagacgcataggtcatgcctttggcgaaggggacctcctcgatcccctcactgattgggaatcgaagggtttaccatcgcaatccatggccaaggcttcatggtcccaggatgatctccatcgtgctgtgaaacacatcgtagcttgctacaaagaacaatcgaagatagacttggatgacgttcgccaagtgttgacccacatgcgtctctttaacgatcagaccaacgaagcaacggccacactccaaaatggcaatacaaacataaatcatgacagtggagatgaggaacaccaggacctagatgaggacgtgagtgacgacgttggagcagcccggaatgatgacgttagtcataatgaaagcggaagtggcgacagaaatgagatggaagatacagattttgcaaaagcatggccaaccttgaattctcctgcaaaccaaacatggcaggagcagaaagcggtccacaagcagtctaacgcggcgttagatgagctcatggatatgatcgggctagaatcgatcaaggaacggttcatggagatcaaaaatctcgtggacacgtctcgccgacagcatgttgatttgacaaacgaattctttgggtgtcttttcgtcggcaaagcaggcagtggcaagacatctattgcagctctttacgctcaatttctttcactgctggagcttgttcccagtcacaggctcatgacgactacggggattcagctgtccaaaggtgggattgcggagtgcaagaaggtgatcgagaagctcgaaacgccgtcgagaccgtttgactcttctccgaaccacggtggtgtccttgtcgtggaccatgcccatcaactcaacacctctggaagtgctgtgcaggattttctgttaggagaaattgagagactgcgtggaagggtggttttcattttcactggatatccagggccgatggatacctttctgggccacataccgggcctacagagtcgcattccattcaacctccggtttcgagacttcgaagatggtgagctccacaggatcctcgttcggcttatcagaaaaaggttcaaaggcaagatgcaagtcgaagacggtctcgatgggctgtacatgcggattatggtgcggcgaattggccgaggccgcaaccgggccggttttggcaacgcaagagatgttcaaaacagcctcattgggatacttttccgccaagctgctcgtctagccgccagaccggacgaaaaccatttctttctcaccaaggctgatctcattggcccacctccaacgacagcactggaaaatagcacagcatggagaagcctgcgtgaaatgattggcctcgattccgttaaggggtctgtacaagcgttgatcgatcaactccagatcaattatgaacgagagctggctgagcaacccctggtcgcatcttctcttcacaaggttttcctcggcaatccaggtaccgggaaaacaacggtcgctagatattacggccaaattctagtagatatcggcctgctcagccatagcgaggtcatgaccaagacaccaacagattttataggaggggctctaggagagtcagagaataatacaaaggcaatcctcgactcggcccagggtagagttctcatcattgacgaagctcatggtttggccgacatatcagacgggtccaccgatgtcactttgagaaactcatacaaaacggcggtgattgatacgattgtggccgaggtacagagcgcggcgagcgaggatcgctgcgtattgttactaggtcacaaagacaaaatggaggccatgtttcaaagtgtcaatcccgctctaggacaaaggttccccttatcatccgcttttgacttcgaggattattcgccagacgaaatgcgacaaattttagacctgcgattgaccgagtcgggattcattgcgtcggagagcgcgaaagaaattgccatgagggtgctcgatcaatcacgaaaccaccgcaactatggaaatggggctgaggtaaacatattactagaacaagccaagatccggcatcaaaagaggctatctgctctgaagagcgatagagacgcttatccggaattaaagccgcaagacttcgatcccgagttcgacagaatggaaagcgcggaaactaaaatccgccagatcttcgacgactttgtcggggccgggaccttgatcgacaagttggagcgctttcagcgcattgcaaataccaaagcgcgtggtgtagatgcccagtcgttgatcccctttaccttccttttcagaggaccgccgggcttaggtaccggcaagaccactagcgcccgccgtatgggtcaagtcttctacaatatgggcttgctagcaacggcagaggtcgtcacttgctctggaaccgatcttgttggcgaatatgttgggcagacaggtccgaaaacgcaaaagattttccaaagagctcttggaaaagtactttttgtcgatgaggcataccatctgtctgacagtcattacggacacgaagctgttaccgagatgatgaacctcttgacgcaagatcggtacaatagaaagatgatagtgatcctggctggttacgccgaggatattaatcgattgacatcaatcaaccctggcttcagtagccgcttccctgaagttctcgagttcaaccaccttacgcccgaccaatgtttcgaactcctcgtccgctgtttgagggaacaacgccttggcacgatgaccatcagtcagctagcggataccaacctggtcaaggcgttcgaggacctggctgcccttccggggtggggaaatgccagagacgttcagacaattgccaaatctatcattgtctcaatcatcgtgtcatctacgcagcagcagcatctaaatacggttgtgacagacgaaacagtgcagagggaagtggaccaaatgctggaagaacggagacgaagggccaaagacgcccaagacgacaatagcgggccccagtcctcagccacccgtacgaaaagtgctgcattctctaaagaaatgtcattcaaggagctgcataaagtcatggaaaggcagaagaagaattggtacaacgtggacaaaaacgaggaatggcaagctcctcacagcgaacgcgggcaggcgtccgtcaagcccgtccagacacagacggacgctactgacaacaatacgactcgggaagtgggcgtctcggacgcgacttgggctcggcttgaagaagccaaggcgcagacgaagaagaggagagaggagatggatatttgcagcgccgaggtcgcgcacctggaaagcgagctggcacgcagcccctcggagattactattgcacaacgtttggcagatcagcaaaagtccctcgcggacatgaaaggcgcagaagacgtagaggcagctatcataggccaattgatggagtccggactttgtccttttggattccagtggattaaggggagcaatggctattactgcgcaggcggctcacatttcaagtctcacgagggaattcgcgcggattattatataggatga

SEQ ID NO: 27655 - protein, 1578 aa, Muscodor strobelii
  misc_feature: SGI Peptide ID NO. 569477
  misc_feature (1152)..(1343): Pfam Id: PF00004 Pfam Desc: ATPase family associated with various cellular activities (AAA)
  misc_feature (1152)..(1225): Pfam Id: PF00004 Pfam Desc: ATPase family associated with various cellular activities (AAA)
  misc_feature (532)..(1567): NCBI GI: 85091508 Blast Desc: NCU09357 [Neurospora crassa OR74A] gi|28920328|gb|EAA29700.1| [Neurospora crassa OR74A]
  misc_feature (530)..(1571): NCBI GI: 67900518 Blast Desc: AN7246.2 [Aspergillus nidulans FGSC A4] gi|40742103|gb|EAA61293.1| AN7246.2 [Aspergillus nidulans FGSC A4] gi|259483410|tpe|CBF78777.1| TPA: conserved [Aspergillus FGSC
  misc_feature (534)..(1571): NCBI GI: 238490142 Blast Desc: nonsense-mediated mRNA decay protein, [Aspergillus flavus NRRL3357] gi|220696721|gb|EED53062.1| nonsense-mediated mRNA decay protein, [Aspergillus flavus NRRL3357]
  misc_feature (532)..(1568): NCBI GI: 242766202 Blast Desc: conserved [Talaromyces stipitatus ATCC 10500] gi|218724321|gb|EED23738.1| conserved [Talaromyces stipitatus ATCC 10500]
  misc_feature (534)..(1567): NCBI GI: 255931051 Blast Desc: Pc12g01870 [Penicillium chrysogenum Wisconsin 54-1255] gi|211581701|emb|CAP79814.1| Pc12g01870 [Penicillium chrysogenum Wisconsin 54-1255]
  misc_feature (534)..(1568): NCBI GI: 46110497 Blast Desc: FG02130.1 [Gibberella zeae PH-1]
  misc_feature (428)..(1568): NCBI GI: 121717079 Blast Desc: AAA family ATPase, [Aspergillus clavatus NRRL 1] gi|119404159|gb|EAW14576.1| AAA family ATPase, [Aspergillus clavatus NRRL 1]
  misc_feature (534)..(1573): NCBI GI: 189197439 Blast Desc: stage V sporulation protein K [Pyrenophora tritici-repentis Pt-1C-BFP] gi|187981005|gb|EDU47631.1| stage V sporulation protein K [Pyrenophora tritici-repentis Pt-1C-BFP]
  misc_feature (533)..(1565): NCBI GI: 261360511 Blast Desc: cbbX [Verticillium albo-atrum VaMs.102]
  misc_feature (534)..(1571): NCBI GI: 256728789 Blast Desc: NECHADRAFT_72601 [Nectria haematococca mpVI 77-13-4]
  misc_feature: Useful for introducing or modulating the production of volatile compounds
MGQVQGSVLSSTIKEGPGSNLLSVRAGKPRGSSDANVDNLATDNGAIDRGPVASHHIIPGWFRSQAIWMPEDIDAKPINLRIIDDTVRQDAEHTSKDATQGSQGSNTELEAEVRSFTVHKDVYSDLRDIIAAACVTDTQGQLRASETSVHAKYNSSDGLALCNAVVNYLAKDMCASLVFFDLESMKDLALDFHEQDKAKRELDAPVSDKSEPSNDDDLESEIDDNDEYALFNHYFDPKPKRNTRKEARKGSISEIASLLPSLDIEETKEPTTTSHQSALLLCVHIPEMSYYGDGFKSTFLDNVWDAVEERRKKGNPSVLICTTKNNTSSHVLGRKLRIGKANTVDLVSCDNNNNNNDDNNDDNNNNGKENTTLDLQIGLTNVRQLKRMLRRRIGHAFGEGDLLDPLTDWESKGLPSQSMAKASWSQDDLHRAVKHIVACYKEQSKIDLDDVRQVLTHMRLFNDQTNEATATLQNGNTNINHDSGDEEHQDLDEDVSDDVGAARNDDVSHNESGSGDRNEMEDTDFAKAWPTLNSPANQTWQEQKAVHKQSNAALDELMDMIGLESIKERFMEIKNLVDTSRRQHVDLTNEFFGCLFVGKAGSGKTSIAALYAQFLSLLELVPSHRLMTTTGIQLSKGGIAECKKVIEKLETPSRPFDSSPNHGGVLVVDHAHQLNTSGSAVQDFLLGEIERLRGRVVFIFTGYPGPMDTFLGHIPGLQSRIPFNLRFRDFEDGELHRILVRLIRKRFKGKMQVEDGLDGLYMRIMVRRIGRGRNRAGFGNARDVQNSLIGILFRQAARLAARPDENHFFLTKADLIGPPPTTALENSTAWRSLREMIGLDSVKGSVQALIDQLQINYERELAEQPLVASSLHKVFLGNPGTGKTTVARYYGQILVDIGLLSHSEVMTKTPTDFIGGALGESENNTKAILDSAQGRVLIIDEAHGLADISDGSTDVTLRNSYKTAVIDTIVAEVQSAASEDRCVLLLGHKDKMEAMFQSVNPALGQRFPLSSAFDFEDYSPDEMRQILDLRLTESGFIASESAKEIAMRVLDQSRNHRNYGNGAEVNILLEQAKIRHQKRLSALKSDRDAYPELKPQDFDPEFDRMESAETKIRQIFDDFVGAGTLIDKLERFQRIANTKARGVDAQSLIPFTFLFRGPPGLGTGKTTSARRMGQVFYNMGLLATAEVVTCSGTDLVGEYVGQTGPKTQKIFQRALGKVLFVDEAYHLSDSHYGHEAVTEMMNLLTQDRYNRKMIVILAGYAEDINRLTSINPGFSSRFPEVLEFNHLTPDQCFELLVRCLREQRLGTMTISQLADTNLVKAFEDLAALPGWGNARDVQTIAKSIIVSIIVSSTQQQHLNTVVTDETVQREVDQMLEERRRRAKDAQDDNSGPQSSATRTKSAAFSKEMSFKELHKVMERQKKNWYNVDKNEEWQAPHSERGQASVKPVQTQTDATDNNTTREVGVSDATWARLEEAKAQTKKRREEMDICSAEVAHLESELARSPSEITIAQRLADQQKSLADMKGAEDVEAAIIGQLMESGLCPFGFQWIKGSNGYYCAGGSHFKSHEGIRADYYIG

SEQ ID NO: 27656 - DNA, 1506 bp, Muscodor strobelii
  misc_feature: SGI cDNA ID NO. 569478
  misc_feature: Elevated expression when VOC is produced
  misc_feature: Encodes the peptide sequence at SEQ ID NO 27657
atgaatttcgcaatgtctggtctcagcaatgctctgagttggcaatctctcatcatcgagttgcttgtccttatctccactgtcatcgtcttcaggcggtacttatcccctttacgcgatgtcctggggccattcttcgccacgttcagcagactatggcatattgtaactattgtcaaagggaagcagagtatcaagatgcttgagctacatagaaagcatggtcctttcgtacgcattgcacacaatgaagtcagtgtcggccacccagatggaattcgaaatatcctcttgaccccgaacccaaaatcaccgtggtataagctaatggcatttccggactggcgctttcagagcccgctgtctaccatcgaccccaaagcgaagaacgagcggaccagatggcttgcatctggcttcgcgaccaccaatgttttgaagaccgagcacaatatggacaggcagatcagtaggctcaagggttggattgacaattatgttgagtcagggaaaccaatggacctcgacaaattcatcacctattgtacctttgacgtgctcggtgaagtcatgttcagcaaagcgtttggctttctcgatcatggcaccgacgttggggacacaatcgcatggtctggcttgctcaatatgattgtaacatgcggaggatattaccgctggtttctcaacatcatcctaatgaatcccctcataacatctctgactactaccccaatgggttatctgggcgatctgtcacagggcgcgctacaggagcggcgcgacgactcttctgatcacccagatgtcgtcaatctatggttcgagaaccatcgcaaacaccctgaccgtgtctcattccgagacattcaaagtgcaaatgcaacggttattggcgctgggtcagatactgtttcttgcgccacacagtccttcatatatcacttacttcggcatccagataagcttaggaaagctagagacgaaattgaatactatcgaaagacggaaggcgcttgctacgggcgtatcatctcctttgctgacacacaaaagctgacgtatgtcaacgcttgtatcaaagagggcatacgagtgtttactccggttcaatggcaattggctcgacaagcggcaaagggcggcgtgacaattggcagccgaatatttcctgaaggaaccttgttgtcaattaatccgcacgtaatgcatcgcagctacgaaatctggggcgacgacgcagacgagttccgcccagagcgttggctagaagaagaaaatgcgtcacgcgagaaatactttatcccatggggggcagggttcgcatcttgtcctggccaaaatgttgcaaagatggagttacccaagttgattgcaacattactacgagattatgaatttgaacaagtgaacaagggtcaagaatggagctatgaagctacctttgggcttctaccttacaattggcctgtgtatgtgagaacgactagcttgtatgatacatga

SEQ ID NO: 27657 - protein, 501 aa, Muscodor strobelii
  misc_feature: SGI Peptide ID NO. 569478
  misc_feature (42)..(493): Pfam Id: PF00067 Pfam Desc: Cytochrome P450
  misc_feature (276)..(493): Pfam Id: PF00067 Pfam Desc: Cytochrome P450
  misc_feature (12)..(495): NCBI GI: 171681285 Blast Desc: protein product [Podospora anserina] gi|170940601|emb|CAP65829.1| protein product [Podospora anserina]
  misc_feature (30)..(494): NCBI GI: 226288602 Blast Desc: benzoate 4-monooxygenase cytochrome P450 [Paracoccidioides brasiliensis Pb18]
  misc_feature (30)..(494): NCBI GI: 225681467 Blast Desc: conserved [Paracoccidioides brasiliensis Pb03]
  misc_feature (5)..(493): NCBI GI: 225554831 Blast Desc: benzoate 4-monooxygenase cytochrome P450 [Ajellomyces capsulatus G186AR]
  misc_feature (5)..(494): NCBI GI: 154272385 Blast Desc: conserved [Ajellomyces capsulatus NAm1] gi|150409032|gb|EDN04488.1| conserved [Ajellomyces capsulatus NAm1]
  misc_feature (31)..(493): NCBI GI: 171685284 Blast Desc: protein product [Podospora anserina] gi|170942603|emb|CAP68255.1| protein product [Podospora anserina]
  misc_feature (18)..(494): NCBI GI: 121720124 Blast Desc: benzoate 4-monooxygenase cytochrome P450 [Aspergillus clavatus NRRL 1] gi|119404972|gb|EAW15334.1| benzoate 4-monooxygenase cytochrome P450 [Aspergillus clavatus NRRL 1]
  misc_feature (40)..(433): NCBI GI: 46139819 Blast Desc: FG11424.1 [Gibberella zeae PH-1]
  misc_feature (5)..(436): NCBI GI: 226283340 Blast Desc: benzoate 4-monooxygenase cytochrome P450 [Paracoccidioides brasiliensis Pb01]
  misc_feature (16)..(494): NCBI GI: 145231337 Blast Desc: An02g00150 [Aspergillus niger] gi|134056055|emb|CAK96230.1| protein product [Aspergillus niger]
  misc_feature (38)..(473): SWISSPROT Homolog: EC 1.14.13.12 Benzoate 4-monooxygenase
  misc_feature: Useful for introducing or modulating the production of volatile compounds
MNFAMSGLSNALSWQSLIIELLVLISTVIVFRRYLSPLRDVLGPFFATFSRLWHIVTIVKGKQSIKMLELHRKHGPFVRIAHNEVSVGHPDGIRNILLTPNPKSPWYKLMAFPDWRFQSPLSTIDPKAKNERTRWLASGFATTNVLKTEHNMDRQISRLKGWIDNYVESGKPMDLDKFITYCTFDVLGEVMFSKAFGFLDHGTDVGDTIAWSGLLNMIVTCGGYYRWFLNIILMNPLITSLTTTPMGYLGDLSQGALQERRDDSSDHPDVVNLWFENHRKHPDRVSFRDIQSANATVIGAGSDTVSCATQSFIYHLLRHPDKLRKARDEIEYYRKTEGACYGRIISFADTQKLTYVNACIKEGIRVFTPVQWQLARQAAKGGVTIGSRIFPEGTLLSINPHVMHRSYEIWGDDADEFRPERWLEEENASREKYFIPWGAGFASCPGQNVAKMELPKLIATLLRDYEFEQVNKGQEWSYEATFGLLPYNWPVYVRTTSLYDT

SEQ ID NO: 27658 - DNA, 2449 bp, Muscodor strobelii
  misc_feature: SGI EST ID NO. CUFF.65234.0
  misc_feature: Variant of the nucleotide sequence at SEQ ID NO 27656
tctagctcaatgtgatgtgaagatcacgacatcggaagggcaatggttcagttatagtaagcataccaaagctacaattggatacactataggtacccacattccatttgatcgccgttatttgtaaagcatgtcggtatgagctcccatgatatggatcatacaatcgtacatgaagacctacatccctcttccaagatgctgtacgatttacactataggtgtagatctaaccagaacccctcttgcgcttttcctacatttcttagaggaccttactttagatacccattacatgtatgcaggcctgtagctagatgggcaccctgtacgtcaagcatacatacgtgggtatgctggccggagacagctccgacacttgcgctgcatggcaatcctgtcattcttcgtaacgttcatatggtaacacgggtgacagattctttgattccgctcgatcgttttgtgtattgctttcatgtgttaataagacttgagtccttaggtgcaacgacaaattccgctgaacaggaaaaaaaacttccagtatgatgtattagtaagatgtatttccatcacggcatatctatgtcagtgaaattgagtcaaactggaaatcgtcttagttactctccatgatgtcgagttggcgacatcttagagcgcgaagaaagcaaacgagacgaacaggcgttagacgtccctacttcttctgttatgagaactacacgtacagatacattgttgcaataccttaggtagcaatttgagtgtgcggctactctttgctataatacccacgatgaatttcgcaatgtctggtctcagcaatgctctgagttggcaatctctcatcatcgagttgcttgtccttatctccactgtcatcgtcttcaggcggtacttatcccctttacgcgatgtcctggggccattcttcgccacgttcagcagactatggcatattgtaactattgtcaaagggaagcagagtatcaagatgcttgagctacatagaaagcatggtcctttcgtacgcattgcacacaatgaagtcagtgtcggccacccagatggaattcgaaatatcctcttgaccccgaacccaaaatcaccgtggtataagctaatggcatttccggactggcgctttcagagcccgctgtctaccatcgaccccaaagcgaagaacgagcggaccagatggcttgcatctggcttcgcgaccaccaatgttttgaagaccgagcacaatatggacaggcagatcagtaggctcaagggttggattgacaattatgttgagtcagggaaaccaatggacctcgacaaattcatcacctattgtacctttgacgtgctcggtgaagtcatgttcagcaaagcgtttggctttctcgatcatggcaccgacgttggggacacaatcgcatggtctggcttgctcaatatgattgtaacatgcggaggatattaccgctggtttctcaacatcatcctaatgaatcccctcataacatctctgactactaccccaatgggttatctgggcgatctgtcacagggcgcgctacaggagcggcgcgacgactcttctgatcacccagatgtcgtcaatctatggttcgagaaccatcgcaaacaccctgaccgtgtctcattccgagacattcaaagtgcaaatgcaacggttattggcgctgggtcagatactgtttcttgcgccacacagtccttcatatatcacttacttcggcatccagataagcttaggaaagctagagacgaaattgaatactatcgaaagacggaaggcgcttgctacgggcgtatcatctcctttgctgacacacaaaagctgacgtatgtcaacgcttgtatcaaagagggcatacgagtgtttactccggttcaatggcaattggctcgacaagcggcaaagggcggcgtgacaattggcagccgaatatttcctgaaggaaccttgttgtcaattaatccgcacgtaatgcatcgcagctacgaaatctggggcgacgacgcagacgagttccgcccagagcgttggctagaagaagaaaatgcgtcacgcgagaaatactttatcccatggggggcagggttcgcatcttgtcctggccaaaatgttgcaaagatggagttacccaagttgattgcaacattactacgagattatgaatttgaacaagtgaacaagggtcaagaatggagctatgaagctacctttgggcttctaccttacaattggcctgtgtatgtgagaacgactagcttgtatgatacatgagtcaactcgattagcgagcattgcaaggactgttacatgtaaatgcaaattctggacagtgaagttctaaataaggagcctatggaaaagtatgagttacgcttatatttctcgcctgaaattaagggaaattgatttgag

SEQ ID NO: 27659 - DNA, 831 bp, Muscodor strobelii
  misc_feature: SGI cDNA ID NO. 569479
  misc_feature: Elevated expression when VOC is produced
  misc_feature: Encodes the peptide sequence at SEQ ID NO 27660
atgactgaaaccacagaccaacattctggagcgaaggcacatttcaaagaacatggttgggccgtggtgccctctgtcatttctaaagagagggcagcgactatccttagtagattgtgggaagtagcaggaattcaggagactcgtggttacactcagttcaatcccttcatggatccgaatgtcagcaatgttcgaatttggtatcaaccagagattcacaatatctttgcagaattgagtttcaaccctatcgcactcgagctcattgaggacgctctggggcatcgcccgatactatctaattttaacaccaacattgcccgtccaggatctgagtcgatggcattacactcagatcaaagtttgacatatccgggaccatggaatcacacctgggttgtgaatgcagtatggtgccttaccgacgtgaggggagagaacggtgccacgatgtaccttcccgggtcccacaagttcactagccgacaacaacttccccgaaacgcaccagagctccttgtcccgttcaatgctaaagcaggagatcttttgctgatgagcggcgcactatggcatacgtcaggttcgaaccgtacaaagaatgaagaccgtgctatgctcttcggatactatacttcgcctcatcttcggacgcaggtcaactggactgcgaagatagctagaaatatccaagacatgatgacacctgagcaaagaagactactttgtctagatgacatggttgacctctcggctgaaggcgacttcaggtacctaaagaagcaatacccagattctgcgcagccaatgccgaacggcacatcataa

SEQ ID NO: 27660 - protein, 276 aa, Muscodor strobelii
  misc_feature: SGI Peptide ID NO. 569479
  misc_feature (13)..(207): Pfam Id: PF05721 Pfam Desc: Phytanoyl-CoA dioxygenase (PhyH)
  misc_feature (11)..(265): NCBI GI: 146324635 Blast Desc: phytanoyl-CoA dioxygenase family protein [Aspergillus fumigatus Af293] gi|129555494|gb|EAL85119.2| phytanoyl-CoA dioxygenase family protein [Aspergillus fumigatus Af293]
  misc_feature (11)..(265): NCBI GI: 159124042 Blast Desc: phytanoyl-CoA dioxygenase family protein [Aspergillus fumigatus A1163]
  misc_feature (11)..(265): NCBI GI: 119483546 Blast Desc: phytanoyl-CoA dioxygenase, [Neosartorya fischeri NRRL 181] gi|119409832|gb|EAW19779.1| phytanoyl-CoA dioxygenase, [Neosartorya fischeri NRRL 181]
  misc_feature (9)..(262): NCBI GI: 67541296 Blast Desc: AN6818.2 [Aspergillus nidulans FGSC A4] gi|40739027|gb|EAA58217.1| AN6818.2 [Aspergillus nidulans FGSC A4] gi|259480413|tpe|CBF71521.1| TPA: phytanoyl-CoA dioxygenase
  misc_feature (2)..(246): NCBI GI: 169785235 Blast Desc: [Aspergillus oryzae RIB40] gi|238506211|ref|XP_002384307.1| phytanoyl-CoA dioxygenase family protein [Aspergillus flavus NRRL3357] gi|83775826|dbj|BAE65945.1|
  misc_feature (11)..(243): NCBI GI: 154251308 Blast Desc: phytanoyl-CoA dioxygenase [Parvibaculum lavamentivorans DS-1] gi|154155258|gb|ABS62475.1| Phytanoyl-CoA dioxygenase [Parvibaculum lavamentivorans DS-1]
  misc_feature (5)..(252): NCBI GI: 4895124 Blast Desc: MmcH [Streptomyces lavendulae]
  misc_feature (64)..(243): NCBI GI: 39942702 Blast Desc: MGG_03431 [Magnaporthe grisea 70-15] gi|145010026|gb|EDJ94682.1| MGG_03431 [Magnaporthe grisea 70-15]
  misc_feature (12)..(258): NCBI GI: 196232861 Blast Desc: Phytanoyl-CoA dioxygenase [Chthoniobacter flavus Ellin428] gi|196223060|gb|EDY17580.1| Phytanoyl-CoA dioxygenase [Chthoniobacter flavus Ellin428]
  misc_feature (77)..(243): NCBI GI: 15610769 Blast Desc: Rv3633 [Mycobacterium tuberculosis H37Rv] gi|15843245|ref|NP_338282.1| MT3735 [Mycobacterium tuberculosis CDC1551] gi|31794803|ref|NP_857296.1| Mb3657 [Mycobacterium bovis
  misc_feature: Useful for introducing or modulating the production of volatile compounds
MTETTDQHSGAKAHFKEHGWAVVPSVISKERAATILSRLWEVAGIQETRGYTQFNPFMDPNVSNVRIWYQPEIHNIFAELSFNPIALELIEDALGHRPILSNFNTNIARPGSESMALHSDQSLTYPGPWNHTWVVNAVWCLTDVRGENGATMYLPGSHKFTSRQQLPRNAPELLVPFNAKAGDLLLMSGALWHTSGSNRTKNEDRAMLFGYYTSPHLRTQVNWTAKIARNIQDMMTPEQRRLLCLDDMVDLSAEGDFRYLKKQYPDSAQPMPNGTS

SEQ ID NO: 27661 - DNA, 1326 bp, Muscodor strobelii
  misc_feature: SGI EST ID NO. CUFF.65310.1
  misc_feature: Variant of the nucleotide sequence at SEQ ID NO 27659
cttcatcctctttagtgtggagcatggcccagtcaaaagctaaagtgattcttgtgattgtacatgttgcttattcttgagaagcggaatcggcgatctagatagcttgctttggggcttgaacaatgtcatgaattgcaaccggacgtcattagattagctgtgcaagtcagatgtaatcattgagaatagggtgcatcggaattccatctttgcagtcccgcaagagcataccttaatgttagtctgttatcatatcgctacgtctaattgagatcctcatcaacttgggttttgtctgatactgccaccaacaattgttcactctcactcttagtacacgctgtacccaagtcgttgagcacttcagtacaatgactgaaaccacagaccaacattctggagcgaaggcacatttcaaagaacatggttgggccgtggtgccctctgtcatttctaaagagagggcagcgactatccttagtagattgtgggaagtagcaggaattcaggagactcgtggttacactcagttcaatcccttcatggatccgaatgtcagcaatgttcgaatttggtatcaaccagagattcacaatatctttgcagaattgagtttcaaccctatcgcactcgagctcattgaggacgctctggggcatcgcccgatactatctaattttaacaccaacattgcccgtccaggatctgagtcgatggcattacactcagatcaaagtttgacatatccgggaccatggaatcacacctgggttgtgaatgcagtatggtgccttaccgacgtgaggggagagaacggtgccacgatgtaccttcccgggtcccacaagttcactagccgacaacaacttccccgaaacgcaccagagctccttgtcccgttcaatgctaaagcaggagatcttttgctgatgagcggcgcactatggcatacgtcaggttcgaaccgtacaaagaatgaagaccgtgctatgctcttcggatactatacttcgcctcatcttcggacgcaggtcaactggactgcgaagatagctagaaatatccaagacatgatgacacctgagcaaagaagactactttgtctagatgacatggttgacctctcggctgaaggcgacttcaggtacctaaagaagcaatacccagattctgcgcagccaatgccgaacggcacatcataatggcgatgagagacattttgaatcactagaaaattttatgtatgaaaaagttacaatacatcatgtgcttttcctgtaattatatttgagctccgcagaaaaaaatcaaacattacgagca

SEQ ID NO: 27662 - DNA, 1554 bp, Muscodor strobelii
  misc_feature: SGI cDNA ID NO. 569480
  misc_feature: Elevated expression when VOC is produced
  misc_feature: Encodes the peptide sequence at SEQ ID NO 27663
atggacatcctcaaatttcaagatgtcaaatttggcaatttcactttgtcaaaccctttgcatgcctttggacttgccgctggtatatatgctttgtatgtgttcattttgaccatacgtagaacctggtttcatccattgagccatattcccggcccatggctgggaagagcaagttactggctagagttctaccatgattgtattgcggagggttatgtcaaggtatatcctaagctccacgagaaatatgggccggttgtgcgagttactcctactcgagtgcacataaatgatcccgagtattttcacgagatatacagtattactggtgcaagcaaatatttgaaagatccggagtttttctcgacgagtggtggcataaaacattccgttattatgctcactgatcctgaggtgcatcgagttagacgcaagacaattcaataccttttctctccgaaaggtatggaagaactatcaccccgagttgaagaagtcgtcaagaaaggtttagagaaactgcgactatgctacgaggagaaggcgccagtcgacatgaatcgtattttcaaaggtgtcacggttgatactataatgagattaatggtcgataaagcctttgggcttatcgactcacctgaagaggagcccgagtttgtgaaaaccatgcgcatgtttgcagagaactttccttggcaaaaacattttccaattgtgaacaccatttccgtgataattcctcaatcgtgggcagagtggatggtccccggctatgctcgatttcggaagcaatgtggtgtatggatcgacgaagtaagcgaaagacataaaaacggtatatacacaggcgaagatggccgatccacaatttttgatctatttcttcggccaaacacggagaagggccagttgaacctctctagggatgtcctaatagacgagatgtttgcattttgttttgctggaacggatacaacaagctatgccctgagcatgggctcctattatctcatgtctaacccatcaaagctcgaaaagatgagactagagttctccacagtgccgacgaacgcagacgggcttttggagtataaagatattcgtaatctgccctatttgtccgccacaatcaaagagattcttcgtcttgcttgccctgttcccggtattacacctcgcgtggtaccagaggagggaatgcaggtcgcaggttactatctgccacaagggtccattatatcactttcaatgcgcatggtacacttcaacgacactgtgtacgagaatccttacgattttatccctgaacgttggctgggcgagagaggcaaagaattagataagtggttcgttactttcagtaaaggaccaagaatgtgcttaggattgaacatgacatatctggaaacttacctctgcttcgccaatttcttcaacaagttcaacttcgagctctacgagactgatgagtcctcttctatgtgggttgatatggtagcagcagctaagtctagaaaaccgatcaaagccatggtcacggggccgaggtag

SEQ ID NO: 27663 - protein, 517 aa, Muscodor strobelii
  misc_feature: SGI Peptide ID NO. 569480
  misc_feature (46)..(513): Pfam Id: PF00067 Pfam Desc: Cytochrome P450
  misc_feature (46)..(491): Pfam Id: PF00067 Pfam Desc: Cytochrome P450
  misc_feature (12)..(498): NCBI GI: 33357704 Blast Desc: CND5p [Botryotinia fuckeliana]
  misc_feature (95)..(517): NCBI GI: 154300515 Blast Desc: BC1G_11081 [Botryotinia fuckeliana B05.10] gi|150856606|gb|EDN31798.1| BC1G_11081 [Botryotinia fuckeliana B05.10]
  misc_feature (20)..(498): NCBI GI: 222154076 Blast Desc: elymoclavine monooxygenase [Epichloe festucae]
  misc_feature (41)..(483): NCBI GI: 145229411 Blast Desc: An01g05900 [Aspergillus niger] gi|134055119|emb|CAK37065.1| protein product [Aspergillus niger]
  misc_feature (37)..(498): NCBI GI: 259489428 Blast Desc: TPA: cytochrome P450, (Eurofung) [Aspergillus nidulans FGSC A4]
  misc_feature (39)..(483): NCBI GI: 115396804 Blast Desc: conserved [Aspergillus terreus NIH2624] gi|114193610|gb|EAU35310.1| conserved [Aspergillus terreus NIH2624]
  misc_feature (30)..(515): NCBI GI: 115390408 Blast Desc: [Aspergillus terreus NIH2624] gi|114195105|gb|EAU36805.1| [Aspergillus terreus NIH2624]
  misc_feature (16)..(504): NCBI GI: 84617617 Blast Desc: cytochrome P450 monoxygenase [Claviceps purpurea]
  misc_feature (25)..(489): NCBI GI: 119472265 Blast Desc: benzoate 4-monooxygenase cytochrome P450 [Neosartorya fischeri NRRL 181] gi|119406456|gb|EAW16407.1| benzoate 4-monooxygenase cytochrome P450 [Neosartorya fischeri NRRL 181]
  misc_feature (31)..(502): NCBI GI: 256731572 Blast Desc: NECHADRAFT_85150 [Nectria haematococca mpVI 77-13-4]
  misc_feature (47)..(488): SWISSPROT Homolog: EC 1.14.13.12 Benzoate 4-monooxygenase
  misc_feature: Useful for introducing or modulating the production of volatile compounds
MDILKFQDVKFGNFTLSNPLHAFGLAAGIYALYVFILTIRRTWFHPLSHIPGPWLGRASYWLEFYHDCIAEGYVKVYPKLHEKYGPVVRVTPTRVHINDPEYFHEIYSITGASKYLKDPEFFSTSGGIKHSVIMLTDPEVHRVRRKTIQYLFSPKGMEELSPRVEEVVKKGLEKLRLCYEEKAPVDMNRIFKGVTVDTIMRLMVDKAFGLIDSPEEEPEFVKTMRMFAENFPWQKHFPIVNTISVIIPQSWAEWMVPGYARFRKQCGVWIDEVSERHKNGIYTGEDGRSTIFDLFLRPNTEKGQLNLSRDVLIDEMFAFCFAGTDTTSYALSMGSYYLMSNPSKLEKMRLEFSTVPTNADGLLEYKDIRNLPYLSATIKEILRLACPVPGITPRVVPEEGMQVAGYYLPQGSIISLSMRMVHFNDTVYENPYDFIPERWLGERGKELDKWFVTFSKGPRMCLGLNMTYLETYLCFANFFNKFNFELYETDESSSMWVDMVAAAKSRKPIKAMVTGPR

SEQ ID NO: 27664 - DNA, 2211 bp, Muscodor strobelii
  misc_feature: SGI EST ID NO. CUFF.65250.0
  misc_feature: Variant of the nucleotide sequence at SEQ ID NO 27662
catcagttaaccctgctatctgacgcttccctgttaattggatgattccaagaatccttcggcgtgtatgcttgcgcattggccagaggtttctgctgaggcgaagtcggcataataatgaactggaccctcgtactgggatatacattgcctcattcatgacgaaaaaggtcttattatcctgatgagctcctgtctatgagtaccgccctgaatcgttttgatactgttgacacgtttctctatcatcacaatttcgccatcatggacatcctcaaatttcaagatgtcaaatttggcaatttcactttgtcaaaccctttgcatgcctttggacttgccgctggtatatatgctttgtatgtgttcattttgaccatacgtagaacctggtttcatccattgagccatattcccggcccatggctgggaagagcaagttactggctagagttctaccatgattgtattgcggagggttatgtcaaggtatatcctaagctccacgagaaatatgggccggttgtgcgagttactcctactcgagtgcacataaatgatcccgagtattttcacgagatatacagtattactggtgcaagcaaatatttgaaagatccggagtttttctcgacgagtggtggcataaaacattccgttattatgctcactgatcctgaggtgcatcgagttagacgcaagacaattcaataccttttctctccgaaaggtatggaagaactatcaccccgagttgaagaagtcgtcaagaaaggtttagagaaactgcgactatgctacgaggagaaggcgccagtcgacatgaatcgtattttcaaaggtgtcacggttgatactataatgagattaatggtcgataaagcctttgggcttatcgactcacctgaagaggagcccgagtttgtgaaaaccatgcgcatgtttgcagagaactttccttggcaaaaacattttccaattgtgaacaccatttccgtgataattcctcaatcgtgggcagagtggatggtccccggctatgctcgatttcggaagcaatgtggtgtatggatcgacgaagtaagcgaaagacataaaaacggtatatacacaggcgaagatggccgatccacaatttttgatctatttcttcggccaaacacggagaagggccagttgaacctctctagggatgtcctaatagacgagatgtttgcattttgttttgctggaacggatacaacaagctatgccctgagcatgggctcctattatctcatgtctaacccatcaaagctcgaaaagatgagactagagttctccacagtgccgacgaacgcagacgggcttttggagtataaagatattcgtaatctgccctatttgtccgccacaatcaaagagattcttcgtcttgcttgccctgttcccggtattacacctcgcgtggtaccagaggagggaatgcaggtcgcaggttactatctgccacaagggtccattatatcactttcaatgcgcatggtacacttcaacgacactgtgtacgagaatccttacgattttatccctgaacgttggctgggcgagagaggcaaagaattagataagtggttcgttactttcagtaaaggaccaagaatgtgcttaggattgaacatgacatatctggaaacttacctctgcttcgccaatttcttcaacaagttcaacttcgagctctacgagactgatgagtcctcttctatgtgggttgatatggtagcagcagctaagtctagaaaaccgatcaaagccatggtcacggggccgaggtagttgcgtgatccaaaaatacacaaaggtcgtgctggggaaattcggcgagccaagagcaagccaagcggaggcatggggtatgccaaggacgggggttacagagatggtctacgcgctggcaagggcttttggcgtttctgtgaagaacttgaggggaatcacgtccagtcagtttgcaagcacggagtgtatcagtcctatagaaacaccggatatgtgatgtccacttacgacactatgtaagctacgtactcttggcaaaaggcgaattgcgcacttaattcttacatctgcaaaataaatcatgttctgccttttcaagattagtctcgactgtaggactgactttaaaacgcgtagatcgcaaaatgggttatcagaccaacccattgc

SEQ ID NO: 27665 - DNA, 1263 bp, Muscodor strobelii
  misc_feature: SGI cDNA ID NO. 569481
  misc_feature: Elevated expression when VOC is produced
  misc_feature: Encodes the peptide sequence at SEQ ID NO 27666
atgggagaacactcagccacgacaacgcgcaagagaaattttgacgctatggacgaactggctattccaccagcaaaggcgccttcactgagatcgaactcttcagagcccgatctcttcgattcgatgtctactggaagcgtctccgttgaaagccccactgacgattgtcccgtgaacgagaatcaggatgctactcatgctgttaacattcctgatatgttctcctccatcatgtccattgagccattgataaaccctcactatgagactatcaaacctgaagctgatgcatgggctgcgatgatctatgacttggatgagaagatggcgaatcgaaacgcaaaggcggattttgcgtacatgaacgctatatgggctcctcacgcagatgaggaagcgtacagaatgatggtagattggcaccactgggcatgttatatcttctctatacggtcggagcaattgctaacagacttatttaaggtattcgcgtttgatgaccagttcgatgaggggcatctatcagatgacttagatctcgcaaagcaagagattgaagccacggttgcgatcatgggcgatcatccaccgatttcgaaagaagaaaatccaatcaggcatgtatttcaaaccacgtggaagagactacaaaagcgcgctggccctgagcagcaactgagatggattaaaaaccataaagattactttacaggattgatccgtcaagtagagatacagcaaacgcaaaaaaagcttactattgacgagtacattgactttcgaagacagtcaattggtgctatgccgtcctgctccctggtcgaatacgcatgcgatatcaacatttcccagtctgtgctagaccatccgtctatcgtagaatgcgagaaaatctcagcggatcttgtttatcttgtgaatgacattctatctctgagaaaagatctcgaatttggtgtcgagcataacctcatcatcttgttgaaaaaacagggtctgagtgagcaagcggccgtggacaagattcaggacatgcttgacgactgctataaacgatggtaccgtgcattagcagagatgccaatctggggagaggcgattgacaaggaggtattgaagtatattgacgcgtgccgtaacattgctctcggcaatctctattggagcttcaagagcggtagatatttgaaggatgagggcccacaagttcgagccacgcgggtcatgaatctgcccttgaagagtgcagcttctgtatga

SEQ ID NO: 27666 - protein, 420 aa, Muscodor strobelii
  misc_feature: SGI Peptide ID NO. 569481
  misc_feature (110)..(355): Pfam Id: PF03936 Pfam Desc: Terpene synthase family, metal binding domain
  misc_feature (213)..(352): Pfam Id: PF03936 Pfam Desc: Terpene synthase family, metal binding domain
  misc_feature (69)..(413): NCBI GI: 33357703 Blast Desc: CND15p [Botryotinia fuckeliana]
  misc_feature (49)..(413): NCBI GI: 46139625 Blast Desc: FG11327.1 [Gibberella zeae PH-1]
  misc_feature (69)..(420): NCBI GI: 145604190 Blast Desc: MGG_10671 [Magnaporthe grisea 70-15] gi|145012237|gb|EDJ96893.1| MGG_10671 [Magnaporthe grisea 70-15]
  misc_feature (62)..(410): NCBI GI: 115433376 Blast Desc: conserved [Aspergillus terreus NIH2624] gi|114189677|gb|EAU31377.1| conserved [Aspergillus terreus NIH2624]
  misc_feature (60)..(417): NCBI GI: 238495510 Blast Desc: pentalenene synthase, [Aspergillus flavus NRRL3357] gi|220695641|gb|EED51984.1| pentalenene synthase, [Aspergillus flavus NRRL3357]
  misc_feature (63)..(416): NCBI GI: 121710890 Blast Desc: terpene synthase metal binding domain protein [Aspergillus clavatus NRRL 1] gi|119401211|gb|EAW11635.1| terpene synthase metal binding domain protein [Aspergillus clavatus NRRL
  misc_feature (63)..(417): NCBI GI: 119497923 Blast Desc: terpene synthase metal binding domain protein [Neosartorya fischeri NRRL 181] gi|119413883|gb|EAW23822.1| terpene synthase metal binding domain protein [Neosartorya NRRL
  misc_feature (43)..(418): NCBI GI: 46127607 Blast Desc: FG08181.1 [Gibberella zeae PH-1]
  misc_feature (100)..(412): NCBI GI: 145235443 Blast Desc: An03g04890 [Aspergillus niger] gi|134058052|emb|CAK38281.1| protein product [Aspergillus niger]
  misc_feature (110)..(398): NCBI GI: 145242696 Blast Desc: An09g06090 [Aspergillus niger] gi|134078476|emb|CAL00339.1| protein product [Aspergillus niger]
  misc_feature (111)..(396): SWISSPROT Homolog: EC 4.2.3.7 Pentalenene synthase
  misc_feature: Useful for introducing or modulating the production of volatile compounds
MGEHSATTTRKRNFDAMDELAIPPAKAPSLRSNSSEPDLFDSMSTGSVSVESPTDDCPVNENQDATHAVNIPDMFSSIMSIEPLINPHYETIKPEADAWAAMIYDLDEKMANRNAKADFAYMNAIWAPHADEEAYRMMVDWHHWACYIFSIRSEQLLTDLFKVFAFDDQFDEGHLSDDLDLAKQEIEATVAIMGDHPPISKEENPIRHVFQTTWKRLQKRAGPEQQLRWIKNHKDYFTGLIRQVEIQQTQKKLTIDEYIDFRRQSIGAMPSCSLVEYACDINISQSVLDHPSIVECEKISADLVYLVNDILSLRKDLEFGVEHNLIILLKKQGLSEQAAVDKIQDMLDDCYKRWYRALAEMPIWGEAIDKEVLKYIDACRNIALGNLYWSFKSGRYLKDEGPQVRATRVMNLPLKSAASV

SEQ ID NO: 27667 - DNA, 1504 bp, Muscodor strobelii
  misc_feature: SGI EST ID NO. CUFF.65297.1
  misc_feature: Variant of the nucleotide sequence at SEQ ID NO 27665
tattcgcgtttgatgaccagttcgatgaggggcatctatcagatgacttagatctcgcaaagcaagagattgaagccacggttgcgatcatgggcgatcatccaccgatttcgaaagaagaaaatccaatcaggcatgtatttcaaaccacgtggaagagactacaaaagcgcgctggccctggtaagttgtctttactctgttgcacaacgccagttctgcttttgtaacctttcgacccccaattaacagatcaatagagcagcaactgagatggattaaaaaccataaagattactttacaggattgatccgtcaagtagagatacagcaaacgcaaaaaaagcttactattgacgagtacattgactttcgaagacagtcaattggtgctatgccgtcctgctccctggtcgaatacgcatgcgatatcaacatttcccagtctgtgctagaccatccgtctatcgtagaatgcgagaaaatctcagcggatcttgtttatcttgtgaatgacattctatctctgagaaaagatctcgaatttggtgtcgagcataacctcatcatcttgttgaaaaaacagggtctgagtgagcaagcggccgtggacaagattcaggacatgcttgacgactgctataaacgatggtaccgtgcattagcagagatgccaatctggggagaggcgattgacaaggaggtattgaagtatattgacgcgtgccgtaacattgctctcggcaatctctattggagcttcaagagcggtagatatttgaaggatgagggcccacaagttcgagccacgcgggtcatgaatctgcccttgaagagtgcagcttctgtatgattagtgccgaacggctcgggccgagggaccgtgttggcatcgcgtagagagttaagacatcccgtgcttgagtatttgagacaccttcttttgacatgagatggctgggttttgaaagggcaagggttggcaagagttgaaacgtttattatggaagattattctgtgatttgttatgcaatacccttctgcgactttaggtgacagagcttatgctatgcctgtcgcgacccgaccggatgctcgctaaatgacactgtgctaggatacaagtcccgacaagacatagttgaaatgagaaaaagaagccgtaaagtctctgaagagatcaagatcgtgaaactctgttctcgaaactgagaattaatgcaagtccagactgtttctccgctgtcaaaaagagtgggagaccaatggcgagttggggtttacaagtggctagcgagaagaggtcattagtggtcgcagtgaagaactacctaaccaggtgcaacaaacctcagcgctatgaataacacaagcatatgcctgtagatccagtcctagcctctgcgatcagtccaagccttcccaccgtcgtcaattcggcgctcattaggtagccaacgaacatcccctaagtcattcagtcgtctgttcaacacgttattg

SEQ ID NO: 27668 - DNA, 1539 bp, Muscodor strobelii
  misc_feature: SGI cDNA ID NO. 569482
  misc_feature: Elevated expression when VOC is produced
  misc_feature: Encodes the peptide sequence at SEQ ID NO 27669
atgttgtcgctgcctctggaagcccaacatgtacccgtattacttcctgtcctcgttcttacagctctattctatgctactggagtgatttattatcgactcaatcagcatccccttgctaagttcccaggccccaaactggcagccgtcacatatctatacgaggcatactacgatatcatcaaacgggggaaatatgtgcacagaattgaggaaatgcatcgacaatatgggcctattatccgcattaatcctcacgaactccacgtgtatgacccatccttctatgattctgtgtactctggcagcgggaagtggtctaagccgccgtacatgattcggtccatggatccgggctattctgtcttcgggacaatcgatcatgaccaccacagactgcgccggggcgccttggacagatttttttccaagcaaaagatcaatgccttgcaacatgttgtccaagacctagcaaataaaacttgcgacaagttagaaaagcattgcaatactggagttcccgttgacatggaaggagcctttggtgatttcacattagatgtggtcgctcaatacacaattgactcaaatcttggattggttgatcgtgacggcttcacgagtgaaattcgcaagacattcaggggtttaggcgagtttgggcatttggtcaaggccttccccattcttttgaccattttctataatctacctaagtggcttgttttggctttgaactctaacatcaaggtgcttttggattgggatgatacatgtttgagtttcgcaaatgacttgctgagcaagagtccggacgagacaaaggaacatcctaccgtattgcgcgaaatcattgcggatccggatctgggtccattagagaaaacaccgaagcgtctcatgttcgaggcgaagatcattttgaatgcaggcaccggcacaggatcgtggacattgaccacagccatttggtatctgaccaccaacccagatatgcttgcacggcttcgagacgagattcggactgtgatgccagatccccgaaaccctccaaaataccaagaactagaacagcttccgtacttcactgcagtaattaaagaatctcttcgtctgggattcggcgcgtcaatgcgttcggctcgagctgcaccagaccgagagcttcattatcaggattgggtgatcccaccaaatacttcgatcagtctatcgatacctcacatgcattacaatccgcaggtgtttccagaaccatttagtttcgatcccgagagatggctaggagaattggaagagcgacatgctctagaaagattcttagtgcctttttcaaaaggtacaagaaactgcatgggccaaaatctcgcgtgggctgaactttacatcatgatctcacagtgtgtcatgcgagttgacttggagccattcgagactacaattgaacacatcgagatgtacagcgatatgatcgtttcggaaccaaaacgctggaaggaaggtccaaggtttctagtcaagaacgtcattggatattaa

SEQ ID NO: 27669 - protein, 512 aa, Muscodor strobelii
  misc_feature: SGI Peptide ID NO. 569482
  misc_feature (45)..(502): Pfam Id: PF00067 Pfam Desc: Cytochrome P450
  misc_feature (306)..(502): Pfam Id: PF00067 Pfam Desc: Cytochrome P450
  misc_feature (17)..(506): NCBI GI: 259484233 Blast Desc: TPA: cytochrome P450, (Eurofung) [Aspergillus nidulans FGSC A4]
  misc_feature (14)..(509): NCBI GI: 145234316 Blast Desc: An02g13980 [Aspergillus niger] gi|134057475|emb|CAK48829.1| protein product [Aspergillus niger]
  misc_feature (32)..(506): NCBI GI: 67902644 Blast Desc: AN8309.2 [Aspergillus nidulans FGSC A4] gi|40747776|gb|EAA66932.1| AN8309.2 [Aspergillus nidulans FGSC A4]
  misc_feature (14)..(496): NCBI GI: 119472265 Blast Desc: benzoate 4-monooxygenase cytochrome P450 [Neosartorya fischeri NRRL 181] gi|119406456|gb|EAW16407.1| benzoate 4-monooxygenase cytochrome P450 [Neosartorya fischeri NRRL 181]
  misc_feature (32)..(496): NCBI GI: 255954549 Blast Desc: Pc21g09910 [Penicillium chrysogenum Wisconsin 54-1255] gi|211589738|emb|CAP95888.1| Pc21g09910 [Penicillium chrysogenum Wisconsin 54-1255]
  misc_feature (1)..(506): NCBI GI: 240106487 Blast Desc: Cytochrome P450 family protein [Coccidioides posadasii C735 delta SOWgp]
  misc_feature (17)..(507): NCBI GI: 169765436 Blast Desc: [Aspergillus oryzae RIB40] gi|83765044|dbj|BAE55187.1| protein product [Aspergillus oryzae]
  misc_feature (32)..(510): NCBI GI: 115391483 Blast Desc: [Aspergillus terreus NIH2624] gi|114194170|gb|EAU35870.1| [Aspergillus terreus NIH2624]
  misc_feature (18)..(507): NCBI GI: 121713434 Blast Desc: benzoate 4-monooxygenase cytochrome P450 [Aspergillus clavatus NRRL 1] gi|119402481|gb|EAW12902.1| benzoate 4-monooxygenase cytochrome P450 [Aspergillus clavatus NRRL 1]
  misc_feature (3)..(510): NCBI GI: 238501248 Blast Desc: cytochrome P450, [Aspergillus flavus NRRL3357] gi|220692095|gb|EED48442.1| cytochrome P450, [Aspergillus flavus NRRL3357]
  misc_feature (135)..(480): SWISSPROT Homolog: EC 1.14.14.1 Unspecific monooxygenase
  misc_feature: Useful for introducing or modulating the production of volatile compounds
MLSLPLEAQHVPVLLPVLVLTALFYATGVIYYRLNQHPLAKFPGPKLAAVTYLYEAYYDIIKRGKYVHRIEEMHRQYGPIIRINPHELHVYDPSFYDSVYSGSGKWSKPPYMIRSMDPGYSVFGTIDHDHHRLRRGALDRFFSKQKINALQHVVQDLANKTCDKLEKHCNTGVPVDMEGAFGDFTLDVVAQYTIDSNLGLVDRDGFTSEIRKTFRGLGEFGHLVKAFPILLTIFYNLPKWLVLALNSNIKVLLDWDDTCLSFANDLLSKSPDETKEHPTVLREIIADPDLGPLEKTPKRLMFEAKIILNAGTGTGSWTLTTAIWYLTTNPDMLARLRDEIRTVMPDPRNPPKYQELEQLPYFTAVIKESLRLGFGASMRSARAAPDRELHYQDWVIPPNTSISLSIPHMHYNPQVFPEPFSFDPERWLGELEERHALERFLVPFSKGTRNCMGQNLAWAELYIMISQCVMRVDLEPFETTIEHIEMYSDMIVSEPKRWKEGPRFLVKNVIGY

SEQ ID NO: 27670 - DNA, 2111 bp, Muscodor strobelii
  misc_feature: SGI EST ID NO. CUFF.65252.0
  misc_feature: Variant of the nucleotide sequence at SEQ ID NO 27668
tctggcagactgagatagtcgggactctcgcataagccgtatgttcctgcgcaaaaaacatcaaatatgttgcgtagatcgaagaagcattcgatcttgaggaattcagggttttggaacgcaacactatattccgaatctccgcctcgttttcgcactctctttgtgtgtctatctagcgtataacagcattattcacacctagcacattgcaacttgactaagatttataagtctgttgagtgacaagttcaactcactatgttgtcgctgcctctggaagcccaacatgtacccgtattacttcctgtcctcgttcttacagctctattctatgctactggagtgatttattatcgactcaatcagcatccccttgctaagttcccaggccccaaactggcagccgtcacatatctatacgaggcatactacgatatcatcaaacgggggaaatatgtgcacagaattgaggaaatgcatcgacaatatgggcctattatccgcattaatcctcacgaactccacgtgtatgacccatccttctatgattctgtgtactctggcagcgggaagtggtctaagccgccgtacatgattcggtccatggatccgggctattctgtcttcgggacaatcgatcatgaccaccacagactgcgccggggcgccttggacagatttttttccaagcaaaagatcaatgccttgcaacatgttgtccaagacctagcaaataaaacttgcgacaagttagaaaagcattgcaatactggagttcccgttgacatggaaggagcctttggtgatttcacattagatgtggtcgctcaatacacaattgactcaaatcttggattggttgatcgtgacggcttcacgagtgaaattcgcaagacattcaggggtttaggcgagtttgggcatttggtcaaggccttccccattcttttgaccattttctataatctacctaagtggcttgttttggctttgaactctaacatcaaggtgcttttggattgggatgatacatgtttgagtttcgcaaatgacttgctgagcaagagtccggacgagacaaaggaacatcctaccgtattgcgcgaaatcattgcggatccggatctgggtccattagagaaaacaccgaagcgtctcatgttcgaggcgaagatcattttgaatgcaggcaccggcacaggatcgtggacattgaccacagccatttggtatctgaccaccaacccagatatgcttgcacggcttcgagacgagattcggactgtgatgccagatccccgaaaccctccaaaataccaagaactagaacagcttccgtacttcactgcagtaattaaagaatctcttcgtctgggattcggcgcgtcaatgcgttcggctcgagctgcaccagaccgagagcttcattatcaggattgggtgatcccaccaaatacttcgatcagtctatcgatacctcacatgcattacaatccgcaggtgtttccagaaccatttagtttcgatcccgagagatggctaggagaattggaagagcgacatgctctagaaagattcttagtgcctttttcaaaaggtacaagaaactgcatgggccaaaatctcgcgtgggctgaactttacatcatgatctcacagtgtgtcatgcgagttgacttggagccattcgagactacaattgaacacatcgagatgtacagcgatatgatcgtttcggaaccaaaacgctggaaggaaggtccaaggtttctagtcaagaacgtcattggatattaaatctctatttgtgcgggaggcggcataagacagttagcccgtaccgggacgacaatagtcgcacattcatgcaccacttttggcgtgtaaagctgggcttaagcaccggcactacgaggcacttgatttttcatgaatgcgcatacaaagcagaagtaatcttgagactaaatgaagagtatgaacattacatgcgaagtataattacaacactcgtccaagggtgtggtcagagggccagcgccagttcccatcgagacagtttaacttccttgttccctaattgcatcgtctcacattatgcattgaaa

SEQ ID NO: 27671 - DNA, 375 bp, Muscodor strobelii
  misc_feature: SGI cDNA ID NO. 569483
  misc_feature: Encodes the peptide sequence at SEQ ID NO 27672
atgtcttcgcccaccccgtccgagtcaccgcattacgtgcacgaggcatgtttcaagatcgatccaagcaacatcgatcaatttctcagcgctctgcgacctctatggaccgccgtctgtcaagaacccgaatgcctattcttcgaaatcatccagtcgactgaggagccaggacggtttcggttcatcgagggttggaccagaggacccaagtggttcttcgaggttcaggccgccagagagtactacgagccatttttcaagatcgccaagccgatgataatagaaagagagatcaaatcttggcaccgaatggaggggtggagctatgtcagtaatgaatggctgagcaagagtgtcaagacgctttcttga

SEQ ID NO: 27672 - protein, 124 aa, Muscodor strobelii
  misc_feature: SGI Peptide ID NO. 569483
  misc_feature (20)..(66): Pfam Id: PF03992 Pfam Desc: Antibiotic biosynthesis monooxygenase
  misc_feature (20)..(112): NCBI GI: 256725404 Blast Desc: NECHADRAFT_82990 [Nectria haematococca mpVI 77-13-4]
  misc_feature (20)..(104): NCBI GI: 242804086 Blast Desc: conserved [Talaromyces stipitatus ATCC 10500] gi|218717650|gb|EED17071.1| conserved [Talaromyces stipitatus ATCC 10500]
  misc_feature (20)..(105): NCBI GI: 242821335 Blast Desc: TSTA_000770 [Talaromyces stipitatus ATCC 10500] gi|218712580|gb|EED12005.1| TSTA_000770 [Talaromyces stipitatus ATCC 10500]
  misc_feature (20)..(112): NCBI GI: 119472527 Blast Desc: NFIA_058150 [Neosartorya fischeri NRRL 181] gi|119406514|gb|EAW16465.1| conserved [Neosartorya fischeri NRRL 181]
  misc_feature (20)..(105): NCBI GI: 115433925 Blast Desc: [Aspergillus terreus NIH2624] gi|114189951|gb|EAU31651.1| [Aspergillus terreus NIH2624]
  misc_feature (13)..(112): NCBI GI: 212538943 Blast Desc: conserved [Penicillium marneffei ATCC 18224] gi|210069369|gb|EEA23460.1| conserved [Penicillium marneffei ATCC 18224]
  misc_feature (15)..(105): NCBI GI: 145237170 Blast Desc: An07g01450 [Aspergillus niger] gi|134075698|emb|CAK96590.1| [Aspergillus niger]
  misc_feature (4)..(107): NCBI GI: 39943428 Blast Desc: [Magnaporthe grisea 70-15] gi|149209345|ref|XP_001522047.1| MGCH7_ch7g164 [Magnaporthe grisea 70-15] gi|86196119|gb|EAQ70757.1| MGCH7_ch7g164 grisea
  misc_feature (20)..(112): NCBI GI: 70992501 Blast Desc: AFUA_6G12200 [Aspergillus fumigatus Af293] gi|66848732|gb|EAL89061.1| AFUA_6G12200 [Aspergillus fumigatus Af293] gi|159124670|gb|EDP49788.1| AFUB_078200 [Aspergillus
  misc_feature (1)..(93): NCBI GI: 91786262 Blast Desc: antibiotic biosynthesis monooxygenase [Polaromonas sp. JS666] gi|91695487|gb|ABE42316.1| Antibiotic biosynthesis monooxygenase [Polaromonas sp. JS666]
MSSPTPSESPHYVHEACFKIDPSNIDQFLSALRPLWTAVCQEPECLFFEIIQSTEEPGRFRFIEGWTRGPKWFFEVQAAREYYEPFFKIAKPMIIEREIKSWHRMEGWSYVSNEWLSKSVKTLS

SEQ ID NO: 27673 - DNA, 735 bp, Muscodor strobelii
  misc_feature: SGI EST ID NO. CUFF.65255.0
  misc_feature: Variant of the nucleotide sequence at SEQ ID NO 27671
aaaaattgcaatttcgtagtcacacttccgtcatgtcttcgcccaccccgtccgagtcaccgcattacgtgcacgaggcatgtttcaagatcgatccaagcaacatcgatcaatttctcagcgctctgcgacctctatggaccgccgtctgtcaagaacccgaatgcctattcttcgaaatcatccagtcgactgaggagccaggacggtttcggttcatcgagggttggaccagaggacccaagtggttcttcgaggttcaggccgccagagagtactacgagccatttttcaagatcgccaagccgatgataatagaaagagagatcaaatcttggcaccgaatggaggggtggagctatgtcagtaatgaatggctgagcaagagtgtcaagacgctttcttgatatctgtatgggattcgccataactttactgtcaatttgatattagacaaggcatatatgtggctttcgttgggttggggcttactggatatttccccggttgtattccgaaataggagatgcattcttcgctattcagcatatatcaatcgttcctctacagcgatggcatttcatcgatgagccctcgcaacttggcctccaaactttgtccctgcgcattgggcaaaagtttcccggtcgtagccctatctacaagagtctatctagagcggctgtatcaacacccgggtgtcttaagctggtgctcagatctcgtcgcttcaag

SEQ ID NO: 27674 - DNA, 834 bp, Muscodor strobelii
  misc_feature: SGI cDNA ID NO. 569484
  misc_feature: Encodes the peptide sequence at SEQ ID NO 27675
atgatcgagacgtcggaattcgccgtggtcatatgccacggaagctatcacacacctgctccttacacgcgcttgatagagtcacttcaagctgtgggcattgatgcccactgtcctcaattgccgacttctgacttaacccaactcaatgttggcgaccctgattatcctgacttcgatcttagacctccatcaggcggttacccccaaggcctcgaagatacaaacgtcgtcacgaacatcttagacaaatgtatcgagcatggaaagaaagtgctcatcgttgggcactcgtacggaggctgggtcgcaacgcaggcagcgataccgaggctacaagagaaatataggaaacagctcggtttgaatggcggaatcattggaatcttctatatgggcgcatttattatccctgttggcgaatctgtacactctttcttccaaccaaaagatggtaccttttatgttcccccttttcttgagttccataagcatggcgcagcagggcttgggacaccaaaggacgccgagaagtattttttcagtaagttggagctcaataaaggcaaggaatgggcagccactcttacagcttttcccgttaccactacaagattggataacaatgcgtatgacgcactaccttgtgcctatctgatattggaaggagacttaattttgccaaaagcatatcaggaggggatgattgaaagtcagaaagccttcactgtatatcgatgtccgtcagaccattcgcctcacttgagctggttggagggaactgttgaaacaatacgggacttcattggaaagattactgtcggtatggactag

SEQ ID NO: 27675 - protein, 277 aa, Muscodor strobelii
  misc_feature: SGI Peptide ID NO. 569484
  misc_feature (1)..(272): NCBI GI: 238482275 Blast Desc: conserved [Aspergillus flavus NRRL3357] gi|220700426|gb|EED56764.1| conserved [Aspergillus flavus NRRL3357]
  misc_feature (4)..(268): NCBI GI: 255950782 Blast Desc: Pc22g22640 [Penicillium chrysogenum Wisconsin 54-1255] gi|211593175|emb|CAP99552.1| Pc22g22640 [Penicillium chrysogenum Wisconsin 54-1255]
  misc_feature (1)..(272): NCBI GI: 116203245 Blast Desc: [Chaetomium globosum CBS 148.51] gi|88178025|gb|EAQ85493.1| [Chaetomium globosum CBS 148.51]
  misc_feature (6)..(272): NCBI GI: 145257235 Blast Desc: An04g02910 [Aspergillus niger] gi|134058570|emb|CAK96457.1| protein product [Aspergillus niger]
  misc_feature (1)..(163): NCBI GI: 169765692 Blast Desc: [Aspergillus oryzae RIB40] gi|83765172|dbj|BAE55315.1| protein product [Aspergillus oryzae]
  misc_feature (10)..(267): NCBI GI: 145240765 Blast Desc: An08g09180 [Aspergillus niger] gi|134077553|emb|CAK96697.1| protein product [Aspergillus niger]
  misc_feature (2)..(265): NCBI GI: 145247044 Blast Desc: An12g07180 [Aspergillus niger] gi|134080498|emb|CAK46346.1| protein product [Aspergillus niger]
  misc_feature (9)..(271): NCBI GI: 238490416 Blast Desc: conserved [Aspergillus flavus NRRL3357] gi|220696858|gb|EED53199.1| conserved [Aspergillus flavus NRRL3357]
  misc_feature (8)..(241): NCBI GI: 169773097 Blast Desc: [Aspergillus oryzae RIB40] gi|83768878|dbj|BAE59015.1| protein product [Aspergillus oryzae]
  misc_feature (8)..(241): NCBI GI: 238491036 Blast Desc: conserved [Aspergillus flavus NRRL3357] gi|220697168|gb|EED53509.1| conserved [Aspergillus flavus NRRL3357]
MIETSEFAVVICHGSYHTPAPYTRLIESLQAVGIDAHCPQLPTSDLTQLNVGDPDYPDFDLRPPSGGYPQGLEDTNVVTNILDKCIEHGKKVLIVGHSYGGWVATQAAIPRLQEKYRKQLGLNGGIIGIFYMGAFIIPVGESVHSFFQPKDGTFYVPPFLEFHKHGAAGLGTPKDAEKYFFSKLELNKGKEWAATLTAFPVTTTRLDNNAYDALPCAYLILEGDLILPKAYQEGMIESQKAFTVYRCPSDHSPHLSWLEGTVETIRDFIGKITVGMD

SEQ ID NO: 27676 - DNA, 807 bp, Muscodor strobelii
  misc_feature: SGI cDNA ID NO. 569485
  misc_feature: Encodes the peptide sequence at SEQ ID NO 27677
atggcatcttacttggcgactctcctcaagctcttcaagcgcaagaaggcgccgcctctagcttgttatatgaacctagatcaggatcccgagcatgttcatactgcagcttggtatgtgagaatctacatcatcttcggcttcatcgatgtccaatctctcgcccttgctgagatatttacatcgcaaggttgtaaagcatgcgttgcatcaatgccgaccatactagaatccacgcagaatgccaatctccaggttcttacttacgacgttactttatttgaccacctaggatggaaagacacctttgcaagcccgagatgggacgagcgtctgaagagttacgtccgaatgtggggtcgagacgctctctatactcccatggtcgtcgtgaatggagtggcagatggaggttctcggggcggaaacaaagccgaaatagacgatgtcgtacaccgtgctcgagacattggacacaatgcgggttggaatatttatctggatgcaaacgatacaaatgtcaagatcgactcggacaagatggagatcacccaacatgatgtccttgttattgtctacgaagacaaaatagatgtgaccaaaatcaccaaaggaccaactaaaggtaaaaagctcgagcagaagaatgtggttaaagacattgtcaagattggcgaatggactggcggaaacatgatctatgacttgcctgccactcctgctcagatggctcccgggactgcagctatttgtattgtgcaacgccctcagggtggcccgatcgccgcagttactaggattgtttag

SEQ ID NO: 27677 - protein, 268 aa, Muscodor strobelii
  misc_feature: SGI Peptide ID NO. 569485
  misc_feature (41)..(258): Pfam Id: PF06764 Pfam Desc: Domain of function (DUF1223)
  misc_feature (86)..(238): Pfam Id: PF06764 Pfam Desc: Domain of function (DUF1223)
  misc_feature (1)..(267): NCBI GI: 256723731 Blast Desc: NECHADRAFT_86699 [Nectria haematococca mpVI 77-13-4]
  misc_feature (6)..(263): NCBI GI: 212526248 Blast Desc: conserved [Penicillium marneffei ATCC 18224] gi|210072679|gb|EEA26766.1| conserved [Penicillium marneffei ATCC 18224]
  misc_feature (52)..(263): NCBI GI: 260467411 Blast Desc: protein of function DUF1223 [Mesorhizobium opportunistum WSM2075] gi|259028807|gb|EEW30112.1| protein of function DUF1223 [Mesorhizobium opportunistum WSM2075]
  misc_feature (52)..(263): NCBI GI: 13473812 Blast Desc: mll4533 [Mesorhizobium loti MAFF303099] gi|14024563|dbj|BAB51166.1| mll4533 [Mesorhizobium loti MAFF303099]
  misc_feature (53)..(266): NCBI GI: 269924673 Blast Desc: protein of function DUF1223 [Brevundimonas subvibrioides ATCC 15264] gi|269140953|gb|EEZ67401.1| protein of function DUF1223 [Brevundimonas subvibrioides ATCC 15264]
  misc_feature (52)..(261): NCBI GI: 154245332 Blast Desc: Xaut_1385 [Xanthobacter autotrophicus Py2] gi|154159417|gb|ABS66633.1| protein of function DUF1223 [Xanthobacter autotrophicus Py2]
  misc_feature (53)..(254): NCBI GI: 254419617 Blast Desc: conserved [Brevundimonas sp. BAL3] gi|196185794|gb|EDX80770.1| conserved [Brevundimonas sp. BAL3]
  misc_feature (58)..(267): NCBI GI: 154251854 Blast Desc: Plav_1401 [Parvibaculum lavamentivorans DS-1] gi|154155804|gb|ABS63021.1| protein of function DUF1223 [Parvibaculum lavamentivorans DS-1]
  misc_feature (58)..(264): NCBI GI: 266628680 Blast Desc: protein of function DUF1223 [Caulobacter segnis ATCC 21756] gi|264673157|gb|EEZ36557.1| protein of function DUF1223 [Caulobacter segnis ATCC 21756]
  misc_feature (55)..(261): NCBI GI: 255335738 Blast Desc: protein of function DUF1223 [Hyphomicrobium denitrificans ATCC 51888] gi|255273736|gb|EET66825.1| protein of function DUF1223 [Hyphomicrobium denitrificans ATCC 51888]
MASYLATLLKLFKRKKAPPLACYMNLDQDPEHVHTAAWYVRIYIIFGFIDVQSLALAEIFTSQGCKACVASMPTILESTQNANLQVLTYDVTLFDHLGWKDTFASPRWDERLKSYVRMWGRDALYTPMVVVNGVADGGSRGGNKAEIDDVVHRARDIGHNAGWNIYLDANDTNVKIDSDKMEITQHDVLVIVYEDKIDVTKITKGPTKGKKLEQKNVVKDIVKIGEWTGGNMIYDLPATPAQMAPGTAAICIVQRPQGGPIAAVTRIV

SEQ ID NO: 27678 - DNA, 671 bp, Muscodor strobelii
  misc_feature: SGI EST ID NO. CUFF.65277.0
  misc_feature: Variant of the nucleotide sequence at SEQ ID NO 27676
tacatcgcaaggttgtaaagcatgcgttgcatcaatgccgaccatactagaatccacgcagaatgccaatctccaggttcttacttacgacgttactttatttgaccacctaggatggaaagacacctttgcaagcccgagatgggacgagcgtctgaagagttacgtccgaatgtggggtcgagacgctctctatactcccatggtcgtcgtgaatggagtggcagatggaggttctcggggcggaaacaaagccgaaatagacgatgtcgtacaccgtgctcgagacattggacacaatgcgggttggaatatttatctggatgcaaacgatacaaatgtcaagatcgactcggacaagatggagatcacccaacatgatgtccttgttattgtctacgaagacaaaatagatgtgaccaaaatcaccaaaggaccaactaaaggtaaaaagctcgagcagaagaatgtggttaaagacattgtcaagattggcgaatggactggcggaaacatgatctatgacttgcctgccactcctgctcagatggctcccgggactgcagctatttgtattgtgcaacgccctcagggtggcccgatcgccgcagttactaggattgtttagtcaatggctagcttgagttcttgtgatgggttgtacttggaga

SEQ ID NO: 27679 - DNA, 1146 bp, Muscodor strobelii
  misc_feature: SGI cDNA ID NO. 569486
  misc_feature: Encodes the peptide sequence at SEQ ID NO 27680
atgaagacgatatccatcctatcagctttggtctctagcgcctcagcgactatctactatgcaggtgttgctgaatcgggcggcgagtttggtgcctatggtaccaagggcaccggtattcctggtaccttcggagtcgactacaaatttattgacaatgcggcggttgacatacacgttgatcagaaccatctaaacttattccgagttgcgttcctgctcgagcgaatgtgccctccttctacgggcctcggtgccacgttcgatgcgacgcactggggacattacaaggacgcgattgattacattacggtaacgaaaggcgcatatgccattctcgatccgcataattatatgcgctacggcgatcccagctcccagccttattccggaactgtcattggggacacgagcacagcgggtgcggcgacaacggctcaatttggtgctttctggggcgagttagcaaatcgtttcaaggacaacgaaaaggtcatcttcggtctgatgaacgaaccgcacgacatggcaacctctcttgttctggccaacaaccaagctgctatcactgccatccgtaacgccggcgccaagaatcttatactcatgccagggaacagttggacaggtggccatgcatggacagcagagccagatgcaaacgccgatacattgtacaagtttactgacccggccaacaacactgctatcgatattcatgagtacctcgataccgatttcagtggatcacatcaacaatgtgtcagcgatccggcgactaatttggctgcagtgacgtcttggctcaagacccatcagcttaaggcaatgattaccgagttcggcggcgccaacaatacaggctgcgcgacgatgctgaccaatatgatcacctacatggccaacaaccctgagtacataggttggacggcgtgggcggccggtcccttttggggaacgaatagcccttgctgctcggattcggcccagctgggtagctacgagcctggcagtaaagcagctggcggcgctcccggtctttacgataccgtgtttctccctgtcattgagccgctcgtacctaagcagttgcagtgggctgggcctgcaagcgtatctggtggtgctctgtctacgaagagctaa

SEQ ID NO: 27680 - protein, 381 aa, Muscodor strobelii
  misc_feature: SGI Peptide ID NO. 569486
  misc_feature (23)..(322): Pfam Id: PF00150 Pfam Desc: Cellulase (glycosyl hydrolase family 5)
  misc_feature (1)..(381): NCBI GI: 126302552 Blast Desc: GUN_ROBSP RecName: Full=Endoglucanase 1; AltName: Full=Endoglucanase I; AltName: Full=Endo-1,4-beta-glucanase; AltName: Full=Carboxymethyl-cellulase I; Short=CMCase I; Flags: 1
  misc_feature (1)..(381): NCBI GI: 116199039 Blast Desc: CHGG_07675 [Chaetomium globosum CBS 148.51] gi|88178954|gb|EAQ86422.1| CHGG_07675 [Chaetomium globosum CBS 148.51]
  misc_feature (4)..(372): NCBI GI: 156048212 Blast Desc: SS1G_08837 [Sclerotinia sclerotiorum 1980] gi|154693234|gb|EDN92972.1| SS1G_08837 [Sclerotinia sclerotiorum 1980]
  misc_feature (4)..(372): NCBI GI: 154302933 Blast Desc: BC1G_09210 [Botryotinia fuckeliana B05.10] gi|150855134|gb|EDN30326.1| BC1G_09210 [Botryotinia fuckeliana B05.10]
  misc_feature (17)..(380): NCBI GI: 171693139 Blast Desc: protein product [Podospora anserina] gi|170946518|emb|CAP73319.1| protein product [Podospora anserina]
  misc_feature (17)..(380): NCBI GI: 83894 Blast Desc: protein product [Podospora anserina] gi|170946518|emb|CAP73319.1| protein product [Podospora anserina]
  misc_feature (20)..(320): NCBI GI: 12584219 Blast Desc: AF329732_1 endoglucanase [Volvariella volvacea]
  misc_feature (20)..(320): NCBI GI: 189498328 Blast Desc: endoglucanase [Volvariella volvacea]
  misc_feature (22)..(319): NCBI GI: 38175312 Blast Desc: endoglucanase [Trametes hirsuta] gi|38175314|dbj|BAD01164.1| endoglucanase [Trametes hirsuta]
  misc_feature (20)..(320): NCBI GI: 238493509 Blast Desc: extracellular endoglucanase/cellulase, [Aspergillus flavus NRRL3357] gi|220696485|gb|EED52827.1| extracellular endoglucanase/cellulase, [Aspergillus flavus NRRL3357]
  misc_feature (19)..(381): SWISSPROT Homolog: EC 3.2.1.4 Cellulase
MKTISILSALVSSASATIYYAGVAESGGEFGAYGTKGTGIPGTFGVDYKFIDNAAVDIHVDQNHLNLFRVAFLLERMCPPSTGLGATFDATHWGHYKDAIDYITVTKGAYAILDPHNYMRYGDPSSQPYSGTVIGDTSTAGAATTAQFGAFWGELANRFKDNEKVIFGLMNEPHDMATSLVLANNQAAITAIRNAGAKNLILMPGNSWTGGHAWTAEPDANADTLYKFTDPANNTAIDIHEYLDTDFSGSHQQCVSDPATNLAAVTSWLKTHQLKAMITEFGGANNTGCATMLTNMITYMANNPEYIGWTAWAAGPFWGTNSPCCSDSAQLGSYEPGSKAAGGAPGLYDTVFLPVIEPLVPKQLQWAGPASVSGGALSTKS

SEQ ID NO: 27681 - DNA, 2341 bp, Muscodor strobelii
  misc_feature: SGI EST ID NO. CUFF.65342.1
  misc_feature: Variant of the nucleotide sequence at SEQ ID NO 27679
cttcgaacgagcaatgtttattcagacggttttcaccggcgtcattgagggctctgtgatttcaggcagggctgaatacggcgccggagccagggcctttatgtccgattaacaattgagtctcaataaagggttaaatgaggcgcttcgtgggcttcaggatctcaacgacatgatcgcgctcgatagtattaggagcgcgagacgaggtcaagagtgcacatcagcgcgcaatcttaattgtaggcgttgttgcacaggcgccgtgataccttagccatcggctcctgacgattgctcccgggcgatagggacgtatatgaagatctttctagatctggttcgggtattgcgacaagcgccgaggatctgcacaaattggtacgtccaccggcctgtctgcacgttgccaccctggacaagaaaaccgaaacgggtcggggcctagggctgaaagggcttgggggcgcctgtattcgtgagcggaccattcccctccgccttgttcctcgcatatattccgcttttgagccagcaagaccgtacactttgcagtgtttgcaacatttctccgcaataccgtagccctctccgcacctcgcagctatgcacaattggacgacagaagcaattgctcctggcctgtccgtagtatatgaggcatgcagctccagggatttgccttacggcctacgtgtttccgcaatgctcggggctccggatcagagcgttgaggacgtaaaatgagatcatactcagtagcgcttcatttagacaggtcaatgccttggtctgttcaaaatgttcttaagcgccatgtccgcttgaagtgaggggcttcgaggttcatcagatccgtctcgccatccacgctctgtcaccacagtcaagatgaagacgatatccatcctatcagctttggtctctagcgcctcagcgactatctactatgcaggtgttgctgaatcgggcggcgagtttggtgcctatggtaccaagggcaccggtattcctggtaccttcggagtcgactacaaatttattgacaatgcggcggttgacatacacgttgatcagaaccatctaaacttattccgagttgcgttcctgctcgagcgaatgtgccctccttctacgggcctcggtgccacgttcgatgcgacgcactggggacattacaaggacgcgattgattacattacggtaacgaaaggcgcatatgccattctcgatccgcataattatatgcgctacggcgatcccagctcccagccttattccggaactgtcattggggacacgagcacagcgggtgcggcgacaacggctcaatttggtgctttctggggcgagttagcaaatcgtttcaaggacaacgaaaaggtcatcttcggtctgatgaacgaaccgcacgacatggcaacctctcttgttctggccaacaaccaagctgctatcactgccatccgtaacgccggcgccaagaatcttatactcatgccagggaacagttggacaggtggccatgcatggacagcagagccagatgcaaacgccgatacattgtacaagtttactgacccggccaacaacactgctatcgatattcatgagtacctcgataccgatttcagtggatcacatcaacaatgtgtcagcgatccggcgactaatttggctgcagtgacgtcttggctcaagacccatcagcttaaggcaatgattaccgagttcggcggcgccaacaatacaggctgcgcgacgatgctgaccaatatgatcacctacatggccaacaaccctgagtacataggttggacggcgtgggcggccggtcccttttggggaacgaatagcccttgctgctcggattcggcccagctgggtagctacgagcctggcagtaaagcagctggcggcgctcccggtctttacgataccgtgtttctccctgtcattgagccgctcgtacctaagcagttgcagtgggctgggcctgcaagcgtatctggtggtgctctgtctacgaagagctaaaggggtgtttggtagtgttgtagtttttaactctgtataacatctgtcagcacatcgtactgagtctcccattggcatatttaatcgctgcagcgagtgaacactatgctaagttttggctcctcgactgctgatcctgtgcgcgaatcgctaccatctgcttaatttgcaagagtaacatggtggcgccacccggcatgtcatcatcaaaaaagcagatgaatctacataaatagcgcattacgatatacatcttcgaaatagttgctctatttgcgatatattagcgataaaacgaccttta

SEQ ID NO: 27682 - DNA, 435 bp, Muscodor strobelii
  misc_feature: SGI cDNA ID NO. 569487
  misc_feature: Encodes the peptide sequence at SEQ ID NO 27683
atgaaggtcacgaagaagaagtcagctccgaagaagtttcgggttggcggcaatcaagtccgccgtcactggtcagcaagaacgagatacggaaattcccgacagcgcaacgagagtggtaaacccaaggccctacgctcagactttccggctatcaagttcgcaccgttcatgcgtgtgctagatgagattcgtcaggatatcaagaccaatcttcgcattgagcagtctgccgtgctcgttctccgcgaaatcacagagaccacacttacgtcgctgttcgcagccgctaacctccacaccctccgtgctggccgagtcacattgttcaccaatgacttccagagcgtggtgaagatgatgccccgcagaggtcatcttgctttcggtcccgatggtctcacacaagaggctctggattccgacaagatgtaa

SEQ ID NO: 27683 - protein, 144 aa, Muscodor strobelii
  misc_feature: SGI Peptide ID NO. 569487
  misc_feature (47)..(121): Pfam Id: PF00125 Pfam Desc: Core histone H2A/H2B/H3/H4
  misc_feature (52)..(115): NCBI GI: 194772399 Blast Desc: GF18982 [Drosophila ananassae] gi|195424004|ref|XP_002060911.1| GK25031 [Drosophila willistoni] gi|190632557|gb|EDV44974.1| GF18982 [Drosophila ananassae]
  misc_feature (52)..(126): NCBI GI: 156336942 Blast Desc: NEMVEDRAFT_v1g231526 [Nematostella vectensis] gi|156203556|gb|EDO27652.1| [Nematostella vectensis]
  misc_feature (52)..(115): NCBI GI: 6686276 Blast Desc: NEMVEDRAFT_v1g231526 [Nematostella vectensis] gi|156203556|gb|EDO27652.1| [Nematostella vectensis]
  misc_feature (52)..(115): NCBI GI: 1568559 Blast Desc: histone H3 [Homo sapiens]
  misc_feature (52)..(115): NCBI GI: 17532993 Blast Desc: HIStone family member (his-42) [Caenorhabditis elegans] gi|17534745|ref|NP_496894.1| HIStone family member (his-9) [Caenorhabditis elegans] gi|17534753|ref|NP_496890.1| H3
  misc_feature (52)..(115): NCBI GI: 224009486 Blast Desc: histone H3 [Thalassiosira pseudonana CCMP1335] gi|220970373|gb|EED88710.1| histone H3 [Thalassiosira pseudonana CCMP1335]
  misc_feature (52)..(115): NCBI GI: 195361383 Blast Desc: GM19351 [Drosophila sechellia] gi|194127719|gb|EDW49762.1| GM19351 [Drosophila sechellia]
  misc_feature (52)..(115): NCBI GI: 2116601 Blast Desc: Histone H3 [Drosophila simulans]
  misc_feature (52)..(126): NCBI GI: 156382552 Blast Desc: [Nematostella vectensis] gi|156219675|gb|EDO40554.1| [Nematostella vectensis]
  misc_feature (52)..(115): NCBI GI: 241152587 Blast Desc: histone H3, [Ixodes scapularis] gi|215493973|gb|EEC03614.1| histone H3, [Ixodes scapularis]
MKVTKKKSAPKKFRVGGNQVRRHWSARTRYGNSRQRNESGKPKALRSDFPAIKFAPFMRVLDEIRQDIKTNLRIEQSAVLVLREITETTLTSLFAAANLHTLRAGRVTLFTNDFQSVVKMMPRRGHLAFGPDGLTQEALDSDKM

SEQ ID NO: 27684 - DNA, 428 bp, Muscodor strobelii
  misc_feature: SGI EST ID NO. CUFF.65301.0
  misc_feature: Variant of the nucleotide sequence at SEQ ID NO 27682
gtaagtttcagatcgatacactactaagctaatacatccctaactataattgctagcccgacagcgcaacgagagtggtaaacccaaggccctacgctcagactttccggctatcaagttcgcaccgttcatgcgtgtgctagatgagattcgtcaggatatcaagaccaatcttcgcattgagcagtctgccgtgctcgttctccgcgaaatcacagagaccacacttacgtcgctgttcgcagccgctaacctccacaccctccgtgctggccgagtcacattgttcaccaatgacttccagagcgtggtgaagatgatgccccgcagaggtcatcttgctttcggtcccgatggtctcacacaagaggctctggattccgacaagatgtaacgacagagaccgacggaggccttttgtgttttgc

SEQ ID NO: 27685 - DNA, 246 bp, Muscodor strobelii
  misc_feature: SGI cDNA ID NO. 569488
  misc_feature: Encodes the peptide sequence at SEQ ID NO 27686
atgtctaagaaggaagaacaagctcagcaaatcgctgctccagcagttgataatgatgagcctgatgagtgggacaagcgtattttcagcacaggatgcgcagacgagaatgcgaagctgactgactgctactatgagaaaaaagattggcgcgcatgtacgaaagagatggagatctttcgagcttgctggaaaaggaacaacaacgatcaacggacatcaagtaaggactcggaccagaaatga

SEQ ID NO: 27686 - protein, 81 aa, Muscodor strobelii
  misc_feature: SGI Peptide ID NO. 569488
  misc_feature (26)..(66): Pfam Id: PF06747 Pfam Desc: CHCH domain
  misc_feature (5)..(78): NCBI GI: 189205122 Blast Desc: conserved [Pyrenophora tritici-repentis Pt-1C-BFP] gi|187985995|gb|EDU51483.1| conserved [Pyrenophora tritici-repentis Pt-1C-BFP]
  misc_feature (1)..(78): NCBI GI: 225681523 Blast Desc: [Paracoccidioides brasiliensis Pb03]
  misc_feature (4)..(77): NCBI GI: 171681798 Blast Desc: protein product [Podospora anserina] gi|170940858|emb|CAP66508.1| protein product [Podospora anserina]
  misc_feature (18)..(77): NCBI GI: 169610643 Blast Desc: SNOG_08428 [Phaeosphaeria nodorum SN15] gi|111063584|gb|EAT84704.1| SNOG_08428 [Phaeosphaeria nodorum SN15]
  misc_feature (1)..(78): NCBI GI: 226279899 Blast Desc: [Paracoccidioides brasiliensis Pb01]
  misc_feature (1)..(78): NCBI GI: 226288664 Blast Desc: [Paracoccidioides brasiliensis Pb18]
  misc_feature (6)..(78): NCBI GI: 212536236 Blast Desc: conserved [Penicillium marneffei ATCC 18224] gi|210070673|gb|EEA24763.1| conserved [Penicillium marneffei ATCC 18224]
  misc_feature (1)..(78): NCBI GI: 261360661 Blast Desc: conserved [Verticillium albo-atrum VaMs.102]
  misc_feature (1)..(78): NCBI GI: 239615046 Blast Desc: [Ajellomyces dermatitidis ER-3]
  misc_feature (1)..(78): NCBI GI: 261192088 Blast Desc: [Ajellomyces dermatitidis SLH14081] gi|239589326|gb|EEQ71969.1| [Ajellomyces dermatitidis SLH14081]
MSKKEEQAQQIAAPAVDNDEPDEWDKRIFSTGCADENAKLTDCYYEKKDWRACTKEMEIFRACWKRNNNDQRTSSKDSDQK

SEQ ID NO: 27687 - DNA, 437 bp, Muscodor strobelii
  misc_feature: SGI EST ID NO. CUFF.65364.0
  misc_feature: Variant of the nucleotide sequence at SEQ ID NO 27685
taacgttcgagctcccagtggtcaaaatgtctaagaaggaagaacaagctcagcaaatcgctgctccagcagttgataatgatgagcctgatgagtgggacaagcgtattttcagcacaggatgcgcagacgagaatgcgaagctgactgactgctactatgagaaaaaagattggcgcgcatgtacgaaagagatggagatctttcgagcttgctggaaaaggaacaacaacgatcaacggacatcaagtaaggactcggaccagaaatgagctttggaaccgaggcacgttcgcaagacgcaagctgtaatctgcatgtacctctacgcttctcgggatctcatcaccgtgcaatttgtacaatatactcatctgtattgccttcatgtgtaacaatatttcgatatgaaattcgacaaatcaactccatttcca

SEQ ID NO: 27688 - DNA, 867 bp, Muscodor strobelii
  misc_feature: SGI cDNA ID NO. 569489
  misc_feature: Reduced expression when VOC is produced
  misc_feature: Encodes the peptide sequence at SEQ ID NO 27689
atggtctcacgcgccatgacgcccctacgtagggccagcagacagatcagtctgaagaatataccacgagcatcgcgagccttcggatcctcaacagcgacctgggaagacgccgctgccccgtcaacctcaacaaccacaccatccaaaccgccatactcatctacctcgaaatcctactccaaaccagccaccaaggccaccatttccaaaatccctacgtccgcctccacgaccacatctcgcacccgcctccccgccgtatcaggccaacccctcccagacgtgcctccacccccagccgacataagcaacggcaaccacacaggcgaagccatagactggacgcagtccttccacggcatcggcacatcccagttctcccccgaagccgcgaatgtcctactcgcgcccatcgaccctatggacgtcgaggtgaagcccgacgggatcttgtatctacccgagatcaagtaccgacggatcttgaaccgcgccttcggacccggcggttggggattggcgccacgaggcgatctgatcgttgatgcgaagagcaagaaagtctcgcgggactatgctctcgtcgttcacgggcgattcgtagcccaagcccgaggcgaacaacaatacttcaacgacgacggaatctccacagcggcggagggctgtaaatccaacgccctgatgcggtgctgcaaggatctcggcgtcgcctcggaactctgggatccccgcttcatccgcaagttcgtcaaagagcaggcgaagcaggtctgggccgaggtcatcaccacgggcaagaagaagatggtctggatgcgcaaggatgatgagttgcggtatccttataagaagagcgcgtga

SEQ ID NO: 27689 - protein, 288 aa, Muscodor strobelii
  misc_feature: SGI Peptide ID NO. 569489
  misc_feature (40)..(285): Pfam Id: PF06420 Pfam Desc: Mitochondrial genome maintenance MGM101
  misc_feature (113)..(285): Pfam Id: PF06420 Pfam Desc: Mitochondrial genome maintenance MGM101
  misc_feature (21)..(287): NCBI GI: 154324118 Blast Desc: mitochondrial genome maintenance protein MGM101, mitochondrial precursor [Botryotinia fuckeliana B05.10] gi|150842687|gb|EDN17880.1| mitochondrial genome maintenance
  misc_feature (105)..(285): NCBI GI: 145611372 Blast Desc: MGG_00437 [Magnaporthe grisea 70-15] gi|145018671|gb|EDK02950.1| MGG_00437 [Magnaporthe grisea 70-15]
  misc_feature (104)..(285): NCBI GI: 85097610 Blast Desc: NCU05517 [Neurospora crassa OR74A] gi|28921971|gb|EAA31243.1| conserved [Neurospora crassa OR74A]
  misc_feature (105)..(285): NCBI GI: 116201923 Blast Desc: CHGG_08846 [Chaetomium globosum CBS 148.51] gi|88177364|gb|EAQ84832.1| CHGG_08846 [Chaetomium globosum CBS 148.51]
  misc_feature (112)..(286): NCBI GI: 189204682 Blast Desc: mitochondrial genome maintenance protein MGM101 [Pyrenophora tritici-repentis Pt-1C-BFP] gi|187985775|gb|EDU51263.1| mitochondrial genome maintenance
  misc_feature (70)..(287): NCBI GI: 240276463 Blast Desc: mitochondrial genome maintenance protein MGM101 [Ajellomyces capsulatus H143]
  misc_feature (100)..(285): NCBI GI: 258576967 Blast Desc: mitochondrial genome maintenance protein mgm101 [Uncinocarpus reesii 1704] gi|237902931|gb|EEP77332.1| mitochondrial genome maintenance protein mgm101 [Uncinocarpus
  misc_feature (71)..(287): NCBI GI: 154271015 Blast Desc: mitochondrial genome maintenance protein MGM101 [Ajellomyces capsulatus NAm1] gi|150409584|gb|EDN05028.1| mitochondrial genome maintenance protein MGM101 [Ajellomyces
  misc_feature (46)..(288): NCBI GI: 71001218 Blast Desc: mitochondrial genome maintenance protein Mgm101 [Aspergillus fumigatus Af293] gi|66852928|gb|EAL93252.1| mitochondrial genome maintenance protein Mgm101, [Aspergillus
  misc_feature (88)..(285): NCBI GI: 119177935 Blast Desc: CIMG_07856 [Coccidioides immitis RS]
  misc_feature: Useful for introducing or modulating the production of volatile compounds
MVSRAMTPLRRASRQISLKNIPRASRAFGSSTATWEDAAAPSTSTTTPSKPPYSSTSKSYSKPATKATISKIPTSASTTTSRTRLPAVSGQPLPDVPPPPADISNGNHTGEAIDWTQSFHGIGTSQFSPEAANVLLAPIDPMDVEVKPDGILYLPEIKYRRILNRAFGPGGWGLAPRGDLIVDAKSKKVSRDYALVVHGRFVAQARGEQQYFNDDGISTAAEGCKSNALMRCCKDLGVASELWDPRFIRKFVKEQAKQVWAEVITTGKKKMVWMRKDDELRYPYKKSA

SEQ ID NO: 27690 - DNA, 2851 bp, Muscodor strobelii
  misc_feature: SGI EST ID NO. CUFF.65614.0
  misc_feature: Variant of the nucleotide sequence at SEQ ID NO 27688
aaagcttcagccaccatctcgtcttcccgcacaaactccacccccaactctaaccgactatcgcgacgatggtctcacgcgccatgacgcccctacgtagggccagcagacagatcagtctgaagaatataccacgagcatcgcgagccttcggatcctcaacagcgacctgggaagacgccgctgccccgtcaacctcaacaaccacaccatccaaaccgccatactcatctacctcgaaatcctactccaaaccagccaccaaggccaccatttccaaaatccctacgtccgcctccacgaccacatctcgcacccgcctccccgccgtatcaggccaacccctcccagacgtgcctccacccccagccgacataagcaacggcaaccacacaggcgaagccatagactggacgcagtccttccacggcatcggcacatcccagttctcccccgaagccgcgaatgtcctactcgcgcccatcgaccctatggacgtcgaggtgaagcccgacgggatcttgtatctacccgagatcaagtaccgacggatcttgaaccgcgccttcggacccggcggttggggattggcgccacgaggcgatctgatcgttgatgcgaagagcaagaaagtctcgcgggactatgctctcgtcgttcacgggcgattcgtagcccaagcccgaggcgaacaacaatacttcaacgacgacggaatctccacagcggcggagggctgtaaatccaacgccctgatgcggtgctgcaaggatctcggcgtcgcctcggaactctgggatccccgcttcatccgcaagttcgtcaaagagcaggcgaagcaggtctgggccgaggtcatcaccacgggcaagaagaagatggtctggatgcgcaaggatgatgagttgcggtatccttataagaagagcgcgtgaaagatttgatgggtggatggtgggtgggttcgctctcgaatgcgctgattttttggcaaccatatctgaggatggtgagggtgttgtacgatatgtgtatatatgagcgttaggggaggatagagacgcaggctgcttcggatagaggccaagctgtaaaataaatgtcctgccgttcgaagatataacggcatgagcgaagcatacatcatttcactttgtatcgaatcttgacctaccatgaagatagagagcaagacgcttgtcacaagtttgccccttctatctctgtttcactccccaaatcactgacgatatgatgaggaaacaaaagtcatattcccgctccttgcagagcatcgtctacgaaccacccagacgccttcccgatgacccatgtaatgaactccagtggctaacatcgcacaacacacagcctactgctgctgataccctgtactcgtcccagtaggcgtcgtgccccacccgaacacacttccccagcccttcgccggtgtggtatttcccccatcatcttcctcgtaccctctcctcctcaggccctcgtcgtcttcgcctccgctcggcgcatcaatcttctcaaagtcgacttcgctcctactcttgctcagtacactgcccgttgaatacccactgggcggtctcgataattcttgtcctccatccagactcatgctccccggcttcgcagatcgtcgcacctcctcgttacgctgtagctgcgccgcctcgcgatccagcgcccccatcatgaacgccaatttctctctctgcgacgcgataaatgtcatcttctcttgtgcgccaccaatgttctccggaatcaacgtattcgccgtattcacattgctcttcgcgctagcgcctacgcccgcggcagcactgacagcgcccgagagcagattatagaagtcgtgtcccgcagccccggcattattcgccgcccatcgcgcagcaggcacgctgaacctagcgagcagtgcctgagtgtatccctggggtgccgcagcagccgccctcgtctcctcctgtcgctccgtggggggcagtccaaacactttggtgcggaccaactcgatggcggcgcggagggacttgaggccgaacgccttaaatctatcgtgggcgctggcgataaagtcctcgatggcgagctcgttctcctgcaggtaagggtgcaggtactcctcgtacaggacgcgggagccttgggtgttaggcagcacgagccagaggaggaagacgaggcggatccaggagtagaaggggatccagacgaggatgaagtctacccaggactcggcgagtagggcgcaggataggacggaccagtacatgagccatggcgtgagttgggccgggtcggaggtcttgagggctttgtaggaggcgaagagggggaagaggaaggatgctattgaactgtttgaaggggacttgttagtatgcggtattgcgatgccggagatgttgcgctaagatgctatgaggggcgcttacgcgaagaagtgggctattatgttgaacatgttggcggatggtcgatatgtcactgtggaatggagggtttcgggtgaaaagaagtgagttgtgtcttagtctcgaggcgatttcatgtacaaaggtgaccgaggagaaagcataaacaggcgcaggactggatgacaaaacactgcgatgaggggcagctcaggcacgtatgataagacgtcaacagttgattataaggtaaagttagagatgtggtatgtaagatacgtgtctaatctgcccaggcacatataatctcaaggacacgacacagctgaagaaaaggacagtttagttaggtatctaggttttggtgacgaggcagcagaatgaaaaggaacagagcagtagagtaggagtaagac

SEQ ID NO: 27691 - DNA, 1035 bp, Muscodor strobelii
  misc_feature: SGI cDNA ID NO. 569490
  misc_feature: Encodes the peptide sequence at SEQ ID NO 27692
atgttcaacataatagcccacttcttcgcttcaatagcatccttcctcttccccctcttcgcctcctacaaagccctcaagacctccgacccggcccaactcacgccatggctcatgtactggtccgtcctatcctgcgccctactcgccgagtcctgggtagacttcatcctcgtctggatccccttctactcctggatccgcctcgtcttcctcctctggctcgtgctgcctaacacccaaggctcccgcgtcctgtacgaggagtacctgcacccttacctgcaggagaacgagctcgccatcgaggactttatcgccagcgcccacgatagatttaaggcgttcggcctcaagtccctccgcgccgccatcgagttggtccgcaccaaagtgtttggactgccccccacggagcgacaggaggagacgagggcggctgctgcggcaccccagggatacactcaggcactgctcgctaggttcagcgtgcctgctgcgcgatgggcggcgaataatgccggggctgcgggacacgacttctataatctgctctcgggcgctgtcagtgctgccgcgggcgtaggcgctagcgcgaagagcaatgtgaatacggcgaatacgttgattccggagaacattggtggcgcacaagagaagatgacatttatcgcgtcgcagagagagaaattggcgttcatgatgggggcgctggatcgcgaggcggcgcagctacagcgtaacgaggaggtgcgacgatctgcgaagccggggagcatgagtctggatggaggacaagaattatcgagaccgcccagtgggtattcaacgggcagtgtactgagcaagagtaggagcgaagtcgactttgagaagattgatgcgccgagcggaggcgaagacgacgagggcctgaggaggagagggtacgaggaagatgatgggggaaataccacaccggcgaagggctggggaagtgtgttcgggtggggcacgacgcctactgggacgagtacagggtatcagcagcagtag

SEQ ID NO: 27692 - protein, 344 aa, Muscodor strobelii
  misc_feature: SGI Peptide ID NO. 569490
  misc_feature (1)..(95): Pfam Id: PF03134 Pfam Desc: TB2/DP1, HVA22 family
  misc_feature (1)..(339): NCBI GI: 154323218 Blast Desc: BC1G_00008 [Botryotinia fuckeliana B05.10] gi|150842237|gb|EDN17430.1| BC1G_00008 [Botryotinia fuckeliana B05.10]
  misc_feature (10)..(331): NCBI GI: 256733416 Blast Desc: NECHADRAFT_6025 [Nectria haematococca mpVI 77-13-4]
  misc_feature (1)..(308): NCBI GI: 85097627 Blast Desc: NCU05521 [Neurospora crassa OR74A] gi|28921975|gb|EAA31247.1| NCU05521 [Neurospora crassa OR74A]
  misc_feature (1)..(331): NCBI GI: 46127899 Blast Desc: FG08327.1 [Gibberella zeae PH-1]
  misc_feature (1)..(323): NCBI GI: 171681802 Blast Desc: protein product [Podospora anserina] gi|170940860|emb|CAP66510.1| protein product [Podospora anserina]
  misc_feature (1)..(325): NCBI GI: 4102999 Blast Desc: pathogenicity protein [Magnaporthe grisea]
  misc_feature (1)..(231): NCBI GI: 261360663 Blast Desc: receptor expression-enhancing protein [Verticillium albo-atrum VaMs.102]
  misc_feature (1)..(297): NCBI GI: 116201921 Blast Desc: CHGG_08845 [Chaetomium globosum CBS 148.51] gi|88177363|gb|EAQ84831.1| CHGG_08845 [Chaetomium globosum CBS 148.51]
  misc_feature (1)..(294): NCBI GI: 226288660 Blast Desc: HVA22 domain membrane protein [Paracoccidioides brasiliensis Pb18]
  misc_feature (1)..(294): NCBI GI: 225555647 Blast Desc: HVA22 domain membrane protein [Ajellomyces capsulatus G186AR]
MFNIIAHFFASIASFLFPLFASYKALKTSDPAQLTPWLMYWSVLSCALLAESWVDFILVWIPFYSWIRLVFLLWLVLPNTQGSRVLYEEYLHPYLQENELAIEDFIASAHDRFKAFGLKSLRAAIELVRTKVFGLPPTERQEETRAAAAAPQGYTQALLARFSVPAARWAANNAGAAGHDFYNLLSGAVSAAAGVGASAKSNVNTANTLIPENIGGAQEKMTFIASQREKLAFMMGALDREAAQLQRNEEVRRSAKPGSMSLDGGQELSRPPSGYSTGSVLSKSRSEVDFEKIDAPSGGEDDEGLRRRGYEEDDGGNTTPAKGWGSVFGWGTTPTGTSTGYQQQ

SEQ ID NO: 27693 - DNA, 2870 bp, Muscodor strobelii
  misc_feature: SGI EST ID NO. CUFF.65615.1
  misc_feature: Variant of the nucleotide sequence at SEQ ID NO 27691
gtcttactcctactctactgctctgttccttttcattctgctgcctcgtcaccaaaacctagatacctaactaaactgtccttttcttcagctgtgtcgtgtccttgagattatatgtgcctgggcagattagacacgtatcttacataccacatctctaactttaccttataatcaactgttgacgtcttatcatacgtgcctgagctgcccctcatcgcagtgttttgtcatccagtcctgcgcctgtttatgctttctcctcggtcacctttgtacatgaaatcgcctcgagactaagacacaactcacttcttttcacccgaaaccctccattccacagtgacatatcgaccatccgccaacatgttcaacataatagcccacttcttcgcttcaatagcatccttcctcttccccctcttcgcctcctacaaagccctcaagacctccgacccggcccaactcacgccatggctcatgtactggtccgtcctatcctgcgccctactcgccgagtcctgggtagacttcatcctcgtctggatccccttctactcctggatccgcctcgtcttcctcctctggctcgtgctgcctaacacccaaggctcccgcgtcctgtacgaggagtacctgcacccttacctgcaggagaacgagctcgccatcgaggactttatcgccagcgcccacgatagatttaaggcgttcggcctcaagtccctccgcgccgccatcgagttggtccgcaccaaagtgtttggactgccccccacggagcgacaggaggagacgagggcggctgctgcggcaccccagggatacactcaggcactgctcgctaggttcagcgtgcctgctgcgcgatgggcggcgaataatgccggggctgcgggacacgacttctataatctgctctcgggcgctgtcagtgctgccgcgggcgtaggcgctagcgcgaagagcaatgtgaatacggcgaatacgttgattccggagaacattggtggcgcacaagagaagatgacatttatcgcgtcgcagagagagaaattggcgttcatgatgggggcgctggatcgcgaggcggcgcagctacagcgtaacgaggaggtgcgacgatctgcgaagccggggagcatgagtctggatggaggacaagaattatcgagaccgcccagtgggtattcaacgggcagtgtactgagcaagagtaggagcgaagtcgactttgagaagattgatgcgccgagcggaggcgaagacgacgagggcctgaggaggagagggtacgaggaagatgatgggggaaataccacaccggcgaagggctggggaagtgtgttcgggtggggcacgacgcctactgggacgagtacagggtatcagcagcagtaggctgtgtgttgtgcgatgttagccactggagttcattacatgggtcatcgggaaggcgtctgggtggttcgtagacgatgctctgcaaggagcgggaatatgacttttgtttcctcatcatatcgtcagtgatttggggagtgaaacagagatagaaggggcaaacttgtgacaagcgtcttgctctctatcttcatggtaggtcaagattcgatacaaagtgaaatgatgtatgcttcgctcatgccgttatatcttcgaacggcaggacatttattttacagcttggcctctatccgaagcagcctgcgtctctatcctcccctaacgctcatatatacacatatcgtacaacaccctcaccatcctcagatatggttgccaaaaaatcagcgcattcgagagcgaacccacccaccatccacccatcaaatctttcacgcgctcttcttataaggataccgcaactcatcatccttgcgcatccagaccatcttcttcttgcccgtggtgatgacctcggcccagacctgcttcgcctgctctttgacgaacttgcggatgaagcggggatcccagagttccgaggcgacgccgagatccttgcagcaccgcatcagggcgttggatttacagccctccgccgctgtggagattccgtcgtcgttgaagtattgttgttcgcctcgggcttgggctacgaatctgttgcgcggcaagaagtcagttcaagttgtggcacccaaattatccatttaaaagcatggatgggagtgaccacgaagaagaaggaatgacataccgcccgtgaacgacgagagcatagtcccgcgagactttcttgctcttcgcatcaacgatcagatcgcctcgtggcgccaatccccaaccgccgggtccgaaggcgcggttcaagatccgtcggtacttgatctcgggtagatacaagatcccgtcgggcttcacctcgacgtccatagggtcgatgggcgcgagtaggacattcgcggcttcgggggagaactgggatgtgccgatgccgtggaaggactgcgtccagtctatggcttcgcctgtgtggttgccgttgcttatgtcggctgggggtggaggcacgtctgggaggggttggcctgatacggcggggaggcgggtgcgagatgtggtcgtggaggcggacgtagggattttggaaatggtggccttggtggctggtttggagtaggatttcgaggtagatgagtatggcggtttggatggtgtggttgttgaggttgacggggcagcggcgtcttcccaggtcgctgttgaggatccgaaggctcgcgatgctcgtggtatattcttcagactgatctgtctgctggccctacgtaggggcgtcatggcgcgtgagaccatcgtcgcgatagtcggttagagttgggggtggagtttgtgcgggaagacgagatggtggctgaagcttt

SEQ ID NO: 27694 - DNA, 714 bp, Muscodor strobelii
  misc_feature: SGI cDNA ID NO. 569491
  misc_feature: Encodes the peptide sequence at SEQ ID NO 27695
tcaggtccgccgggtcagcctatccctcctaaccctcctaatcctcctggccctcctaatcctcctggccctcctggccctcctggccctcctggccctcctggccctccaggaccaccaggaccaccaggaccaccgggaccacagggaaccgcgcctcgtcgggctcacccctttcgcttgctgctcaagcttctcttgattcttctgctcggctttgtatttgccgcaggggtgatgtcactacatagagactggaacgggccacaacatattcctccagtacctattccatcgcctcctccgcctccgccagcacctgttcaatctccattcagagacatccgcaacgtattgaacccaatcagcttggtgtcaaatctattctggagcggatcgactgagcaagcggaaatcttgcggactgtctcgaccccggaaccaccggtcgagatcccggttgttgacgtccagcaaccagtagatgctgtcattggttttctccatcgtgtctctgacctcgggcttccagtggcaagacgcatgcttgctactacgaccgagtacgctgctggtgttatttttcttcccattgcagctttcgagcttgtggctggggaagagttccctcctgttaggggtgatgatgtggggggtgccgttgggattgggtgtgcggttgttctgttgaacttgattttggagttgttgtag

SEQ ID NO: 27695 - protein, 237 aa, Muscodor strobelii
  misc_feature: SGI Peptide ID NO. 569491
SGPPGQPIPPNPPNPPGPPNPPGPPGPPGPPGPPGPPGPPGPPGPPGPQGTAPRRAHPFRLLLKLLLILLLGFVFAAGVMSLHRDWNGPQHIPPVPIPSPPPPPPAPVQSPFRDIRNVLNPISLVSNLFWSGSTEQAEILRTVSTPEPPVEIPVVDVQQPVDAVIGFLHRVSDLGLPVARRMLATTTEYAAGVIFLPIAAFELVAGEEFPPVRGDDVGGAVGIGCAVVLLNLILELL

SEQ ID NO: 27696 - DNA, 816 bp, Muscodor strobelii
  misc_feature: SGI EST ID NO. CUFF.65318.0
  misc_feature: Variant of the nucleotide sequence at SEQ ID NO 27694
cgggaccacagggaaccgcgcctcgtcgggctcacccctttcgcttgctgctcaagcttctcttgattcttctgctcggctttgtatttgccgcaggggtgatgtcactacatagagactggaacgggccacaacatattcctccagtacctattccatcgcctcctccgcctccgccagcacctgttcaatctccattcagagacatccgcaacgtattgaacccaatcagcttggtgtcaaatctattctggagcggatcgactgagcaagcggaaatcttgcggactgtctcgaccccggaaccaccggtcgagatcccggttgttgacgtccagcaaccagtagatgctgtcattggttttctccatcgtgtctctgacctcgggcttccagtggcaagacgcatgcttgctactacgaccgagtacgctgctggtgttatttttcttcccattgcagctttcgagcttgtggctggggaagagttccctcctgttaggggtgatgatgtggggggtgccgttgggattgggtgtgcggttgttctgttgaacttgattttggagttgttgtagcatgcgtgaaagggaaagcgaggtgttggtggggttgaactgccagatacctctcagcgatggtgtccgccatgggattatgaatacgacgacaggtctgccatgggcttttgctattgccgttgtcacccaggaggactagggctgaaaagtgatgaacaatcaaagcgatgaactgttttgtttgcgcgctctttgtttattgtttaggtacatacttgtttagaatagaatagag

SEQ ID NO: 27697 - DNA, 417 bp, Muscodor strobelii
  misc_feature: SGI cDNA ID NO. 569492
  misc_feature: Encodes the peptide sequence at SEQ ID NO 27698
atggccggtaccgacgacaaaaccaaagagtccgtggtcaaggccagtgagaccgacgtcaagttcttcaccaccttcttcgccttcattccgcagaacattcagggcttcgactgggatggctttgctcaagcaatgggaatgaagaacgccaacgtggccaagacccgctacagccagattcgcaagaagcatggcattacgggcgtcgctaccgagaatagcgacactgtccacaccactactcccggtcccaacaccccctccaaggtcacgaaggccaagaccccgcgcaagacgcctaccaatgccgctgccaagcgtcgcaacctcgtctcaagcttggatgatgcctctaccggtttcatggcttcgcagtccgcctacgaagacgacgacgatgatgagaagaagtag

SEQ ID NO: 27698 - protein, 138 aa, Muscodor strobelii
  misc_feature: SGI Peptide ID NO. 569492
  misc_feature (26)..(100): NCBI GI: 256732501 Blast Desc: NECHADRAFT_78765 [Nectria haematococca mpVI 77-13-4]
  misc_feature (26)..(109): NCBI GI: 116204717 Blast Desc: [Chaetomium globosum CBS 148.51] gi|88176370|gb|EAQ83838.1| [Chaetomium globosum CBS 148.51]
MAGTDDKTKESVVKASETDVKFFTTFFAFIPQNIQGFDWDGFAQAMGMKNANVAKTRYSQIRKKHGITGVATENSDTVHTTTPGPNTPSKVTKAKTPRKTPTNAAAKRRNLVSSLDDASTGFMASQSAYEDDDDDEKK

SEQ ID NO: 27699 - DNA, 3369 bp, Muscodor strobelii
  misc_feature: SGI cDNA ID NO. 569493
  misc_feature: Encodes the peptide sequence at SEQ ID NO 27700
atgggtgacgattgggaaagtcataaggcgacaattgaacagctgtatgtaactgacgatttgcctttaaaaactgtggcgcttcaaatgaaagaaaagcatggtttcgaccgcaagctacaccaatatcatcataaattcaaacaatggaaatttcagaagaacttgaaggcgagccagcgcgactatatttaccagacattcgccaaacgtaaagctgatgatcagagcctctctatcgtgatgttgaatggacagcagctacagcacaaaaggctgaagagagccatggcccgggtctcggtctccaccccatggactcggccacagacagattctgctccagcagaatgtaccaagtctttacagctcgttgtcgctacaccatataaagggataccccaattgccactgagaagctggtatggatccttgccttggttcgagtttacaagaaagcatgtacctggagccttctctggacagtactccagcctttctgaagcacaatcaacaatcacctctccatttgcattgaaatctatgtcgcttttgcaaaccagattcctggcttctgaagaaacgccgatttcgacggcatatcttgataccatgatcccagaagagtcagatggcgaccatgccaagactatcagcagattgagaggtggtagtgccaaagatattgagtctgaagcccttaaaatattgctataccaactgtcgaacaaaatgcaagtcgatctaaacgtggaagacgatctgacagacgcgaggattcttgctgtgatcgagacgtgggcgaagaaaaatccccagtggctaagatctgtgctcgcatcgcgagaaccctcagcggtggcaatcgctgagaacctttacgcgatggctattcgtcaaagcaattctgtgatcgtttctagtattcatgaagcccacctcgtcaataccgatggtccaatccttgcgactttgggggacttgacctttcgctataggaagggagatgcacccatgacacttgtcttctgttctcctagctttttctgtactcctttacagatggtagcatctatcggcaacttctctatgatgaagatgctgatagcgtctggtgcgaaagtagatatagaaggagactgtccaggcttgtcgcctttagagctggtatgctccttgctttcaaagtcgcgcgcagaagagatggccgagactcttctggctcatggggctgcagttaacagacccaaactcgtggagagaccgactgcacttatgatcgcagtggctcgcgggaacataagactcatccagatcctactgaagcacaatgctgaagttgaacggcaatggatccctgatagctcggacgggtttccgttgtgcgccctccgcttagcattacttgggggtgacatgaaagttcttgaggcactcttgacgtcagcgagatgccaccagcgtatgacggaggatcctgacctaatggtcctagcaatttcatgcaagaaccaccatggtgcaagattgcttgtgggagccggagtctgtcccactaccccagccagctggggcgaacatcctctgacgacagctgtattcatgaagcagactgatattatgagcgagggagatctttggcctctcttggtgctcgattcatttcgagacaaatgtgttcatggttcatcttccacgcgaccaactcccattcatgccgcggcattccgcgggaatttaaaggtcttgacatttttgtaccgcaaaggtttctctatcacgactgctatcaagccagagacagaagaggacatacgttatattagcgccatctaccacacttacatggtaacacctactgggccttggttaaagctgccaacgccactcttggttgctttatacagaaagcacacgaaagttgctttaaagctagtcgagctcggaagcacacccttccacggtggtgaggttgccttggctgcggcgaccggttccgtggacttagtgtcggcgcttgcacgagcaggagccagcgtttgtgatacctggatgaaagctacccctatccaaacagcggtcagacacgggcacatcgacgttgttcatttgttactcaggctcggcgctacattctcgggcggtgaactatcgagtgctatccaatccaatgatcgaaaattgatcaggctcatttggaagtcttcctcccaacaccagcttgaggctcttggtccttcgtcagaaagtcccctcgaagcagcatgcgctatcggagatagagtcacattccgccgcatcatgaaatcgtcttgggttaaatatgactcagcagcgctctgtgctagcgtgtggcattattgcgtcaactggaattctttagacaacggttacgatatcatcaaccagctgttgagaagccgaaaccgccagtggcagaccgacacactggaaatgacagcaatagcgattgctgtgaagctctataccatccatgcagatattatttctactcttcttttgcacttgctacccgtgtcgcttgtaccgtttgaagtgccggatgtccaaacgtcaacccctctgttctggtggcatcttgaggaaaacagactcggtcaatctccattacatctcgcagtccttaaaaactcaccgttcctggttacgacattaataaacgcaggatttcagccggatggtgagtgttttctcgagactttgaggctatctacgactgagggtgcagccgacatgatagcttccatcttggcagcaagacgcccctgcacgtatgaggaggcggtgattgctcaggctttcgaagacgctgctagatctcagcaactgcagtcgatcgaaagactcgtcagctttggtttggacgtgaactgtcgaaagaacaacaacaagggctggacgcctctgcagtttgctgcaatgtatggcgacaatcacatgatatcaaaattgatagcagcaggagctattgttaatgcaccaccggcgcccgaggcaggcgcaacagcgcttcaggtggctgcaatactcaacaagatgaatgttgcgcgaatactaattgagaacggtgctgatatcaatgcacctcgtgctggaagacatgggagaacagcacttgaaggtgcagcggagtacgggaggcaagatatggtcagccttcttctgtctaagggtgccagtaccattaatgagcaccgcccacagtatctacgtgctatcagattcgcgtccaggtctggtcatcatgctgttgcttcacttctcaacgggcatcgaaagtggactgacgaggatacccgattgatgaattcaaaggaactgatgagcgagtcttattgcacccagtag

SEQ ID NO: 27700 - protein, 1122 aa, Muscodor strobelii
  misc_feature: SGI Peptide ID NO. 569493
  misc_feature (1006)..(1038): Pfam Id: PF00023 Pfam Desc: Ankyrin repeat
  misc_feature (971)..(1003): Pfam Id: PF00023 Pfam Desc: Ankyrin repeat
  misc_feature (1041)..(1073): Pfam Id: PF00023 Pfam Desc: Ankyrin repeat
  misc_feature (423)..(450): Pfam Id: PF00023 Pfam Desc: Ankyrin repeat
  misc_feature (361)..(1105): NCBI GI: 225684431 Blast Desc: conserved [Paracoccidioides brasiliensis Pb03]
  misc_feature (140)..(1105): NCBI GI: 226284810 Blast Desc: [Paracoccidioides brasiliensis Pb01]
  misc_feature (361)..(1105): NCBI GI: 226294082 Blast Desc: [Paracoccidioides brasiliensis Pb18]
  misc_feature (42)..(1115): NCBI GI: 256730275 Blast Desc: NECHADRAFT_82615 [Nectria haematococca mpVI 77-13-4]
  misc_feature (688)..(1101): NCBI GI: 239607884 Blast Desc: BDCG_08140 [Ajellomyces dermatitidis ER-3]
  misc_feature (974)..(1107): NCBI GI: 115492243 Blast Desc: [Aspergillus terreus NIH2624] gi|114197609|gb|EAU39309.1| [Aspergillus terreus NIH2624]
  misc_feature (351)..(1098): NCBI GI: 115961306 Blast Desc: : similar to ankyrin 2,3/unc44 [Strongylocentrotus purpuratus]
  misc_feature (918)..(1122): NCBI GI: 145252920 Blast Desc: An16g06710 [Aspergillus niger] gi|134083528|emb|CAK47005.1| protein product [Aspergillus niger]
  misc_feature (351)..(1088): NCBI GI: 115665370 Blast Desc: : similar to ankyrin 2,3/unc44, partial [Strongylocentrotus purpuratus] gi|115939157|ref|XP_001196401.1| : similar to ankyrin 2,3/unc44, partial [Strongylocentrotus
  misc_feature (944)..(1095): NCBI GI: 67516937 Blast Desc: AN0750.2 [Aspergillus nidulans FGSC A4] gi|40746236|gb|EAA65392.1| AN0750.2 [Aspergillus nidulans FGSC A4] gi|259488972|tpe|CBF88858.1| TPA: [Aspergillus nidulans FGSC
MGDDWESHKATIEQLYVTDDLPLKTVALQMKEKHGFDRKLHQYHHKFKQWKFQKNLKASQRDYIYQTFAKRKADDQSLSIVMLNGQQLQHKRLKRAMARVSVSTPWTRPQTDSAPAECTKSLQLVVATPYKGIPQLPLRSWYGSLPWFEFTRKHVPGAFSGQYSSLSEAQSTITSPFALKSMSLLQTRFLASEETPISTAYLDTMIPEESDGDHAKTISRLRGGSAKDIESEALKILLYQLSNKMQVDLNVEDDLTDARILAVIETWAKKNPQWLRSVLASREPSAVAIAENLYAMAIRQSNSVIVSSIHEAHLVNTDGPILATLGDLTFRYRKGDAPMTLVFCSPSFFCTPLQMVASIGNFSMMKMLIASGAKVDIEGDCPGLSPLELVCSLLSKSRAEEMAETLLAHGAAVNRPKLVERPTALMIAVARGNIRLIQILLKHNAEVERQWIPDSSDGFPLCALRLALLGGDMKVLEALLTSARCHQRMTEDPDLMVLAISCKNHHGARLLVGAGVCPTTPASWGEHPLTTAVFMKQTDIMSEGDLWPLLVLDSFRDKCVHGSSSTRPTPIHAAAFRGNLKVLTFLYRKGFSITTAIKPETEEDIRYISAIYHTYMVTPTGPWLKLPTPLLVALYRKHTKVALKLVELGSTPFHGGEVALAAATGSVDLVSALARAGASVCDTWMKATPIQTAVRHGHIDVVHLLLRLGATFSGGELSSAIQSNDRKLIRLIWKSSSQHQLEALGPSSESPLEAACAIGDRVTFRRIMKSSWVKYDSAALCASVWHYCVNWNSLDNGYDIINQLLRSRNRQWQTDTLEMTAIAIAVKLYTIHADIISTLLLHLLPVSLVPFEVPDVQTSTPLFWWHLEENRLGQSPLHLAVLKNSPFLVTTLINAGFQPDGECFLETLRLSTTEGAADMIASILAARRPCTYEEAVIAQAFEDAARSQQLQSIERLVSFGLDVNCRKNNNKGWTPLQFAAMYGDNHMISKLIAAGAIVNAPPAPEAGATALQVAAILNKMNVARILIENGADINAPRAGRHGRTALEGAAEYGRQDMVSLLLSKGASTINEHRPQYLRAIRFASRSGHHAVASLLNGHRKWTDEDTRLMNSKELMSESYCTQ

SEQ ID NO: 27701 - DNA, 1650 bp, Muscodor strobelii
  misc_feature: SGI cDNA ID NO. 569494
  misc_feature: Encodes the peptide sequence at SEQ ID NO 27702
atgcactcttccgacagctcccccgatattgctttaacatcatctagaaactcgtttcccaatgaagacccggtctccgccgaagatgctggccggaataaagcaaagggaaacgagaaattcaactatataccgggctggcgattctatgtcgctggaggagctctacagtttgctcttttccttgtcaacttcgagatcaccatcgtcagcacggcacttgtctccattgcgaacgatctccaagactttagcaagatcagttgggtcgtgacagcctacttgatcacttatactgctggcttggtcattgtcgccagactaagcgacatcttcggtcgcaagcaaacatacctcacaactttgctcgtattcactgcgttctcaggcgcctgcggaggttctcagacaatcgtagagctgatcatctttcgagcacttcaaggcgtaggcggaggcggcttgtacgccgttgccttcgttatgatcttcgaactggtgcccaagaataagtacccggtcatggtgataatggcagtgtccctcgcaacgcttggcaatgcactaggacccatctttggcgggctaatcgcctcgtatacgacatggcgctgggttttcttgatcaatgtccctatcggggtttccatcattgtggttgcattcctcacagtacctaaaaattttccattccacggagtcgcgcttcaggaagcgccaggggaacccaaactatcaaatatcgactttgccggagctttcctcatgcttttggcattggctttacttattgcaggtcttaacgaagcttcatccaatctcatatgggtgtcatccaccgttctcgtcccaatcatcgtatcaggatttgcctgggcggcgtttttcatctacgaacgctggtacgagcgctctggaagctctatacagcctgttctaccttggagattctgtcgcaaccgaatggtaacaggtctggtgttaaattctttcttcacgggggctatcagcatcacattgatagtcttgcttccattacgataccaaaccacactaggagttggccctttcgaagcaggggtgaagctcctgccgtttgatgtacttactgcggcgggtgcggctatgacaggcataattgccaagaaccgccgagttgcccccctgtatgttgggatgtttggagtgttccttcagatcgccggccttgcagccttacctgttattccgccctcccatacagctgtgtatggcttgcaagtcatcactggacttggtgctggactcaacattggactagtcacaatgttgattccgtacgtagtggaccgctctgacctagctgttgctacagccgcgggaactcagtttagatttctggggagctctgtagcgatatcaatctctacagctgtcggcaacagcatcgtcaaaggaaggctctcgggggtcttgaccaatgagcagatccagggcatatttgtatcgtcggcaaacatcaaccttctccttccagagcagcagataacggtgagacgacaattcatcgacagcttcaacgtggagtttcgcgtcgtcctcggatttgctgctgcatcgttgctcactatcgcgttgctctggaagaagacacaaatcctcattgattga

SEQ ID NO: 27702 - protein, 549 aa, Muscodor strobelii
  misc_feature: SGI Peptide ID NO. 569494
  misc_feature (56)..(466): Pfam Id: PF07690 Pfam Desc: Major Facilitator Superfamily
  misc_feature (85)..(159): Pfam Id: PF00083 Pfam Desc: Sugar (and other) transporter
  misc_feature (54)..(549): NCBI GI: 212533541 Blast Desc: multidrug resistance protein fnx1, [Penicillium marneffei ATCC 18224] gi|210072291|gb|EEA26380.1| multidrug resistance protein fnx1, [Penicillium marneffei ATCC 18224]
  misc_feature (108)..(549): NCBI GI: 242810792 Blast Desc: efflux pump antibiotic resistance protein, [Talaromyces stipitatus ATCC 10500] gi|218716280|gb|EED15702.1| efflux pump antibiotic resistance protein, [Talaromyces ATCC
  misc_feature (4)..(543): NCBI GI: 242773497 Blast Desc: efflux pump antibiotic resistance protein, [Talaromyces stipitatus ATCC 10500] gi|218721871|gb|EED21289.1| efflux pump antibiotic resistance protein, [Talaromyces ATCC
  misc_feature (23)..(450): NCBI GI: 240278164 Blast Desc: MFS multidrug transporter [Ajellomyces capsulatus H143]
  misc_feature (23)..(458): NCBI GI: 225557520 Blast Desc: drug resistance transporter [Ajellomyces capsulatus G186AR]
  misc_feature (1)..(543): NCBI GI: 225556984 Blast Desc: drug resistance transporter EmrB/QacA subfamily [Ajellomyces capsulatus G186AR]
  misc_feature (7)..(546): NCBI GI: 169769094 Blast Desc: [Aspergillus oryzae RIB40] gi|83766875|dbj|BAE57015.1| protein product [Aspergillus oryzae]
  misc_feature (20)..(547): NCBI GI: 255932603 Blast Desc: Pc12g10360 [Penicillium chrysogenum Wisconsin 54-1255] gi|211582477|emb|CAP80663.1| Pc12g10360 [Penicillium chrysogenum Wisconsin 54-1255]
  misc_feature (46)..(543): NCBI GI: 169772129 Blast Desc: [Aspergillus oryzae RIB40] gi|83768393|dbj|BAE58532.1| protein product [Aspergillus oryzae]
  misc_feature (32)..(543): NCBI GI: 67526853 Blast Desc: AN3884.2 [Aspergillus nidulans FGSC A4] gi|40739959|gb|EAA59149.1| AN3884.2 [Aspergillus nidulans FGSC A4] gi|259481548|tpe|CBF75171.1| TPA: MFS multidrug transporter,
MHSSDSSPDIALTSSRNSFPNEDPVSAEDAGRNKAKGNEKFNYIPGWRFYVAGGALQFALFLVNFEITIVSTALVSIANDLQDFSKISWVVTAYLITYTAGLVIVARLSDIFGRKQTYLTTLLVFTAFSGACGGSQTIVELIIFRALQGVGGGGLYAVAFVMIFELVPKNKYPVMVIMAVSLATLGNALGPIFGGLIASYTTWRWVFLINVPIGVSIIVVAFLTVPKNFPFHGVALQEAPGEPKLSNIDFAGAFLMLLALALLIAGLNEASSNLIWVSSTVLVPIIVSGFAWAAFFIYERWYERSGSSIQPVLPWRFCRNRMVTGLVLNSFFTGAISITLIVLLPLRYQTTLGVGPFEAGVKLLPFDVLTAAGAAMTGIIAKNRRVAPLYVGMFGVFLQIAGLAALPVIPPSHTAVYGLQVITGLGAGLNIGLVTMLIPYVVDRSDLAVATAAGTQFRFLGSSVAISISTAVGNSIVKGRLSGVLTNEQIQGIFVSSANINLLLPEQQITVRRQFIDSFNVEFRVVLGFAAASLLTIALLWKKTQILID

SEQ ID NO: 27703 - DNA, 3468 bp, Muscodor strobelii
  misc_feature: SGI cDNA ID NO. 569495
  misc_feature: Reduced expression when VOC is produced
  misc_feature: Encodes the peptide sequence at SEQ ID NO 27704
atgaggctcctaaggtccaacttggccccggccacccttcttctcttgtcaactgcttctgctcaactgctggttcccaatgcgggccaactcaatggaacatggacttacagcggttgttataccgatgttgccggccgaaccgtaaactctgccgccacaacctcggttaatatgaccatagaatactgtctggcattttgccaagatggtgggttcaaatattctggtaccgaatatcatgatgagtgctattgcggcaacaagcttgcagccggagccgttgagaaaaacttcactaccgattgcactacgccctgtgcaggtaactcgacagaagcatgcggcggtccttctagactcacgatgttttataatccatataacacagggccgcaaccgaatacaggcattgctaactggactcacatcggatgctacagcgagggaacgactggtcgtgcgctcacatatggtgcgaatgtcgctggttcggacatgagtgcaaagaaatgtacagccgcatgccaagcagctggttacatacttgccggcaccgagtacggtggtgaatgctattgtggcaatacgatatccaatggcggtgcgcccgcagacgatggctgcgatatgaagtgtaatggcaactccacggaaatatgcggtggaggaaaccgtcttaatgtgtatgacttcaacatggagtttgccattacaactagctcaactgtcgctcctgcgacttcgacctcgataactacaacttcgactactacaccctctgcaatcgtagttgctacttctgagaagcctaccacaacaaccaccacacccaccacaacgtcgacgtcggtagtactcaaagctagccctactagcccttcgcaacccaacgcggttgccaactacgtctggtatggctgccagactgaggctacaaatggtcgtgctctaagcctctacacatacgctgatgatgcaatgacattagaatcttgtcagactttctgcagtggtaaaaagacgacctatttcggaacagaatacggccgcgagtgctactgtggcaatagtttcaacactggctctgtcagtgccccagcttctgaatgccagcagctttgcgccggcgatgcattcgagtattgcggcaatggtaaccgactgtccgtctatgctgtgaacggaactgctccctcggacagcggtagcaaaacaaccacaacttcttccacggccgtagcgccagctgcaactggcttcccaacaggatggactgcccaaggctgctggcaggacggccccaatggtcgcattctgccgacttatcaggcacccgataatcagcaactaacccaacagagctgcgcacagctatgtgcaggcaagggatactccatctcgggcactgagtactatacccaatgtttctgcgggaacgcaatctacaatggaggatctgaactcccagataactctaaatgcacgacgccttgcggtggtaatgcccagcaaaattgtggtggtgctggctatttgtcaatcgtctcgaagggcacccctaatgtgtaccaaccgccgactacgcaattaggcggccttaatggcacttggacgtataagggttgctatcctgacaacctaaacaataagcgaactctgccctgggcagttatgcagccaggtgtgatgactgccactacctgcttgtctcaatgcgcgcaatttggctatgccgccgcagggctggaatatggcgacgagtgctattgcggtgatccgattgacgtgaccacctcaggcgcaacaaagcagccggacacagactgcaatgttgtgtgtgctggcaacgcctcctctttctgcggcgggggatctcgattgagcatgtactactggactggccaaactcctctgtacactttcaaatatcccaccggtaacaatgccggcacttactccaatcttgttggcggtgttgtaacacctttgatgacaatgcagtcgattacaggcaaggtcactttcttagagaaatgggggactggtgctgctaacagcactggtgcttacgaactcgatctgagccaaaccggcaattttaatgctgcttggcgaaccatgcatctgaagactgatgttttctgctctgctggtctcatcctgcctgacaaagccggccgtcaattgacaattggaggttggtctctggatagcacttatggtgttcgtctttacattccggacggatctcctggtgtcccgggtgtcaatgactggcaggagaatgtcaatgagcttaagcttcagagaggtcgctggtatccttctgctatggtcatgacgaatggttcgatcttggtggttggcggtgaaatcggctccaacgacaaagctgaaccaacgttggagctcttgcctaaagttggaccatatctgtacatggattggttggcacgtactgaccctaacaacttgtacccattccttgcggttcttcccggaggcggcatcttcgtcgcttattggaatgaagctcgcattctaaacgaggcgactttcgcgaccactaaggttctcccaaacatcactggcgccgtcaacaacccccaggctggccgaacatatcctctcgagggtacgtccgttctgctcccacaatatgcgccctatacggaccctctcggggtccttatatgtggtggttcgactcctggtacgagcgaagccttggataactgtgcctccatctacccggaggcagccaaccctaaatgggtactggagcgtatgccatccaagcgcgtcatgtcttgtatagctcctcttcctgacggtacctatttgatcgccaacggagctcagcagggtgttgccggctttggtcttgccactaatccaaacctcaatgctgtgctgtatgatccctcacaacctgttggatctcgcatgtcgatcatggccaatacctcagtggcccgactttatcatagcgaggctatcaccttacttgacggtcgcgttctgattactggctctgatccccaggatggcgtccaccctgaggaaattcgtgttgaagtattcaccccgccctacttatacagcaccaagcctcgtcctaagttcactgttgccaacaaggattggacctatggccaaaccattactctcacgctcgcatcagccgctgcaggtacgatgaaggtctctctcctcggtgccgtctccagcacacatggcaactctatgggtgctcgtactctcttccccgccgcttcatgttccggaacaacatgcaccgtcacggcgccccccaacaagtacgtctgtcctccaggttggtaccagctcttcgtgctgcaagatggcattcctgctgttggaacctatgttcgtatcggtggtgatccaggcaagctcggcaactggcccaactaccctgactttactcgtccgggtatctaa

SEQ ID NO: 27704 - protein, 1155 aa, Muscodor strobelii
  misc_feature: SGI Peptide ID NO. 569495
  misc_feature (1040)..(1134): Pfam Id: PF09118 Pfam Desc: Domain of function (DUF1929)
  misc_feature (540)..(624): Pfam Id: PF01822 Pfam Desc: WSC domain
  misc_feature (305)..(385): Pfam Id: PF01822 Pfam Desc: WSC domain
  misc_feature (143)..(223): Pfam Id: PF01822 Pfam Desc: WSC domain
  misc_feature (37)..(117): Pfam Id: PF01822 Pfam Desc: WSC domain
  misc_feature (428)..(509): Pfam Id: PF01822 Pfam Desc: WSC domain
  misc_feature (281)..(1155): NCBI GI: 46139165 Blast Desc: FG11097.1 [Gibberella zeae PH-1]
  misc_feature (589)..(1155): NCBI GI: 154299780 Blast Desc: BC1G_11516 [Botryotinia fuckeliana B05.10] gi|150857206|gb|EDN32398.1| BC1G_11516 [Botryotinia fuckeliana B05.10]
  misc_feature (59)..(1155): NCBI GI: 261355977 Blast Desc: WSC domain-containing protein [Verticillium albo-atrum VaMs.102]
  misc_feature (31)..(1155): NCBI GI: 38567019 Blast Desc: related to glyoxal oxidase precursor [Neurospora crassa]
  misc_feature (2)..(1155): NCBI GI: 171696056 Blast Desc: protein product [Podospora anserina] gi|170948270|emb|CAP60434.1| protein product [Podospora anserina]
  misc_feature (59)..(1155): NCBI GI: 164423069 Blast Desc: NCU09267 [Neurospora crassa OR74A] gi|157069935|gb|EAA35466.2| conserved [Neurospora crassa OR74A]
  misc_feature (33)..(1155): NCBI GI: 156055692 Blast Desc: SS1G_05198 [Sclerotinia sclerotiorum 1980] gi|154702982|gb|EDO02721.1| SS1G_05198 [Sclerotinia sclerotiorum 1980]
  misc_feature (256)..(1155): NCBI GI: 39952025 Blast Desc: MGG_01655 [Magnaporthe grisea 70-15] gi|145020503|gb|EDK04632.1| MGG_01655 [Magnaporthe grisea 70-15]
  misc_feature (167)..(1155): NCBI GI: 212539289 Blast Desc: conserved [Penicillium marneffei ATCC 18224] gi|210069542|gb|EEA23633.1| conserved [Penicillium marneffei ATCC 18224]
  misc_feature (302)..(1155): NCBI GI: 258576929 Blast Desc: conserved [Uncinocarpus reesii 1704] gi|237902912|gb|EEP77313.1| conserved [Uncinocarpus reesii 1704]
  misc_feature: Useful for introducing or modulating the production of volatile compounds
MRLLRSNLAPATLLLLSTASAQLLVPNAGQLNGTWTYSGCYTDVAGRTVNSAATTSVNMTIEYCLAFCQDGGFKYSGTEYHDECYCGNKLAAGAVEKNFTTDCTTPCAGNSTEACGGPSRLTMFYNPYNTGPQPNTGIANWTHIGCYSEGTTGRALTYGANVAGSDMSAKKCTAACQAAGYILAGTEYGGECYCGNTISNGGAPADDGCDMKCNGNSTEICGGGNRLNVYDFNMEFAITTSSTVAPATSTSITTTSTTTPSAIVVATSEKPTTTTTTPTTTSTSVVLKASPTSPSQPNAVANYVWYGCQTEATNGRALSLYTYADDAMTLESCQTFCSGKKTTYFGTEYGRECYCGNSFNTGSVSAPASECQQLCAGDAFEYCGNGNRLSVYAVNGTAPSDSGSKTTTTSSTAVAPAATGFPTGWTAQGCWQDGPNGRILPTYQAPDNQQLTQQSCAQLCAGKGYSISGTEYYTQCFCGNAIYNGGSELPDNSKCTTPCGGNAQQNCGGAGYLSIVSKGTPNVYQPPTTQLGGLNGTWTYKGCYPDNLNNKRTLPWAVMQPGVMTATTCLSQCAQFGYAAAGLEYGDECYCGDPIDVTTSGATKQPDTDCNVVCAGNASSFCGGGSRLSMYYWTGQTPLYTFKYPTGNNAGTYSNLVGGVVTPLMTMQSITGKVTFLEKWGTGAANSTGAYELDLSQTGNFNAAWRTMHLKTDVFCSAGLILPDKAGRQLTIGGWSLDSTYGVRLYIPDGSPGVPGVNDWQENVNELKLQRGRWYPSAMVMTNGSILVVGGEIGSNDKAEPTLELLPKVGPYLYMDWLARTDPNNLYPFLAVLPGGGIFVAYWNEARILNEATFATTKVLPNITGAVNNPQAGRTYPLEGTSVLLPQYAPYTDPLGVLICGGSTPGTSEALDNCASIYPEAANPKWVLERMPSKRVMSCIAPLPDGTYLIANGAQQGVAGFGLATNPNLNAVLYDPSQPVGSRMSIMANTSVARLYHSEAITLLDGRVLITGSDPQDGVHPEEIRVEVFTPPYLYSTKPRPKFTVANKDWTYGQTITLTLASAAAGTMKVSLLGAVSSTHGNSMGARTLFPAASCSGTTCTVTAPPNKYVCPPGWYQLFVLQDGIPAVGTYVRIGGDPGKLGNWPNYPDFTRPGI

SEQ ID NO: 27705 - DNA, 3956 bp, Muscodor strobelii
  misc_feature: SGI EST ID NO. CUFF.65367.0
  misc_feature: Variant of the nucleotide sequence at SEQ ID NO 27703
atgggacgcgttgctcaccattccgctgttttgtggtttgtgatctttgtttgactttacggcgctttctggtcaaggtcttcgcgatgaggctcctaaggtccaacttggccccggccacccttcttctcttgtcaactgcttctgctcaactgctggttcccaatgcgggccaactcaatggaacatggacttacagcggttgttataccgatgttgccggccgaaccgtaaactctgccgccacaacctcggttaatatgaccatagaatactgtctggcattttgccaagatggtgggttcaaatattctggtaccgaatatcatgatgagtgctattgcggcaacaagcttgcagccggagccgttgagaaaaacttcactaccgattgcactacgccctgtgcaggtaactcgacagaagcatgcggcggtccttctagactcacgatgttttataatccatataacacagggccgcaaccgaatacaggcattgctaactggactcacatcggatgctacagcgagggaacgactggtcgtgcgctcacatatggtgcgaatgtcgctggttcggacatgagtgcaaagaaatgtacagccgcatgccaagcagctggttacatacttgccggcaccgagtacggtggtgaatgctattgtggcaatacgatatccaatggcggtgcgcccgcagacgatggctgcgatatgaagtgtaatggcaactccacggaaatatgcggtggaggaaaccgtcttaatgtgtatgacttcaacatggagtttgccattacaactagctcaactgtcgctcctgcgacttcgacctcgataactacaacttcgactactacaccctctgcaatcgtagttgctacttctgagaagcctaccacaacaaccaccacacccaccacaacgtcgacgtcggtagtactcaaagctagccctactagcccttcgcaacccaacgcggttgccaactacgtctggtatggctgccagactgaggctacaaatggtcgtgctctaagcctctacacatacgctgatgatgcaatgacattagaatcttgtcagactttctgcagtggtaaaaagacgacctatttcggaacagaatacggccgcgagtgctactgtggcaatagtttcaacactggctctgtcagtgccccagcttctgaatgccagcagctttgcgccggcgatgcattcgagtattgcggcaatggtaaccgactgtccgtctatgctgtgaacggaactgctccctcggacagcggtagcaaaacaaccacaacttcttccacggccgtagcgccagctgcaactggcttcccaacaggatggactgcccaaggctgctggcaggacggccccaatggtcgcattctgccgacttatcaggcacccgataatcagcaactaacccaacagagctgcgcacagctatgtgcaggcaagggatactccatctcgggcactgagtactatacccaatgtttctgcgggaacgcaatctacaatggaggatctgaactcccagataactctaaatgcacgacgccttgcggtggtaatgcccagcaaaattgtggtggtgctggctatttgtcaatcgtctcgaagggcacccctaatgtgtaccaaccgccgactacgcaattaggcggccttaatggcacttggacgtataagggttgctatcctgacaacctaaacaataagcgaactctgccctgggcagttatgcagccaggtgtgatgactgccactacctgcttgtctcaatgcgcgcaatttggctatgccgccgcagggctggaatatggcgacgagtgctattgcggtgatccgattgacgtgaccacctcaggcgcaacaaagcagccggacacagactgcaatgttgtgtgtgctggcaacgcctcctctttctgcggcgggggatctcgattgagcatgtactactggactggccaaactcctctgtacactttcaaatatcccaccggtaacaatgccggcacttactccaatcttgttggcggtgttgtaacacctttgatgacaatgcagtcgattacaggcaaggtcactttcttagagaaatgggggactggtgctgctaacagcactggtgcttacgaactcgatctgagccaaaccggcaattttaatgctgcttggcgaaccatgcatctgaagactgatgttttctgctctgctggtctcatcctgcctgacaaagccggccgtcaattgacaattggaggttggtctctggatagcacttatggtgttcgtctttacattccggacggatctcctggtgtcccgggtgtcaatgactggcaggagaatgtcaatgagcttaagcttcagagaggtcgctggtatccttctgctatggtcatgacgaatggttcgatcttggtggttggcggtgaaatcggctccaacgacaaagctgaaccaacgttggagctcttgcctaaagttggaccatatctgtacatggattggttggcacgtactgaccctaacaacttgtacccattccttgcggttcttcccggaggcggcatcttcgtcgcttattggaatgaagctcgcattctaaacgaggcgactttcgcgaccactaaggttctcccaaacatcactggcgccgtcaacaacccccaggctggccgaacatatcctctcgagggtacgtccgttctgctcccacaatatgcgccctatacggaccctctcggggtccttatatgtggtggttcgactcctggtacgagcgaagccttggataactgtgcctccatctacccggaggcagccaaccctaaatgggtactggagcgtatgccatccaagcgcgtcatgtcttgtatagctcctcttcctgacggtacctatttgatcgccaacggagctcagcagggtgttgccggctttggtcttgccactaatccaaacctcaatgctgtgctgtatgatccctcacaacctgttggatctcgcatgtcgatcatggccaatacctcagtggcccgactttatcatagcgaggctatcaccttacttgacggtcgcgttctgattactggctctgatccccaggatggcgtccaccctgaggaaattcgtgttgaagtattcaccccgccctacttatacagcaccaagcctcgtcctaagttcactgttgccaacaaggattggacctatggccaaaccattactctcacgctcgcatcagccgctgcaggtacgatgaaggtctctctcctcggtgccgtctccagcacacatggcaactctatgggtgctcgtactctcttccccgccgcttcatgttccggaacaacatgcaccgtcacggcgccccccaacaagtacgtctgtcctccaggttggtaccagctcttcgtgctgcaagatggcattcctgctgttggaacctatgttcgtatcggtggtgatccaggcaagctcggcaactggcccaactaccctgactttactcgtccgggtatctaaatattcataatttttcccatttccatcacagcaactgccttttgcagtttcactccttcaaattatgtttaatatttagtatctagtgcctagtcaatactcggcgttgcttgcgctggtatattagactagaaaaccggggatctggagcgatctagatctcagcatagcaattggtatacttgaacttgatggcgattttatcgaagcatggcctgcgcttacgatttaagccttcaagcggatctatgagatatgggtatcttagtactaatatggctgaaatataggtagatagaatggataggatgtaggattggcaacactcaacgatataattatgaccggtatgacgatccctttagactatatataccaataccagatttcgaatgtttggat

SEQ ID NO: 27706 - DNA, 1719 bp, Muscodor strobelii
  misc_feature: SGI cDNA ID NO. 569496
  misc_feature: Encodes the peptide sequence at SEQ ID NO 27707
atgtcaggggcggagatcgcgggcattattctcgggaccatacctctcgtcatctccgctctcgaacattatcaatcaggcaaaggtgttgcagcctcctttgttaagtggcggggtttactaaagaaattgattctacggctgaaattgcagcagacgttcttttatcttgaggtactacagctcttacgcgcggcaggtattgaagaagtgatagataactctgatgtgacggaagaagtgtgtgtcatcatcttacgggacgcaaagaatgggtatgcactgcaggaataccttggacacctatacacaacgttcttggacatcctcgggcggtatgagaaatgcctgaaaacgattgcgtctcaactggggcatctttatcgtctaccaaaggtaagcagtttccaatttgacgatctcagggctattctagcggcaaacccggtatctgagaccggctttgcattcaaagagcgtctcagtttcaccatccaccatggtagtcttaaggagctgattgaagagctgggcgaagatcgactatctttaaaactcattacgaagggcatgaagaaccaacaagaatactcaatgaagaccccatccggagactcgaagagattcgcgaaaacgtttgcgcaggttcgaagcaatgctgttctcctacacctagctatcaacgacaagaacacatgtgattgtttgaccagtcacagagttttcttgaggttagacaaccacatgccgacgcagatagcaagacgcgtgccgggacgaaaattgcatgaacatacgtcatttggtcttgtatacagcctacaagacgactaccaggagatccaggtgaatactcgcagttccgatctgagcgatgatcgacgacagacagaaatgagccaacataagatatcaaaagttgtccacttccctcagatctcagcaactgatgtgtctggctcgcaagcgaatggtgacaatccgtcagcggtcgaagatatttgctcgcatgctaacactgctcgacaattaaaacacattttgaagctagatctgaccgatcagagcctttgcttgcgcagcagcgtgcctgagccttgtagggagtttctagagtcttgtagtctgactgatgttctccgggccggccttgcagacgaggatctcagattgacacccaaacaacagacactttttgcacttgatcttgccgcatcaataatccaacttcgggagacatactggctccacaagctcgacagagatgctgttagatttctaacgtgcgcctctttcatggatactaatatgccaaaaatacatgggtatgtggttgctgggccgtttgttgaacgaacccttgacaagacatgcccgagacaagtcatggcgaaccaaggggacaattatatagatcccaagacagcgcttctagaactagcgatcttgttacttgagatatggcaccatcggccactagagatgtgggcagagaaagtgggcatcgatcatgtcgatacaccagaagcccggtggattgcagcaatcaggtggctagagaagacgtcacaacatctaccgccacatcacttaacagcaatcgaacaatgtcttgcggtatgttccggtcgcctgcgtcaatgggaagatgttgagttcattcaacaatattgcgagaacatcatcaagcctttgaatgatagctgtaaaatatggtaa

SEQ ID NO: 27707 - protein, 572 aa, Muscodor strobelii
  misc_feature: SGI Peptide ID NO. 569496
  misc_feature (375)..(572): NCBI GI: 171693579 Blast Desc: protein product [Podospora anserina] gi|170946738|emb|CAP73542.1| protein product [Podospora anserina]
  misc_feature (1)..(569): NCBI GI: 119490807 Blast Desc: NFIA_063640 [Neosartorya fischeri NRRL 181] gi|119411260|gb|EAW21203.1| conserved [Neosartorya fischeri NRRL 181]
  misc_feature (1)..(569): NCBI GI: 115401750 Blast Desc: [Aspergillus terreus NIH2624] gi|114190404|gb|EAU32104.1| [Aspergillus terreus NIH2624]
  misc_feature (2)..(567): NCBI GI: 240107784 Blast Desc: CPC735_044070 [Coccidioides posadasii C735 delta SOWgp]
  misc_feature (2)..(567): NCBI GI: 119177046 Blast Desc: CIMG_07519 [Coccidioides immitis RS]
  misc_feature (1)..(567): NCBI GI: 169612237 Blast Desc: SNOG_09237 [Phaeosphaeria nodorum SN15] gi|160702463|gb|EAT83429.2| SNOG_09237 [Phaeosphaeria nodorum SN15]
  misc_feature (1)..(567): NCBI GI: 189190046 Blast Desc: [Pyrenophora tritici-repentis Pt-1C-BFP] gi|187972968|gb|EDU40467.1| [Pyrenophora tritici-repentis Pt-1C-BFP]
  misc_feature (1)..(572): NCBI GI: 116181310 Blast Desc: [Chaetomium globosum CBS 148.51] gi|88185580|gb|EAQ93048.1| [Chaetomium globosum CBS 148.51]
  misc_feature (1)..(260): NCBI GI: 169597841 Blast Desc: SNOG_01711 [Phaeosphaeria nodorum SN15] gi|111070240|gb|EAT91360.1| SNOG_01711 [Phaeosphaeria nodorum SN15]
  misc_feature (1)..(125): NCBI GI: 169615082 Blast Desc: SNOG_10696 [Phaeosphaeria nodorum SN15] gi|111060970|gb|EAT82090.1| SNOG_10696 [Phaeosphaeria nodorum SN15]
MSGAEIAGIILGTIPLVISALEHYQSGKGVAASFVKWRGLLKKLILRLKLQQTFFYLEVLQLLRAAGIEEVIDNSDVTEEVCVIILRDAKNGYALQEYLGHLYTTFLDILGRYEKCLKTIASQLGHLYRLPKVSSFQFDDLRAILAANPVSETGFAFKERLSFTIHHGSLKELIEELGEDRLSLKLITKGMKNQQEYSMKTPSGDSKRFAKTFAQVRSNAVLLHLAINDKNTCDCLTSHRVFLRLDNHMPTQIARRVPGRKLHEHTSFGLVYSLQDDYQEIQVNTRSSDLSDDRRQTEMSQHKISKVVHFPQISATDVSGSQANGDNPSAVEDICSHANTARQLKHILKLDLTDQSLCLRSSVPEPCREFLESCSLTDVLRAGLADEDLRLTPKQQTLFALDLAASIIQLRETYWLHKLDRDAVRFLTCASFMDTNMPKIHGYVVAGPFVERTLDKTCPRQVMANQGDNYIDPKTALLELAILLLEIWHHRPLEMWAEKVGIDHVDTPEARWIAAIRWLEKTSQHLPPHHLTAIEQCLAVCSGRLRQWEDVEFIQQYCENIIKPLNDSCKIW

SEQ ID NO: 27708 - DNA, 981 bp, Muscodor strobelii
  misc_feature: SGI cDNA ID NO. 569497
  misc_feature: Encodes the peptide sequence at SEQ ID NO 27709
atgactcattccgttaaggcaatcacgctcgaagagcatgtctccttccaagttcccggcgaccaatcatctttctataacgtgatatgggatgtatttcccgaccgcctcaaagctcttcgagaagtggacgagctccgaatcgccgacatggacgccgggaacgtctcgatccagatcatgtcatatcttcccggaatagcagtggctgaccctgaaggatgccgagctgcaaatgaccaatttgcgcgtattattaagcaacatccccatagatatcgcgcttttgccgttctacccatggaacacccaaaggaagcagcgcaagagctagagcgtggtgtcaaggagctggggttggtgggagcattgattgacaaccacttggcagacggcacgcactacgataacgagagattctggccagtgtttgccatggctgagaagctggatgtgcccatctacctgcatcctgcgcctccgagcaagagcgacatgaactcacgattcgccgggaactactccgttcccgtggcgatgggactcgcgacaggggcttggggctggcatgagaacgtcggtctacacgtcctcaagctctatgctgcaggtttattcgagcagcaccagaagttgaagatcatcatcggtcacatgggagagctgatgccttgcatgctcgaccgtgtggagcgtctagagttcttcaagaagatggcctgcgaccgagaaaagagcatgaagcaggtgtggagagagaatatttggatcacaacgagcggcatctttagcgccaacccgctggcaacaatcctgaaaacgacgccggttgatcgtatcatgtatagtgtcgactatccctttgagagcaacgtcactggccgcgaatttcttgatcagcttgcaagtagcgatttggttacgaaggaagagcttgagatgattgcgtacaaaaatgccacgaagttgtttaaactctga

SEQ ID NO: 27709 - protein, 326 aa, Muscodor strobelii
  misc_feature: SGI Peptide ID NO. 569497
  misc_feature (8)..(326): Pfam Id: PF04909 Pfam Desc: Amidohydrolase
  misc_feature (1)..(326): NCBI GI: 145233163 Blast Desc: An02g08220 [Aspergillus niger] gi|134056880|emb|CAK37784.1| protein product [Aspergillus niger]
  misc_feature (8)..(326): NCBI GI: 256723505 Blast Desc: NECHADRAFT_93978 [Nectria haematococca mpVI 77-13-4]
  misc_feature (8)..(326): NCBI GI: 256723398 Blast Desc: NECHADRAFT_55715 [Nectria haematococca mpVI 77-13-4]
  misc_feature (8)..(326): NCBI GI: 169781004 Blast Desc: [Aspergillus oryzae RIB40] gi|238504768|ref|XP_002383613.1| 2-amino-3-carboxymuconate-6-semialdehyde decarboxylase, flavus
  misc_feature (8)..(326): NCBI GI: 67901848 Blast Desc: AN7911.2 [Aspergillus nidulans FGSC A4] gi|40740375|gb|EAA59565.1| AN7911.2 [Aspergillus nidulans FGSC A4] gi|259480660|tpe|CBF73507.1| TPA: conserved [Aspergillus FGSC
  misc_feature (6)..(326): NCBI GI: 169617495 Blast Desc: SNOG_11927 [Phaeosphaeria nodorum SN15] gi|111059851|gb|EAT80971.1| SNOG_11927 [Phaeosphaeria nodorum SN15]
  misc_feature (8)..(326): NCBI GI: 154292555 Blast Desc: BC1G_14801 [Botryotinia fuckeliana B05.10] gi|150845882|gb|EDN21075.1| BC1G_14801 [Botryotinia fuckeliana B05.10]
  misc_feature (8)..(326): NCBI GI: 85094097 Blast Desc: NCU06058 [Neurospora crassa OR74A] gi|28921276|gb|EAA30585.1| conserved [Neurospora crassa OR74A]
  misc_feature (8)..(326): NCBI GI: 171680737 Blast Desc: protein product [Podospora anserina] gi|170939996|emb|CAP65222.1| protein product [Podospora anserina]
  misc_feature (8)..(326): NCBI GI: 156051774 Blast Desc: SS1G_07294 [Sclerotinia sclerotiorum 1980] gi|154705072|gb|EDO04811.1| SS1G_07294 [Sclerotinia sclerotiorum 1980]
  misc_feature (37)..(326): SWISSPROT Homolog: EC 4.1.1.46 o-pyrocatechuate decarboxylase
MTHSVKAITLEEHVSFQVPGDQSSFYNVIWDVFPDRLKALREVDELRIADMDAGNVSIQIMSYLPGIAVADPEGCRAANDQFARIIKQHPHRYRAFAVLPMEHPKEAAQELERGVKELGLVGALIDNHLADGTHYDNERFWPVFAMAEKLDVPIYLHPAPPSKSDMNSRFAGNYSVPVAMGLATGAWGWHENVGLHVLKLYAAGLFEQHQKLKIIIGHMGELMPCMLDRVERLEFFKKMACDREKSMKQVWRENIWITTSGIFSANPLATILKTTPVDRIMYSVDYPFESNVTGREFLDQLASSDLVTKEELEMIAYKNATKLFKL

SEQ ID NO: 27710 - DNA, 348 bp, Muscodor strobelii
  misc_feature: SGI EST ID NO. CUFF.65351.0
  misc_feature: Variant of the nucleotide sequence at SEQ ID NO 27708
gtttattcgagcagcaccagaagttgaagatcatcatcggtcacatgggagagctgatgccttgcatgctcgaccgtgtggagcgtctagagttcttcaagaagatggcctgcgaccgagaaaagagcatgaagcaggtgtggagagagaatatttggatcacaacgagcggcatctttagcgccaacccgctggcaacaatcctgaaaacgacgccggttgatcgtatcatgtatagtgtcgactatccctttgagagcaacgtcactggccgcgaatttcttgatcagcttgcaagtagcgatttggttacgaaggaagagcttgagatgattgcgtacaaaaatg

SEQ ID NO: 27711 - DNA, 825 bp, Muscodor strobelii
  misc_feature: SGI cDNA ID NO. 569498
  misc_feature: Encodes the peptide sequence at SEQ ID NO 27712
atgaagagcgtcaaaactcttccactgacagatgactgtcaccactggactcaccttggcgaggtgccatgggacttgcagaaatactggcaacagagatacacaatcttcccctattacgacgatggcatatacatgaccgaagacgcctggtacggtgtaacaccagaaccagtcgccatacgcatcgcacaagatctccacactctcataagttcagacaaacgcataatcatcgacgcatttgcaggcgtcggcgcaaactccatcagcctagccatgcagacggaagaagacggtgtcacgccacgatgggacaaagtaatagccatcgagctagatgccgccacactcgcatgtgcgcagcataatgctgcactttacgaagttgcggagcatatcacctgggtactaggcgatagcttcaagttccttgagctcctgaccaaggattcacagcagttggaggaggttcttcaagtcgacatctccaaaacgtccatcttcgcatcaccgccttggggtggcccgggatatcggacggacgatgtttttgatttgagtacgatggagccgtacaatttgatgaagctgcatgaggcgtatagggtgatggatcatgcgctctatctacctcggaccagcgacttgaggcaactcgctaagctcgtaccggacggggtcaagatcgatgtcgttcagtactgtgttgagggcgctagcaaggcgatggtcgcatatatgccggcagctgttgagcaggacgctgagaagaatgtaagggaggataacgatgcaccaatagaggacaagtcagccgggtag

SEQ ID NO: 27712 - protein, 274 aa, Muscodor strobelii
  misc_feature: SGI Peptide ID NO. 569498
  misc_feature (27)..(251): Pfam Id: PF09445 Pfam Desc: RNA cap guanine-N2 methyltransferase
  misc_feature (7)..(250): NCBI GI: 116180640 Blast Desc: CHGG_00948 [Chaetomium globosum CBS 148.51] gi|88185245|gb|EAQ92713.1| CHGG_00948 [Chaetomium globosum CBS 148.51]
  misc_feature (1)..(257): NCBI GI: 46125431 Blast Desc: FG07093.1 [Gibberella zeae PH-1]
  misc_feature (1)..(258): NCBI GI: 256732619 Blast Desc: [Nectria haematococca mpVI 77-13-4]
  misc_feature (4)..(250): NCBI GI: 156057367 Blast Desc: SS1G_04414 [Sclerotinia sclerotiorum 1980] gi|154702200|gb|EDO01939.1| SS1G_04414 [Sclerotinia sclerotiorum 1980]
  misc_feature (4)..(254): NCBI GI: 171687583 Blast Desc: protein product [Podospora anserina] gi|170943753|emb|CAP69405.1| protein product [Podospora anserina]
  misc_feature (1)..(251): NCBI GI: 39941690 Blast Desc: MGG_05756 [Magnaporthe grisea 70-15] gi|145022467|gb|EDK06487.1| MGG_05756 [Magnaporthe grisea 70-15]
  misc_feature (1)..(265): NCBI GI: 85091969 Blast Desc: NCU09218 [Neurospora crassa OR74A] gi|28920563|gb|EAA29926.1| NCU09218 [Neurospora crassa OR74A] gi|29150111|emb|CAD79672.1| conserved [Neurospora crassa]
  misc_feature (1)..(247): NCBI GI: 70991803 Blast Desc: RNA methylase family protein [Aspergillus fumigatus Af293] gi|66848383|gb|EAL88712.1| RNA methylase family protein, [Aspergillus fumigatus Af293] gi|159124312|gb|EDP49430.1| RNA
  misc_feature (1)..(247): NCBI GI: 119469769 Blast Desc: RNA methylase family protein, [Neosartorya fischeri NRRL 181] gi|119406129|gb|EAW16080.1| RNA methylase family protein, [Neosartorya fischeri NRRL 181]
  misc_feature (12)..(247): NCBI GI: 121699691 Blast Desc: RNA methylase family protein, [Aspergillus clavatus NRRL 1] gi|119396253|gb|EAW06685.1| RNA methylase family protein, [Aspergillus clavatus NRRL 1]
MKSVKTLPLTDDCHHWTHLGEVPWDLQKYWQQRYTIFPYYDDGIYMTEDAWYGVTPEPVAIRIAQDLHTLISSDKRIIIDAFAGVGANSISLAMQTEEDGVTPRWDKVIAIELDAATLACAQHNAALYEVAEHITWVLGDSFKFLELLTKDSQQLEEVLQVDISKTSIFASPPWGGPGYRTDDVFDLSTMEPYNLMKLHEAYRVMDHALYLPRTSDLRQLAKLVPDGVKIDVVQYCVEGASKAMVAYMPAAVEQDAEKNVREDNDAPIEDKSAG

SEQ ID NO: 27713 - DNA, 1413 bp, Muscodor strobelii
  misc_feature: SGI EST ID NO. CUFF.65358.0
  misc_feature: Variant of the nucleotide sequence at SEQ ID NO 27711
ctgaatatctcattcataaaaagcctcttacctcgcaattttctaatcaaaacattggttcctttaacaaaataggacattgggacccccgaaaccatacagattctatagccggagcttgtctatcaagatcactaccgaccgaatgaagagcgtcaaaactcttccactgacagatgactgtcaccactggactcaccttggcgaggtgccatgggacttgcagaaatactggcaacagagatacacaatcttcccctattacgacgatggcatatacatgaccgaagacgcctggtacggtgtaacaccagaaccagtcgccatacgcatcgcacaagatctccacactctcataagttcagacaaacgcataatcatcgacgcatttgcaggcgtcggcgcaaactccatcagcctagccatgcagacggaagaagacggtgtcacgccacgatgggacaaagtaatagccatcgagctagatgccgccacactcgcatgtgcgcagcataatgctgcactttacgaagttgcggagcatatcacctgggtactaggcgatagcttcaagttccttgagctcctgaccaaggattcacagcagttggaggaggttcttcaagtcgacatctccaaaacgtccatcttcgcatcaccgccttggggtggcccgggatatcggacggacgatgtttttgatttgagtacgatggagccgtacaatttgatgaagctgcatgaggcgtatagggtgatggatcatgcgctctatctacctcggaccagcgacttgaggcaactcgctaagctcgtaccggacggggtcaagatcgatgtcgttcagtactgtgttgagggcgctagcaaggcgatggtcgcatatatgccggcagctgttgagcaggacgctgagaagaatgtaagggaggataacgatgcaccaatagaggacaagtcagccgggtagagccccgttgatgcgccatcttcaggatcggggtgccttatgtgttaggatcagggcgttgatcgtggtcctcggtgtgaagattagtcttccagtttagtcgagcggaaatagctcgtcggatacccagcatctgctcgggggtattaatgtcgttatgacgctcacgattcagatgagtttactgctctctatgacgatatatgttgtcgccacaaaaacatgaaatcaacaacttatattgcgcgcttatgacatcgctatcgatataattcccgcctcgtcttaccatagtcacacgtgtacctaagtgagcacctttcaaaacaccgagatcatccatgcttcatgcttcatgctcagaaacctgcggtatgcctgtgtccctctttctctgctcaccaaatcacagtctcgaacttcaaccccctagaccgggctcg

SEQ ID NO: 27714 - DNA, 1077 bp, Muscodor strobelii
  misc_feature: SGI cDNA ID NO. 569499
  misc_feature: Encodes the peptide sequence at SEQ ID NO 27715
atgttcaacgcactcaatcgctatctctcccgcctcgatggcgacacccgtccacagcaaaaggagagctcgggctggggattccaggtgctacgtaatgcgaatctcgagcttgcgatagagccctggtttgactacatagtcggcatcaatggtcgcgttatcgacaacccagaccccatgctcttcgcccaagaagtgcgaaactgcgctggcggcagcgtctccttaggactctggagcgcaaagggccaacgaacacgagtgcttcacgtccccgtgccttcagagacggcatcactcggcatctccctccaatgggcttctctatccctcgcctcaacaatatggcacgttctcgacgtcccagccaattctcccgcagatctcgccggtctcctcccctacagcgactacatcctcggcacacctgatgggatcctacatggcgagagcggactgggcgagctagtcgaggactacatcggtcgtccattgaaactgtgggtctacaacaacgaatacaacgtaacccgcgaagtcgagatcgtgccatcgcgcgactggggcggtgaaggcgcactgggctgtattctcgggttcggcgcccttcaccgtctccccgcgcccctcgacgagcctatcgaagcgccaggcgagatgatgttcgacggtggttcgtcaggctcacagaatgcatacggtggtcaattcacgactctggcgcctccaacagacaacactggatttacctcgccatcacaaaacacattcgcacccccacccgctcagggctctgagttcttggttccagcagatatgacggcgcccccaccaccgacaggaggcacgagtgcgccgccgaggggcaagaagaaagatagacatgcgcatggacctagtccgaatagactgatggatgactattttgctgaggaggagaagaagagtaaggcgcttgatggaaatttcacggctagtaagacaccgccgcctccaccgcccaaggctgggggcccgccaaaaggtggaccaccaccggcggcgaaggctgaggaggatgacgatgtggaatga

SEQ ID NO: 27715 - protein, 358 aa, Muscodor strobelii
  misc_feature: SGI Peptide ID NO. 569499
  misc_feature (77)..(348): Pfam Id: PF04495 Pfam Desc: GRASP55/65 family
  misc_feature (77)..(213): Pfam Id: PF04495 Pfam Desc: GRASP55/65 family
  misc_feature (1)..(321): NCBI GI: 171687581 Blast Desc: protein product [Podospora anserina] gi|170943752|emb|CAP69404.1| protein product [Podospora anserina]
  misc_feature (1)..(321): NCBI GI: 116180638 Blast Desc: CHGG_00947 [Chaetomium globosum CBS 148.51] gi|88185244|gb|EAQ92712.1| CHGG_00947 [Chaetomium globosum CBS 148.51]
  misc_feature (1)..(351): NCBI GI: 256733074 Blast Desc: [Nectria haematococca mpVI 77-13-4]
  misc_feature (1)..(344): NCBI GI: 39941692 Blast Desc: MGG_05757 [Magnaporthe grisea 70-15] gi|145022468|gb|EDK06488.1| MGG_05757 [Magnaporthe grisea 70-15]
  misc_feature (1)..(321): NCBI GI: 46125429 Blast Desc: FG07092.1 [Gibberella zeae PH-1]
  misc_feature (1)..(321): NCBI GI: 156057369 Blast Desc: SS1G_04415 [Sclerotinia sclerotiorum 1980] gi|154702201|gb|EDO01940.1| SS1G_04415 [Sclerotinia sclerotiorum 1980]
  misc_feature (1)..(321): NCBI GI: 154324222 Blast Desc: BC1G_00510 [Botryotinia fuckeliana B05.10] gi|150842739|gb|EDN17932.1| BC1G_00510 [Botryotinia fuckeliana B05.10]
  misc_feature (1)..(321): NCBI GI: 85091967 Blast Desc: NCU09217 [Neurospora crassa OR74A] gi|28920562|gb|EAA29925.1| conserved [Neurospora crassa OR74A] gi|29150110|emb|CAD79671.1| conserved [Neurospora crassa]
  misc_feature (1)..(344): NCBI GI: 212529034 Blast Desc: Golgi reassembly stacking protein, [Penicillium marneffei ATCC 18224] gi|210074072|gb|EEA28159.1| Golgi reassembly stacking protein, [Penicillium marneffei ATCC 18224]
  misc_feature (1)..(339): NCBI GI: 225681085 Blast Desc: conserved [Paracoccidioides brasiliensis Pb03]
MFNALNRYLSRLDGDTRPQQKESSGWGFQVLRNANLELAIEPWFDYIVGINGRVIDNPDPMLFAQEVRNCAGGSVSLGLWSAKGQRTRVLHVPVPSETASLGISLQWASLSLASTIWHVLDVPANSPADLAGLLPYSDYILGTPDGILHGESGLGELVEDYIGRPLKLWVYNNEYNVTREVEIVPSRDWGGEGALGCILGFGALHRLPAPLDEPIEAPGEMMFDGGSSGSQNAYGGQFTTLAPPTDNTGFTSPSQNTFAPPPAQGSEFLVPADMTAPPPPTGGTSAPPRGKKKDRHAHGPSPNRLMDDYFAEEEKKSKALDGNFTASKTPPPPPPKAGGPPKGGPPPAAKAEEDDDVE

SEQ ID NO: 27716 - DNA, 1561 bp, Muscodor strobelii
  misc_feature: SGI EST ID NO. CUFF.65503.0
  misc_feature: Variant of the nucleotide sequence at SEQ ID NO 27714
gctgagcttcttgatgacaacttgtccctgttcctccagacctcgagaggcaaggaaacgttccaatgtacatctgtcccaaggccactgatagatagttgcccaccatgttcaacgcactcaatcgctatctctcccgcctcgatggcgacacccgtccacagcaaaaggagagctcgggctggggattccaggtgctacgtaatgcgaatctcgagcttgcgatagagccctggtttgactacatagtcggcatcaatggtcgcgttatcgacaacccagaccccatgctcttcgcccaagaagtgcgaaactgcgctggcggcagcgtctccttaggactctggagcgcaaagggccaacgaacacgagtgcttcacgtccccgtgccttcagagacggcatcactcggcatctccctccaatgggcttctctatccctcgcctcaacaatatggcacgttctcgacgtcccagccaattctcccgcagatctcgccggtctcctcccctacagcgactacatcctcggcacacctgatgggatcctacatggcgagagcggactgggcgagctagtcgaggactacatcggtcgtccattgaaactgtgggtctacaacaacgaatacaacgtaacccgcgaagtcgagatcgtgccatcgcgcgactggggcggtgaaggcgcactgggctgtattctcgggttcggcgcccttcaccgtctccccgcgcccctcgacgagcctatcgaagcgccaggcgagatgatgttcgacggtggttcgtcaggctcacagaatgcatacggtggtcaattcacgactctggcgcctccaacagacaacactggatttacctcgccatcacaaaacacattcgcacccccacccgctcagggctctgagttcttggttccagcagatatgacggcgcccccaccaccgacaggaggcacgagtgcgccgccgaggggcaagaagaaagatagacatgcgcatggacctagtccgaatagactgatggatgactattttgctgaggaggagaagaagagtaaggcgcttgatggaaatttcacggctagtaagacaccgccgcctccaccgcccaaggctgggggcccgccaaaaggtggaccaccaccggcggcgaaggctgaggaggatgacgatgtggaatgagcgatgtatgataggggtaagatggaggaatgagacattagacgcgggacatgaatggaccacaatagacattgccaagcatggtgcttgttgatcttgaattcattcgtagtttttaactgtacatatgcatcgcagtggacttgtattcctcgcaatatgaaggccaaatctgtgatcacctggacattcttgccctctggaatctcgccctcgtatccgatatctctttcgtaccggtccttgatgccgtacaagtaaatcgttaaccctctcttttgtgacgccgtcgctagttgctgtttcgctcagtttatgaagttaatacagaagaaatgcaggatcagactgcccactacgaaatctgcgaatgctct

SEQ ID NO: 27717 - DNA, 387 bp, Muscodor strobelii
  misc_feature: SGI cDNA ID NO. 569500
  misc_feature: Encodes the peptide sequence at SEQ ID NO 27718
atggcgcccaagaaaacggccggcagcagcagcgatgccgccgcatcagccagccagatcgacaaggtggccatgaatatcttccagcactaccagaagacgacgccccagcgcaccaagctgatcgatgtgtttatggccttcctggccattgtcggcggattgcaatttgtgtactgtgttttggctggaaactaccccttcaacgccttcctctcaggcttttccgccaccgttggacagttcgtcctcaccgcatcgctccgaatccagaccaccgaagccaacaagtccgatttccccgccgtttcaccagagagagcattcgcagatttcgtagtgggcagtctgatcctgcatttcttctgtattaacttcataaactga

SEQ ID NO: 27718 - protein, 128 aa, Muscodor strobelii
  misc_feature: SGI Peptide ID NO. 569500
  misc_feature (16)..(128): Pfam Id: PF02109 Pfam Desc: DAD family
  misc_feature (10)..(128): NCBI GI: 171687579 Blast Desc: protein product [Podospora anserina] gi|170943751|emb|CAP69403.1| protein product [Podospora anserina]
  misc_feature (15)..(128): NCBI GI: 116180636 Blast Desc: CHGG_00946 [Chaetomium globosum CBS 148.51] gi|88185243|gb|EAQ92711.1| CHGG_00946 [Chaetomium globosum CBS 148.51]
  misc_feature (21)..(113): NCBI GI: 85091965 Blast Desc: NCU09216 [Neurospora crassa OR74A] gi|28920561|gb|EAA29924.1| [Neurospora crassa OR74A] gi|29150109|emb|CAD79670.1| related to apoptotic cell death DAD1
  misc_feature (21)..(128): NCBI GI: 145615683 Blast Desc: MGG_05758 [Magnaporthe grisea 70-15] gi|145022469|gb|EDK06489.1| MGG_05758 [Magnaporthe grisea 70-15]
  misc_feature (10)..(128): NCBI GI: 169602515 Blast Desc: SNOG_04260 [Phaeosphaeria nodorum SN15] gi|111066900|gb|EAT88020.1| SNOG_04260 [Phaeosphaeria nodorum SN15]
  misc_feature (3)..(128): NCBI GI: 238843378 Blast Desc: OST2p [Microsporum canis CBS 113480]
  misc_feature (22)..(128): NCBI GI: 255940742 Blast Desc: Pc16g08190 [Penicillium chrysogenum Wisconsin 54-1255] gi|211585763|emb|CAP93489.1| Pc16g08190 [Penicillium chrysogenum Wisconsin 54-1255]
  misc_feature (1)..(128): NCBI GI: 189203555 Blast Desc: PTRG_07781 [Pyrenophora tritici-repentis Pt-1C-BFP] gi|187985212|gb|EDU50700.1| PTRG_07781 [Pyrenophora tritici-repentis Pt-1C-BFP]
  misc_feature (18)..(128): NCBI GI: 145255064 Blast Desc: An18g03920 [Aspergillus niger] gi|134084437|emb|CAK97429.1| protein product [Aspergillus niger]
  misc_feature (2)..(128): NCBI GI: 121703009 Blast Desc: oligosaccharyl transferase subunit Dad1, [Aspergillus clavatus NRRL 1] gi|119397912|gb|EAW08343.1| oligosaccharyl transferase subunit Dad1, [Aspergillus clavatus NRRL 1]
  misc_feature (19)..(127): SWISSPROT Homolog: EC 2.4.1.119 Dolichyl-diphosphooligosaccharide--protein glycotransferase
MAPKKTAGSSSDAAASASQIDKVAMNIFQHYQKTTPQRTKLIDVFMAFLAIVGGLQFVYCVLAGNYPFNAFLSGFSATVGQFVLTASLRIQTTEANKSDFPAVSPERAFADFVVGSLILHFFCINFIN

SEQ ID NO: 27719 - DNA, 2151 bp, Muscodor strobelii
  misc_feature: SGI EST ID NO. CUFF.65504.1
  misc_feature: Variant of the nucleotide sequence at SEQ ID NO 27717
gacgcctctgattcgtcacttggcactcgtcactttcgaatcgggattgtagctttcgtgtccatttgccatacacccgtacagtaccatcaatgtgagtgctgcgcaagactcaggcaccacgtaaaccccccgacgacagtttcgcaacacatagccgattcagcctccgacatcgacaacttctacactcgatatcttgtaacacacataatggcgcccaagaaaacggccggcagcagcagcgatgccgccgcatcagccagccagatcgacaaggtggccatgaatatcttccagcactaccagaagacgacgccccagcgcaccaagctgatcgatgtgtttatggccttcctggccattgtcggcggattgcaatttgtgtactgtgttttggctggaaactaccccttcaacgccttcctctcaggcttttccgccaccgttggacagttcgtcctcaccgcatcgctccgaatccagaccaccgaagccaacaagtccgatttccccgccgtttcaccagagagagcattcgcagatttcgtagtgggcagtctgatcctgcatttcttctgtattaacttcataaactgagcgaaacagcaactagcgacggcgtcacaaaagagagggttaacgatttacttgtacggcatcaaggaccggtacgaaagagatatcggatacgagggcgagattccagagggcaagaatgtccaggtgatcacagatttggccttcatattgcgaggaatacaagtccactgcgatgcatatgtacagttaaaaactacgaatgaattcaagatcaacaagcaccatgcttggcaatgtctattgtggtccattcatgtcccgcgtctaatgtctcattcctccatcttacccctatcatacatcgctcattccacatcgtcatcctcctcagccttcgccgccggtggtggtccaccttttggcgggcccccagccttgggcggtggaggcggcggtgtcttactagccgtgaaatttccatcaagcgccttactcttcttctcctcctcagcaaaatagtcatccatcagtctattcggactaggtccatgcgcatgtctatctttcttcttgcccctcggcggcgcactcgtgcctcctgtcggtggtgggggcgccgtcatatctgctggaaccaagaactcagagccctgagcgggtgggggtgcgaatgtgttttgtgatggcgaggtaaatccagtgttgtctgttggaggcgccagagtcgtgaattgaccaccgtatgcattctgtgagcctgacgaaccaccgtcgaacatcatctcgcctggcgcttcgataggctcgtcgaggggcgcggggagacggtgaagggcgccgaacccgagaatacagcccagtgcgccttcaccgccccagtcgcgcgatggcacgatctcgacttcgcgggttacgttgtattcgttgttgtagacccacagtttcaatggacgaccgatgtagtcctcgactagctcgcccagtccgctctcgccatgtaggatcccatcaggtgtgccgaggatgtagtcgctgtaggggaggagaccggcgagatctgcgggagaattggctgggacgtcgagaacgtgccatattgttgaggcgagggatagagaagcccattggagggagatgccgagtgatgccgtctctgaaggcacggggacgtgaagcactcgtgttcgttggccctttgcgctccagagtcctaaggagacgctgccgccagcgcagtttcgcacttcttgggcgaagagcatggggtctgggttgtcctatggccgccattatggttagaaatagtataatacgtcggggggtatgcagaacatacgataacgcgaccattgatgccgactatgtagtcaaaccagggctctatcgcaagctcgagattcgcattacgtagcacctggaatccccagcccgagctctccttttgctgtggacgggtgtcgccatcgaggcgggagagatagcgattgagtgcgttgaacatggtgggcaactatctatcagtggccttgggacagatgtacattggaacgtttccttgcctctcgaggtctggaggaacagggacaagttgtcatcaagaagctcagc

SEQ ID NO: 27720 - DNA, 315 bp, Muscodor strobelii
  misc_feature: SGI cDNA ID NO. 569501
  misc_feature: Encodes the peptide sequence at SEQ ID NO 27721
atggctctgtcagacatcgcatacctgctcggtgctcttaccgcaggcggtggcaccatgggctatgtcaaaactggttctgtaccctcaattgctgccggtatgactgtcggcattctctacggtctcggtggatatcgcatacagaaccgccagccctacggcgtcgagctcgctcttctggcctccgtcgtcctcggtggctcttccatcccccgcgcccttcgcctccggaagcccgttcctactgttttgagctttatctccgtctttggcatgtacaccttcggcaatgctttcaggaagaccttgtaa

SEQ ID NO: 27721 - protein, 104 aa, Muscodor strobelii
  misc_feature: SGI Peptide ID NO. 569501
  misc_feature (4)..(100): Pfam Id: PF03647 Pfam Desc: Transmembrane proteins 14C
  misc_feature (1)..(101): NCBI GI: 156057373 Blast Desc: SS1G_04417 [Sclerotinia sclerotiorum 1980] gi|154702203|gb|EDO01942.1| SS1G_04417 [Sclerotinia sclerotiorum 1980]
  misc_feature (1)..(104): NCBI GI: 85114385 Blast Desc: NCU09251 [Neurospora crassa OR74A] gi|28926477|gb|EAA35450.1| [Neurospora crassa OR74A] gi|38567002|emb|CAE76302.1| conserved [Neurospora crassa]
  misc_feature (7)..(102): NCBI GI: 46125425 Blast Desc: FG07090.1 [Gibberella zeae PH-1]
  misc_feature (1)..(101): NCBI GI: 154324218 Blast Desc: BC1G_00508 [Botryotinia fuckeliana B05.10] gi|150842737|gb|EDN17930.1| BC1G_00508 [Botryotinia fuckeliana B05.10]
  misc_feature (3)..(102): NCBI GI: 261357341 Blast Desc: conserved [Verticillium albo-atrum VaMs.102]
  misc_feature (7)..(102): NCBI GI: 256733073 Blast Desc: [Nectria haematococca mpVI 77-13-4]
  misc_feature (1)..(104): NCBI GI: 116181798 Blast Desc: CHGG_01527 [Chaetomium globosum CBS 148.51] gi|88185824|gb|EAQ93292.1| CHGG_01527 [Chaetomium globosum CBS 148.51]
  misc_feature (2)..(100): NCBI GI: 189203557 Blast Desc: PTRG_07782 [Pyrenophora tritici-repentis Pt-1C-BFP] gi|187985213|gb|EDU50701.1| PTRG_07782 [Pyrenophora tritici-repentis Pt-1C-BFP]
  misc_feature (10)..(102): NCBI GI: 242802185 Blast Desc: UPF0136 domain protein [Talaromyces stipitatus ATCC 10500] gi|218717267|gb|EED16688.1| UPF0136 domain protein [Talaromyces stipitatus ATCC 10500]
  misc_feature (4)..(101): NCBI GI: 261196674 Blast Desc: UPF0136 domain-containing protein [Ajellomyces dermatitidis SLH14081] gi|239595985|gb|EEQ78566.1| UPF0136 domain-containing protein [Ajellomyces dermatitidis SLH14081]
MALSDIAYLLGALTAGGGTMGYVKTGSVPSIAAGMTVGILYGLGGYRIQNRQPYGVELALLASVVLGGSSIPRALRLRKPVPTVLSFISVFGMYTFGNAFRKTL

SEQ ID NO: 27722 - DNA, 1098 bp, Muscodor strobelii
  misc_feature: SGI EST ID NO. CUFF.65474.0
  misc_feature: Variant of the nucleotide sequence at SEQ ID NO 27720
ggggaagctccgcattctctcggagctgctagccttcgaagccgaccaacccgccagatctacatttgttgttctcaaggttcactgacgtgatatcattgtgttgaaaacacctacatttcgaatctaaaactaatcgcataacgctataaaatctaattcgcaatggctctgtcagacatcgcatacctgctcggtgctcttaccgcaggcggtggcaccatgggctatgtcaaaactggttctgtaccctcaattgctgccggtatgactgtcggcattctctgtacgtattataatatattgcaatctatggcgcgttattagaccaattcctgtcgatgcgctgacccgagtgaaatctagacggtctcggtggatatcgcatacagaaccgccagccctacggcgtcgagctcgctcttctggcctccgtcgtcctcggtggctcttccatcccccgcgcccttcgcctccggaagcccgttcctactgttttgagctttatctccgtctttggcatgtacaccttcggcaatgctttcaggaagaccttgtaagggttcagagaccgctaggtcaacggacggagacttggggacggcagatcggtatgaaaatggggattggtctcaaatgtacatcaaacagttcttctggtataatatgtagcgaaaacgacatcgtacgggagaaccgcaatgtgatcgtgatgtaaacctctgtataacgcctggccatgcccttgtaatgccggatatccctctctcatatatcgtacaacccgttgatgcgtgcggtgtctttcaatacataagcttcgacttcgatcctcgatctatgaagatggtattgttgtgtgcggtcgtttagctattctcgtcgatctcggcccaggctttgttcagcttttcgcgtttggccttggcggcttctcggttggcggctgtgcgcttcagtcgctcggcgcggaggcacatgttgacattgtgtttagcatcgttgcacatgcccatggacttccacagaaaaccccgggcatggcattcttcaagtgcagtcatgatctcttcgcatgctgttgggagagaaatcaat

SEQ ID NO: 27723 - DNA, 243 bp, Muscodor strobelii
  misc_feature: SGI cDNA ID NO. 569502
  misc_feature: Reduced expression when VOC is produced
  misc_feature: Encodes the peptide sequence at SEQ ID NO 27724
atgcatcctcatttgcataccaaagacaatacagcatgcgaagagatcatgactgcacttgaagaatgccatgcccggggttttctgtggaagtccatgggcatgtgcaacgatgctaaacacaatgtcaacatgtgcctccgcgccgagcgactgaagcgcacagccgccaaccgagaagccgccaaggccaaacgcgaaaagctgaacaaagcctgggccgagatcgacgagaatagctaa

SEQ ID NO: 27724 - protein, 80 aa, Muscodor strobelii
  misc_feature: SGI Peptide ID NO. 569502
  misc_feature (1)..(76): Pfam Id: PF08583 Pfam Desc: Uncharacterised protein family (UPF0287)
  misc_feature (1)..(80): NCBI GI: 156057375 Blast Desc: SS1G_04418 [Sclerotinia sclerotiorum 1980] gi|154702204|gb|EDO01943.1| SS1G_04418 [Sclerotinia sclerotiorum 1980]
  misc_feature (1)..(80): NCBI GI: 171696066 Blast Desc: protein product [Podospora anserina] gi|170948275|emb|CAP60439.1| protein product [Podospora anserina]
  misc_feature (1)..(79): NCBI GI: 189203887 Blast Desc: conserved [Pyrenophora tritici-repentis Pt-1C-BFP] gi|187985378|gb|EDU50866.1| conserved [Pyrenophora tritici-repentis Pt-1C-BFP]
  misc_feature (1)..(80): NCBI GI: 85114381 Blast Desc: NCU09250 [Neurospora crassa OR74A] gi|28926476|gb|EAA35449.1| [Neurospora crassa OR74A] gi|38567001|emb|CAE76301.1| conserved [Neurospora crassa]
  misc_feature (1)..(78): NCBI GI: 261357340 Blast Desc: conserved [Verticillium albo-atrum VaMs.102]
  misc_feature (1)..(75): NCBI GI: 242804006 Blast Desc: conserved [Talaromyces stipitatus ATCC 10500] gi|218717633|gb|EED17054.1| conserved [Talaromyces stipitatus ATCC 10500]
  misc_feature (1)..(75): NCBI GI: 212539656 Blast Desc: conserved [Penicillium marneffei ATCC 18224] gi|210067282|gb|EEA21374.1| conserved [Penicillium marneffei ATCC 18224]
  misc_feature (1)..(75): NCBI GI: 238843282 Blast Desc: conserved [Microsporum canis CBS 113480]
  misc_feature (17)..(80): NCBI GI: 154324216 Blast Desc: BC1G_00507 [Botryotinia fuckeliana B05.10] gi|150842736|gb|EDN17929.1| BC1G_00507 [Botryotinia fuckeliana B05.10]
  misc_feature (1)..(78): NCBI GI: 119189379 Blast Desc: CIMG_04737 [Coccidioides immitis RS]
  misc_feature: Useful for introducing or modulating the production of volatile compounds
MHPHLHTKDNTACEEIMTALEECHARGFLWKSMGMCNDAKHNVNMCLRAERLKRTAANREAAKAKREKLNKAWAEIDENS

SEQ ID NO: 27725 - DNA, 1219 bp, Muscodor strobelii
  misc_feature: SGI EST ID NO. CUFF.65475.2
  misc_feature: Variant of the nucleotide sequence at SEQ ID NO 27723
gcgcaaacgacgtaacctcaaccacttgccaaaccgcaaacgtaagacaagatgcatcctcatttgcataccaaagacaatacagcatgcgaagagatcatgactgcacttgaagaatgccatgcccggggttttctgtggaagtccatgggcatgtgcaacgatgctaaacacaatgtcaacatgtgcctccgcgccgagcgactgaagcgcacagccgccaaccgagaagccgccaaggccaaacgcgaaaagctgaacaaagcctgggccgagatcgacgagaatagctaaacgaccgcacacaacaataccatcttcatagatcgaggatcgaagtcgaagcttatgtattgaaagacaccgcacgcatcaacgggttgtacgatatatgagagagggatatccggcattacaagggcatggccaggcgttatacagaggtttacatcacgatcacattgcggttctcccgtacgatgtcgttttcgctacatattataccagaagaactgtttgatgtacatttgagaccaatccccattttcataccgatctgccgtccccaagtctccgtccgttgacctagcggtctctgaacccttacaaggtcttcctgaaagcattgccgaaggtgtacatgccaaagacggagataaagctcaaaacagtaggaacgggcttccggaggcgaagggcgcgggggatggaagagccaccgaggacgacggaggccagaagagcgagctcgacgccgtagggctggcggttctgtatgcgatatccaccgagaccgtctagatttcactcgggtcagcgcatcgacaggaattggtctaataacgcgccatagattgcaatatattataatacgtacagagaatgccgacagtcataccggcagcaattgagggtacagaaccagttttgacatagcccatggtgccaccgcctgcggtaagagcaccgagcaggtatgcgatgtctgacagagcctgtcgcatgtcttaattagcgccaattacgcaattgacgggcgtgcaacacgtaccattgcgaattagattttatagcgttatgcgattagttttagattcgaaatgtaggtgttttcaacacaatgatatcacgtcagtgaaccttgagaacaacaaatgtagatctggcgggttggtcggcttcgaaggctagcagctccgagagaatgcggagcttcccc

SEQ ID NO: 27726 - DNA, 354 bp, Muscodor strobelii
  misc_feature: SGI cDNA ID NO. 569503
  misc_feature: Encodes the peptide sequence at SEQ ID NO 27727
atggcgtcaaaggggatgtctgcgaagaagcaacaagacctgcaaacgacgtattcaaattacaagaacacgcttcagcagctggcgcagaaaattggtgatgtcgagcaggaagccgaggagcacaagctcgttctcgagacattaacgcccttgccggatgatcgcacgtgttttcgtatgatcaacggcgtgcttgtggaacggaccgtcaaagatgtagtccccgcgctcaagacgaacgcagagggtctcaagaaagttcttgacgatctggtcaagcaatacaagacaaagcaagacgatttagagaagtggaagaaaaagaacaacatccaggttgttcagtcttga

SEQ ID NO: 27727 - protein, 117 aa, Muscodor strobelii
  misc_feature: SGI Peptide ID NO. 569503
  misc_feature (12)..(117): Pfam Id: PF01920 Pfam Desc: Prefoldin subunit
  misc_feature (1)..(117): NCBI GI: 171696064 Blast Desc: protein product [Podospora anserina] gi|170948274|emb|CAP60438.1| protein product [Podospora anserina]
  misc_feature (1)..(116): NCBI GI: 256733071 Blast Desc: [Nectria haematococca mpVI 77-13-4]
  misc_feature (2)..(116): NCBI GI: 46125421 Blast Desc: FG07088.1 [Gibberella zeae PH-1]
  misc_feature (1)..(117): NCBI GI: 85114377 Blast Desc: NCU09249 [Neurospora crassa OR74A] gi|28926475|gb|EAA35448.1| [Neurospora crassa OR74A] gi|38567000|emb|CAE76300.1| related to Gim complex component GIM4
  misc_feature (6)..(116): NCBI GI: 154324214 Blast Desc: BC1G_00506 [Botryotinia fuckeliana B05.10] gi|150842735|gb|EDN17928.1| BC1G_00506 [Botryotinia fuckeliana B05.10]
  misc_feature (14)..(117): NCBI GI: 116181800 Blast Desc: CHGG_01528 [Chaetomium globosum CBS 148.51] gi|88185825|gb|EAQ93293.1| CHGG_01528 [Chaetomium globosum CBS 148.51]
  misc_feature (1)..(116): NCBI GI: 119189153 Blast Desc: CIMG_04624 [Coccidioides immitis RS] gi|240111346|gb|EER29499.1| prefoldin subunit 2, [Coccidioides posadasii C735 delta SOWgp]
  misc_feature (1)..(116): NCBI GI: 70990568 Blast Desc: prefoldin subunit 2 [Aspergillus fumigatus Af293] gi|66847765|gb|EAL88095.1| prefoldin subunit 2, [Aspergillus fumigatus Af293] gi|159130614|gb|EDP55727.1| prefoldin subunit 2,
  misc_feature (1)..(116): NCBI GI: 259481380 Blast Desc: TPA: prefoldin subunit 2, (AFU_orthologue; AFUA_1G03830) [Aspergillus nidulans FGSC A4]
  misc_feature (1)..(116): NCBI GI: 119497005 Blast Desc: prefoldin subunit 2, [Neosartorya fischeri NRRL 181] gi|119413435|gb|EAW23376.1| prefoldin subunit 2, [Neosartorya fischeri NRRL 181]
MASKGMSAKKQQDLQTTYSNYKNTLQQLAQKIGDVEQEAEEHKLVLETLTPLPDDRTCFRMINGVLVERTVKDVVPALKTNAEGLKKVLDDLVKQYKTKQDDLEKWKKKNNIQVVQS

SEQ ID NO: 27728 - DNA, 1112 bp, Muscodor strobelii
  misc_feature: SGI EST ID NO. CUFF.65519.0
  misc_feature: Variant of the nucleotide sequence at SEQ ID NO 27726
gagcaacaaagttgagaaagggtcctctccgcgactgcgcccaagtcagaaaggtgcatgggccacattttgccttcggcccctccagtcaagtcacagcaattagacccatcgcctcacagattgtctaaagcgagctcgacaactcattcatttcgccatattggtgccctcttcataacctggacgtcagaggagatcttgctggagtactcatcattcctcctcagccatggcgtcaaaggggatgtctgcgaagaagcaacaagacctgcaaacgacgtattcaaattacaagaacacgcttcagcagctggcgcagaaaattggtgatgtcgagcaggaagccgaggagcacaagctcgttctcgagacattaacgcccttgccggatgatcgcacgtgttttcgtatgatcaacggcgtgcttgtggaacggaccgtcaaagatgtagtccccgcgctcaagacgaacgcagagggtctcaagaaagttcttgacgatctggtcaagcaatacaagacaaagcaagacgatttagagaagtggaagaaaaagaacaacatccaggttgttcagtcttgagagtattcgtccaagagctgctacgtcagtcgtggcatcggatgtaaaatcccggtcagccgggatttccttgggtggaagaaccataggaatatattggcatacaattgtcgagatgacgttgccatggcccgagctaagggatcgagattggtcaatcatgtgtcacggccaaatctaaagctatgcctgataacggccgtcatgtagataccgacttcgcggcgttctccagaggtggtgtgtatcgatgtgttgtacatctgcaaaatgcagtcacaagcagtggagcccatcgcgtctcagtgcccaacggcagggcttatggtggctgttgggtcgggacattggagacactgctgattggcggcccggccgcaactaaaggctgccattgcctcgttggctagctagagatcagtcttctagtaggacgccttgttggcgcctctgctctacccttgaaaatgtattggtctctgaatcccttccgtttcagcaatgacgctgtttacccgtgcagtaa

SEQ ID NO: 27729 - DNA, 591 bp, Muscodor strobelii
  misc_feature: SGI cDNA ID NO. 569504
  misc_feature: Encodes the peptide sequence at SEQ ID NO 27730
atgtcggattccccccaatctcctcccaaggacgtcgaccaaggtgtacaatcacccgacgatgaagcacaaatgaacgaccctcaggacccacacgccgccggccttgcctatgagttcgaggtaaaagagcaggataggtggttgcctatagccaatgtcgcccgaatcatgaaattggccttgccagaaaatgccaagatagcgaaagaggccaaagagtgcatgcaggaatgtgttagcgagtttatctcttttatcacgagcgaagcgtccgagaaatgccaccaagagaagaggaagactgttaacggtgaagacattctgtttgcaatgacttcacttggattcgagaattatgcagaggcacttaagatctacctgtctaaatatcgagagtctcagtcaaatcggggtgacaatcagcagcggccaagcagtcaagggtacggagccggccctagcggatctggcgtcggaacatcaggcttccaggccggagatggtaccggcatcggagagacaggcgagagctacatgtatgctcagggcggacacaacggatcaaccggtgacggtccgacgtattag

SEQ ID NO: 27730 - protein, 196 aa, Muscodor strobelii
  misc_feature: SGI Peptide ID NO. 569504
  misc_feature (47)..(112): Pfam Id: PF00808 Pfam Desc: Histone-like transcription factor (CBF/NF-Y) and archaeal histone
  misc_feature (1)..(192): NCBI GI: 116181802 Blast Desc: CHGG_01529 [Chaetomium globosum CBS 148.51] gi|88185826|gb|EAQ93294.1| CHGG_01529 [Chaetomium globosum CBS 148.51]
  misc_feature (1)..(196): NCBI GI: 261357320 Blast Desc: nuclear transcription factor Y subunit B-3 [Verticillium albo-atrum VaMs.102]
  misc_feature (1)..(193): NCBI GI: 38566999 Blast Desc: transcription factor HAP3 [Neurospora crassa]
  misc_feature (1)..(190): NCBI GI: 145613427 Blast Desc: CCAAT-binding protein subunit HAP3, [Magnaporthe grisea 70-15] gi|145020505|gb|EDK04634.1| CCAAT-binding protein subunit HAP3, [Magnaporthe grisea 70-15]
  misc_feature (1)..(196): NCBI GI: 14577938 Blast Desc: AF120158_1 CCAAT-binding protein subunit HAP3 [Hypocrea jecorina]
  misc_feature (7)..(151): NCBI GI: 154324212 Blast Desc: BC1G_00505 [Botryotinia fuckeliana B05.10] gi|150842734|gb|EDN17927.1| BC1G_00505 [Botryotinia fuckeliana B05.10]
  misc_feature (7)..(147): NCBI GI: 156057379 Blast Desc: SS1G_04420 [Sclerotinia sclerotiorum 1980] gi|154702206|gb|EDO01945.1| SS1G_04420 [Sclerotinia sclerotiorum 1980]
  misc_feature (25)..(193): NCBI GI: 164423060 Blast Desc: NCU09248 [Neurospora crassa OR74A] gi|157069932|gb|EAA35447.2| conserved [Neurospora crassa OR74A]
  misc_feature (4)..(153): NCBI GI: 212540332 Blast Desc: CCAAT-binding factor complex subunit HapC [Penicillium marneffei ATCC 18224] gi|210067620|gb|EEA21712.1| CCAAT-binding factor complex subunit HapC [Penicillium marneffei ATCC 18224]
  misc_feature (4)..(153): NCBI GI: 242802288 Blast Desc: CCAAT-binding factor complex subunit HapC [Talaromyces stipitatus ATCC 10500] gi|218717286|gb|EED16707.1| CCAAT-binding factor complex subunit HapC [Talaromyces stipitatus ATCC 10500]
MSDSPQSPPKDVDQGVQSPDDEAQMNDPQDPHAAGLAYEFEVKEQDRWLPIANVARIMKLALPENAKIAKEAKECMQECVSEFISFITSEASEKCHQEKRKTVNGEDILFAMTSLGFENYAEALKIYLSKYRESQSNRGDNQQRPSSQGYGAGPSGSGVGTSGFQAGDGTGIGETGESYMYAQGGHNGSTGDGPTY

SEQ ID NO: 27731 - DNA, 2553 bp, Muscodor strobelii
  misc_feature: SGI EST ID NO. CUFF.65487.0
  misc_feature: Variant of the nucleotide sequence at SEQ ID NO 27729
gagaaagttgaccctggttgcgattgaaatctgtcaactacggccggtgacggttacctacaatatcattttcaacagcaatcattgacagcaatacctacctacctagttttaatagacagcgtcccggttgtcgcctaactcgcgtgcttactccagacacccccgcgcgcgactctagtctgaactaaccgattcagttgccttggcgaatccgcaagtcgagtctttccgcaccacccaagaacttcgttcccactccctcgtcatcttgcgacccgacctgagagtcctgcccgtcctgtcgtctgcgtggcccttctccctgcatcaactgcatttgaacctggagtcaaggcttttcatattggccaattcggttccaagtggtagtctgcagcccgcctccgtttcgtttcggtgcatcgagcattgacaatctctggccaaccaaagtagcctcgacttcttagaatagcaatctgccctcttgcacgtgtgcgcaaccccagcccaggcacagcatctcactttcgtccaagctcaaagctccacgcatctcaaatattacagtattgagccgtgcttttctttgtgtaactgccacgcctcccagtcgcagcaactcgttggaacccgatacatcctgcagtagacaggatcttactgagaacaaccgtatagaccgtctgttctttcctgtactcgcgtgggcttctccatcggcataatcatagtgcgatcggtaacataatactaccgattccagcagctagatagaaagtgtcgcatcttctcgcctgtctacctcaccagcgcgtagtaagaacaacacatccccatcacactacatgctgcacacggggacggagcagagtcagatctgataataactgcctgcaacaccatctcggcctcaacatagtacatacatactagagcatcgtcccgcactagacggtagaaacagcgggtcctgcgcaataacgcgaccctcggcgtcgtcacaaagaagacgcgcccctctctcaccccccaaagtaccactgttttgtaccgtgccatcaccaacgcatcccatccacacacaccctcacgtcgccggcagacagcggtatagacacacatctgcaagctacctgagtccaaccctcgcgggcccacgcatatcgcgcgcaccgctgcatacacacgcctacatacgtactgtactcgtctattccacctccattccgtcatagcctgaagtggcagcagggcttacctcacggcattgtcgaccaaacggtaagtagcccacagctggatccgcggcagggcacgattgacgcagctttctgcagctaagccgcgctcactttgcaagccctaccctttgcaacgtgtcagaggcagggacacatcactcctcgccttgtagcagctgtgcgagttggcaattcacgaaaattttgtcataagctagcacccgctgcaggtagccaaatatgtcggattccccccaatctcctcccaaggacgtcgaccaaggtgtacaatcacccgacgatgaagcacaaatgaacgaccctcaggacccacacgccgccggccttgcctatgagttcgaggtaaaagagcaggataggtggttgcctatagccaatgtcgcccgaatcatgaaattggccttgccagaaaatgccaagatagcgaaagaggccaaagagtgcatgcaggaatgtgttagcgagtttatctcttttatcacgagcgaagcgtccgagaaatgccaccaagagaagaggaagactgttaacggtgaagacattctgtttgcaatgacttcacttggattcgagaattatgcagaggcacttaagatctacctgtctaaatatcgagagtctcagtcaaatcggggtgacaatcagcagcggccaagcagtcaagggtacggagccggccctagcggatctggcgtcggaacatcaggcttccaggccggagatggtaccggcatcggagagacaggcgagagctacatgtatgctcagggcggacacaacggatcaaccggtgacggtccgacgtattagatcacggtctgatggtcattgcctcgactcctcttacttggcatctgcgattgctgatgccttgcgtacactactttttcttcgagtgtgtataactacggaaaagctcacaagagggataatttgatgttctttgtggaaacagtgtctcttcaccaggaggatacggatgccggcaactatttctgtatatgagaatgcatggcgaagagttgccaggaagaggtgctacggatgcgtcaggaaggaaaacctgggctttaattttcagtttctagtcttcggtcatcgatagattcccccgtggcgtttgattctaccgcgatctccaagcctagccttgagatcaagcgatgattgacagttcttccgacagacacaatactagcttcagatgataggagaacagccctttgctgaagcaattactactagtctcaattatataagaccaatatactgggtctgtcacaac

SEQ ID NO: 27732 - DNA, 1185 bp, Muscodor strobelii
  misc_feature: SGI cDNA ID NO. 569505
  misc_feature: Encodes the peptide sequence at SEQ ID NO 27733
atggcttcaccactctcgcttggtgacgtcctcgctattgttcaaggtgcaatagacctctacagggagatcagagatgctccggacagtataaaagcccttggcaaagagatggaagatctccaaggctggacagagggcgtgaaagagcttgtgggtcgacaggcggacagcgaattggcgagacggttcccggacgatacaaaacgagcgagagcagacatacagaatttgaagaagagcgtggaacctatcaaggagctgtttggcaaatacaaagccaagcagggggattcaccgctctttaactttttcgctggcgctctctttgctattggacatagcacagaagacctggaagccatgcgcaaagcagttgatcgcgcgaaggaaaagctagagagtcaactccgtgtgataggcatgaaaggtatcgacgcccttcttaccaatgtcgggccgagccagcccgcaactccagtcgcgtctacagtacaatctcagaatggggtcggcacaagccacagagtcttcagtctgatcttcgtagaccctgacaaccttgggcgcagcagagttgcagaggcctatatcaatctattaaaagaatggactacacgcacaggcgggaaatggtccgtcgcgtctgccccctcagccggggttttcgtggagaaccgcagcgacgttaccggcttgcttagtgctttgaacttgggaaggccgggaagccgtgaattcatccaaggtaacagaccgcccttggaagtggctatgtctgcactgttcgacaacaagttcttcaactacccatacaaagcgcaaatccgaagtgcgatgatggcacagaggtctagaggaatcacgaggaacatcttcaaggtcgactttgtgctggttttcacgtaccgggagtacgagaatcttacgctactacggaaacacctgttgagtctgtatgggacgacggtcgtgccagaaggaaaaggtctgatcgtgaacctcgggcattacttaggtcaaggcaaaaaggggtggattctcgacgcaaagaaagatgagcatggtaacttcagtcgcgagaactggctcgtaactgtggctgagatcaagacggctatcaaggcgttcttgaagcaagagttgaattggattcgaccggagccaggtgcccggcagacataa

SEQ ID NO: 27733 - protein, 394 aa, Muscodor strobelii
  misc_feature: SGI Peptide ID NO. 569505
  misc_feature (5)..(388): NCBI GI: 116194300 Blast Desc: CHGG_03748 [Chaetomium globosum CBS 148.51] gi|88179661|gb|EAQ87129.1| CHGG_03748 [Chaetomium globosum CBS 148.51]
  misc_feature (10)..(390): NCBI GI: 171683653 Blast Desc: protein product [Podospora anserina] gi|170941786|emb|CAP67440.1| protein product [Podospora anserina]
  misc_feature (155)..(388): NCBI GI: 39951459 Blast Desc: [Magnaporthe grisea 70-15] gi|145020802|gb|EDK04931.1| [Magnaporthe grisea 70-15]
MASPLSLGDVLAIVQGAIDLYREIRDAPDSIKALGKEMEDLQGWTEGVKELVGRQADSELARRFPDDTKRARADIQNLKKSVEPIKELFGKYKAKQGDSPLFNFFAGALFAIGHSTEDLEAMRKAVDRAKEKLESQLRVIGMKGIDALLTNVGPSQPATPVASTVQSQNGVGTSHRVFSLIFVDPDNLGRSRVAEAYINLLKEWTTRTGGKWSVASAPSAGVFVENRSDVTGLLSALNLGRPGSREFIQGNRPPLEVAMSALFDNKFFNYPYKAQIRSAMMAQRSRGITRNIFKVDFVLVFTYREYENLTLLRKHLLSLYGTTVVPEGKGLIVNLGHYLGQGKKGWILDAKKDEHGNFSRENWLVTVAEIKTAIKAFLKQELNWIRPEPGARQT

SEQ ID NO: 27734 - DNA, 209 bp, Muscodor strobelii
  misc_feature: SGI EST ID NO. CUFF.65386.0
  misc_feature: Variant of the nucleotide sequence at SEQ ID NO 27732
cgggaagccgtgaattcatccaaggtaacagaccgcccttggaagtggctatgtctgcactgttcgacaacaagttcttcaactacccatacaaagcgcaaatccgaagtgcgatgatggcacagaggtctagaggaatcacgaggaacatcttcaaggtcgactttgtgctggttttcacgtaccgggagtacgagaatcttacgcta

SEQ ID NO: 27735 - DNA, 1929 bp, Muscodor strobelii
  misc_feature: SGI cDNA ID NO. 569506
  misc_feature: Reduced expression when VOC is produced
  misc_feature: Encodes the peptide sequence at SEQ ID NO 27736
atggacggttcccagagcccgaggaagcgcctccgtgtcgagttcgacctgaacaacatcgaggttcacgagataggtacccgatctgtggatgacatcaagacggagatcaagaaggcattggaccagcacgatcggggagacaacgaagactacgatgtcctgaagcacacactgctgggccgaccaccgtctgacgatgactacgacgatatcgattatgatcccgcagcccctttgagacaacgccaggagttaaaagcctacctactcgccctgacctctttctcgcctcggctcggacggtcaagcgatggcttggtgcgaaatatactgcaatgccagtggctgggtcgagacgatcagtttgctaagatctatgttcaattcctcgcagcccttgtcagtgctcaaggagcccgtctcacccaggtcctcaccatgctcgtcggcaacttctcccactcacggccgtccgactgggcagtgcagggctacgtcgatgtctcccgcacgattgtccaagagagactccatgtagcattgcgctacctcttgagcctgtttccagctgcggaatctgtgttggagcccatactagttgggaaataccccttcaacaatgaatccaagcgagcccatctggcctacgttgacaacctactcaaagtccgccagtacactccggaacttcgaaccgacatcatggacttgatcgtgagtcgactcgtcaagattgatgtggaaatgcagatggatctagacgacatggacgataatttggcccaccaggttgccatggcgctgcgggccgcacaggaacgcccgcatctagacgatgaagattccgacgatagcgataatgaatcggtctctagtgacgaatccgaggacgaagaatacaatcgcatcaaaacgataaaaggaaacgtgctgaagatggactcggtcttagacaccctctttgagctttatactcctttctttgcagatccagattcggatgaagctatggaggtctttgcggacttattgactgaattctccaacctcattttacctacaatcaagtcacgacatactcaattcctcatattccattttggtcaaaagtctgaaagattgatggatgctttttgcggcacctgcatcaatattgctttcgagtctcagcggcctctgatattacagcaggctgcttgtgcgtatctcgcaagttttgttgcgcgtggtgcccatgtacctggtcatatttctctcaagatattcgaggttcttgggtatcgaatggagcaaatgcgggccacctacgagacgtcgtgtcgaggacccgatgtgcgtcgatacgcgccattctatgctcttatgcaagccttgatgtatatcttctgtttcaagtggcaggacctcatccggtcagccccggaagatgtcgacaaagacgacccttcttcatatcttgatcaagacatcgagtgggagcctgaagtcaaagacatcatgagacgaaacattcactccaaactcaatcccctgaaggtctgctcgcctatcattgtggaccaatttgcaaagctcgcccaccgcttccggttcatgtacgtctatccactcatcgaatccaacaagcggttgcggctctcgcagtttgccggcggcgcatactccaacggtggcgcgctgcgtgacatggctttcgacgcaaacgatgagagctggcagcaactgggaacctactttcctttcgacccctatcaactgccccagagcaagcggtgggtcgaggacgattatgttaaatggcaagtcattccaggtcttgacgcagacgaacccgacgacgatagcgacgacgaagaagagggccatgaggaagaggaggtagtctacgagactgccactgaggaggatgctgcagaagcaaattaa

SEQ ID NO: 27736 - protein, 642 aa, Muscodor strobelii
  misc_feature: SGI Peptide ID NO. 569506
  misc_feature (20)..(608): Pfam Id: PF05327 Pfam Desc: RNA polymerase I specific transcription initiation factor RRN3
  misc_feature (336)..(608): Pfam Id: PF05327 Pfam Desc: RNA polymerase I specific transcription initiation factor RRN3
  misc_feature (107)..(259): Pfam Id: PF05327 Pfam Desc: RNA polymerase I specific transcription initiation factor RRN3
  misc_feature (1)..(609): NCBI GI: 46125417 Blast Desc: FG07086.1 [Gibberella zeae PH-1]
  misc_feature (1)..(609): NCBI GI: 256733069 Blast Desc: [Nectria haematococca mpVI 77-13-4]
  misc_feature (6)..(607): NCBI GI: 39952023 Blast Desc: MGG_01654 [Magnaporthe grisea 70-15] gi|145020504|gb|EDK04633.1| MGG_01654 [Magnaporthe grisea 70-15]
  misc_feature (9)..(608): NCBI GI: 154324210 Blast Desc: BC1G_00504 [Botryotinia fuckeliana B05.10] gi|150842733|gb|EDN17926.1| BC1G_00504 [Botryotinia fuckeliana B05.10]
  misc_feature (2)..(608): NCBI GI: 116181816 Blast Desc: CHGG_01536 [Chaetomium globosum CBS 148.51] gi|88185833|gb|EAQ93301.1| CHGG_01536 [Chaetomium globosum CBS 148.51]
  misc_feature (2)..(637): NCBI GI: 119497257 Blast Desc: RNA polymerase I specific transcription initiation factor RRN3 superfamily [Neosartorya fischeri NRRL 181] gi|119413551|gb|EAW23492.1| RNA polymerase I specific initiation
  misc_feature (2)..(637): NCBI GI: 70990320 Blast Desc: RNA polymerase I specific transcription initiation factor RRN3 superfamily [Aspergillus fumigatus Af293] gi|66847641|gb|EAL87971.1| RNA polymerase I specific initiation
  misc_feature (2)..(637): NCBI GI: 159130489 Blast Desc: RNA polymerase I specific transcription initiation factor RRN3 superfamily [Aspergillus fumigatus A1163]
  misc_feature (1)..(608): NCBI GI: 85114369 Blast Desc: NCU09247 [Neurospora crassa OR74A] gi|28926473|gb|EAA35446.1| [Neurospora crassa OR74A] gi|38566998|emb|CAE76298.1| related to RNA Polymerase I Factor
  misc_feature (2)..(607): NCBI GI: 121703217 Blast Desc: RNA polymerase I specific transcription initiation factor RRN3 superfamily [Aspergillus clavatus NRRL 1] gi|119398016|gb|EAW08447.1| RNA polymerase I specific initiation
  misc_feature: Useful for introducing or modulating the production of volatile compounds
MDGSQSPRKRLRVEFDLNNIEVHEIGTRSVDDIKTEIKKALDQHDRGDNEDYDVLKHTLLGRPPSDDDYDDIDYDPAAPLRQRQELKAYLLALTSFSPRLGRSSDGLVRNILQCQWLGRDDQFAKIYVQFLAALVSAQGARLTQVLTMLVGNFSHSRPSDWAVQGYVDVSRTIVQERLHVALRYLLSLFPAAESVLEPILVGKYPFNNESKRAHLAYVDNLLKVRQYTPELRTDIMDLIVSRLVKIDVEMQMDLDDMDDNLAHQVAMALRAAQERPHLDDEDSDDSDNESVSSDESEDEEYNRIKTIKGNVLKMDSVLDTLFELYTPFFADPDSDEAMEVFADLLTEFSNLILPTIKSRHTQFLIFHFGQKSERLMDAFCGTCINIAFESQRPLILQQAACAYLASFVARGAHVPGHISLKIFEVLGYRMEQMRATYETSCRGPDVRRYAPFYALMQALMYIFCFKWQDLIRSAPEDVDKDDPSSYLDQDIEWEPEVKDIMRRNIHSKLNPLKVCSPIIVDQFAKLAHRFRFMYVYPLIESNKRLRLSQFAGGAYSNGGALRDMAFDANDESWQQLGTYFPFDPYQLPQSKRWVEDDYVKWQVIPGLDADEPDDDSDDEEEGHEEEEVVYETATEEDAAEAN

SEQ ID NO: 27737 - DNA, 2664 bp, Muscodor strobelii
  misc_feature: SGI EST ID NO. CUFF.65438.0
  misc_feature: Variant of the nucleotide sequence at SEQ ID NO 27735
gcggggcaccccagcactaaacgggaccccgaaccaccatttcttgctatgctggtttttttgtgaatcagcaaacaggcaactttttcttatcgtcgtcttgggcttcactccagtcgccaacacccacgtcattccctgataccccgcgggcgatgcggtgactttcaacatcttttgagatatccttagatacccttgacagcgctgtgtcaagtcactctactttttggcactcctctaggacgccacatgtctgctgccgtctagatcgcgtgcgctgccatcgtcgcccccgccgtccaatgtcacccgccgtgactaagacacaggttgcaaggcctgtcgtccgcaaccccctcaagcccatcctcaagtcatcctcatctcttctgggcaccaagagatctgtcagcgacaccgatctcgacgatgaatccagcaacatggacggttcccagagcccgaggaagcgcctccgtgtcgagttcgacctgaacaacatcgaggttcacgagataggtacccgatctgtggatgacatcaagacggagatcaagaaggcattggaccagcacgatcggggagacaacgaagactacgatgtcctgaagcacacactgctgggccgaccaccgtctgacgatgactacgacgatatcgattatgatcccgcagcccctttgagacaacgccaggagttaaaagcctacctactcgccctgacctctttctcgcctcggctcggacggtcaagcgatggcttggtgcgaaatatactgcaatgccagtggctgggtcgagacgatcagtttgctaagatctatgttcaattcctcgcagcccttgtcagtgctcaaggagcccgtctcacccaggtcctcaccatgctcgtcggcaacttctcccactcacggccgtccgactgggcagtgcagggctacgtcgatgtctcccgcacgattgtccaagagagactccatgtagcattgcgctacctcttgagcctgtttccagctgcggaatctgtgttggagcccatactagttgggaaataccccttcaacaatgaatccaagcgagcccatctggcctacgttgacaacctactcaaagtccgccagtacactccggaacttcgaaccgacatcatggacttgatcgtgagtcgactcgtcaagattgatgtggaaatgcagatggatctagacgacatggacgataatttggcccaccaggttgccatggcgctgcgggccgcacaggaacgcccgcatctagacgatgaagattccgacgatagcgataatgaatcggtctctagtgacgaatccgaggacgaagaatacaatcgcatcaaaacgataaaaggaaacgtgctgaagatggactcggtcttagacaccctctttgagctttatactcctttctttgcagatccagattcggatgaagctatggaggtctttgcggacttattgactgaattctccaacctcattttacctacaatcaagtcacgacatactcaattcctcatattccattttggtcaaaagtctgaaagattgatggatgctttttgcggcacctgcatcaatattgctttcgagtctcagcggcctctgatattacagcaggctgcttgtgcgtatctcgcaagttttgttgcgcgtggtgcccatgtacctggtcatatttctctcaagatattcgaggttcttgggtatcgaatggagcaaatgcgggccacctacgagacgtcgtgtcgaggacccgatgtgcgtcgatacgcgccattctatgctcttatgcaagccttgatgtatatcttctgtttcaagtggcaggacctcatccggtcagccccggaagatgtcgacaaagacgacccttcttcatatcttgatcaagacatcgagtgggagcctgaagtcaaagacatcatgagacgaaacattcactccaaactcaatcccctgaaggtctgctcgcctatcattgtggaccaatttgcaaagctcgcccaccgcttccggttcatgtacgtctatccactcatcgaatccaacaagcggttgcggctctcgcagtttgccggcggcgcatactccaacggtggcgcgctgcgtgacatggctttcgacgcaaacgatgagagctggcagcaactgggaacctactttcctttcgacccctatcaactgccccagagcaagcggtgggtcgaggacgattatgttaaatggcaagtcattccaggtcttgacgcagacgaacccgacgacgatagcgacgacgaagaagagggccatgaggaagaggaggtagtctacgagactgccactgaggaggatgctgcagaagcaaattaacgctactgttaagcactatgatgaggaatgatcaatactagcatggtaggcgtttggaggtaaatttcaaaatggacggtaaaaggaatctggtggcatggagtctgcttggtctggaaattaattcttgttctgtaatcaatacgaatagaacagcaatcaggatgtatgaacatttctacctgcaaattctccatagctccttcagagctacataatcctgtctgttggaccagtgctgcgcctacataattacaaaccaaaaggtggtgtaatgctccgaggacgc

SEQ ID NO: 27738 - DNA, 2070 bp, Muscodor strobelii
  misc_feature: SGI cDNA ID NO. 569507
  misc_feature: Encodes the peptide sequence at SEQ ID NO 27739
atgtcacccgccgtgactaagacacaggttgcaaggcctgtcgtccgcaaccccctcaagcccatcctcaagtcatcctcatctcttctgggcaccaagagatctgtcagcgacaccgatctcgacgatgaatccagcaacatggacggttcccagagcccgaggaagcgcctccgtgtcgagttcgacctgaacaacatcgaggttcacgagataggtacccgatctgtggatgacatcaagacggagatcaagaaggcattggaccagcacgatcggggagacaacgaagactacgatgtcctgaagcacacactgctgggccgaccaccgtctgacgatgactacgacgatatcgattatgatcccgcagcccctttgagacaacgccaggagttaaaagcctacctactcgccctgacctctttctcgcctcggctcggacggtcaagcgatggcttggtgcgaaatatactgcaatgccagtggctgggtcgagacgatcagtttgctaagatctatgttcaattcctcgcagcccttgtcagtgctcaaggagcccgtctcacccaggtcctcaccatgctcgtcggcaacttctcccactcacggccgtccgactgggcagtgcagggctacgtcgatgtctcccgcacgattgtccaagagagactccatgtagcattgcgctacctcttgagcctgtttccagctgcggaatctgtgttggagcccatactagttgggaaataccccttcaacaatgaatccaagcgagcccatctggcctacgttgacaacctactcaaagtccgccagtacactccggaacttcgaaccgacatcatggacttgatcgtgagtcgactcgtcaagattgatgtggaaatgcagatggatctagacgacatggacgataatttggcccaccaggttgccatggcgctgcgggccgcacaggaacgcccgcatctagacgatgaagattccgacgatagcgataatgaatcggtctctagtgacgaatccgaggacgaagaatacaatcgcatcaaaacgataaaaggaaacgtgctgaagatggactcggtcttagacaccctctttgagctttatactcctttctttgcagatccagattcggatgaagctatggaggtctttgcggacttattgactgaattctccaacctcattttacctacaatcaagtcacgacatactcaattcctcatattccattttggtcaaaagtctgaaagattgatggatgctttttgcggcacctgcatcaatattgctttcgagtctcagcggcctctgatattacagcaggctgcttgtgcgtatctcgcaagttttgttgcgcgtggtgcccatgtacctggtcatatttctctcaagatattcgaggttcttgggtatcgaatggagcaaatgcgggccacctacgagacgtcgtgtcgaggacccgatgtgcgtcgatacgcgccattctatgctcttatgcaagccttgatgtatatcttctgtttcaagtggcaggacctcatccggtcagccccggaagatgtcgacaaagacgacccttcttcatatcttgatcaagacatcgagtgggagcctgaagtcaaagacatcatgagacgaaacattcactccaaactcaatcccctgaaggtctgctcgcctatcattgtggaccaatttgcaaagctcgcccaccgcttccggttcatgtacgtctatccactcatcgaatccaacaagcggttgcggctctcgcagtttgccggcggcgcatactccaacggtggcgcgctgcgtgacatggctttcgacgcaaacgatgagagctggcagcaactgggaacctactttcctttcgacccctatcaactgccccagagcaagcggtgggtcgaggacgattatgttaaatggcaagtcattccaggtcttgacgcagacgaacccgacgacgatagcgacgacgaagaagagggccatgaggaagaggaggtagtctacgagactgccactgaggaggatgctgcagaagcaaattaa

SEQ ID NO: 27739 - protein, 689 aa, Muscodor strobelii
  misc_feature: SGI Peptide ID NO. 569507
  misc_feature (67)..(655): Pfam Id: PF05327 Pfam Desc: RNA polymerase I specific transcription initiation factor RRN3
  misc_feature (383)..(655): Pfam Id: PF05327 Pfam Desc: RNA polymerase I specific transcription initiation factor RRN3
  misc_feature (154)..(306): Pfam Id: PF05327 Pfam Desc: RNA polymerase I specific transcription initiation factor RRN3
  misc_feature (6)..(656): NCBI GI: 46125417 Blast Desc: FG07086.1 [Gibberella zeae PH-1]
  misc_feature (16)..(654): NCBI GI: 39952023 Blast Desc: MGG_01654 [Magnaporthe grisea 70-15] gi|145020504|gb|EDK04633.1| MGG_01654 [Magnaporthe grisea 70-15]
  misc_feature (14)..(655): NCBI GI: 154324210 Blast Desc: BC1G_00504 [Botryotinia fuckeliana B05.10] gi|150842733|gb|EDN17926.1| BC1G_00504 [Botryotinia fuckeliana B05.10]
  misc_feature (17)..(655): NCBI GI: 116181816 Blast Desc: CHGG_01536 [Chaetomium globosum CBS 148.51] gi|88185833|gb|EAQ93301.1| CHGG_01536 [Chaetomium globosum CBS 148.51]
  misc_feature (2)..(684): NCBI GI: 119497257 Blast Desc: RNA polymerase I specific transcription initiation factor RRN3 superfamily [Neosartorya fischeri NRRL 181] gi|119413551|gb|EAW23492.1| RNA polymerase I specific initiation
  misc_feature (21)..(684): NCBI GI: 70990320 Blast Desc: RNA polymerase I specific transcription initiation factor RRN3 superfamily [Aspergillus fumigatus Af293] gi|66847641|gb|EAL87971.1| RNA polymerase I specific initiation
  misc_feature (21)..(684): NCBI GI: 159130489 Blast Desc: RNA polymerase I specific transcription initiation factor RRN3 superfamily [Aspergillus fumigatus A1163]
  misc_feature (1)..(655): NCBI GI: 85114369 Blast Desc: NCU09247 [Neurospora crassa OR74A] gi|28926473|gb|EAA35446.1| [Neurospora crassa OR74A] gi|38566998|emb|CAE76298.1| related to RNA Polymerase I Factor
  misc_feature (21)..(654): NCBI GI: 121703217 Blast Desc: RNA polymerase I specific transcription initiation factor RRN3 superfamily [Aspergillus clavatus NRRL 1] gi|119398016|gb|EAW08447.1| RNA polymerase I specific initiation
  misc_feature (5)..(656): NCBI GI: 171696060 Blast Desc: protein product [Podospora anserina] gi|170948272|emb|CAP60436.1| protein product [Podospora anserina]
MSPAVTKTQVARPVVRNPLKPILKSSSSLLGTKRSVSDTDLDDESSNMDGSQSPRKRLRVEFDLNNIEVHEIGTRSVDDIKTEIKKALDQHDRGDNEDYDVLKHTLLGRPPSDDDYDDIDYDPAAPLRQRQELKAYLLALTSFSPRLGRSSDGLVRNILQCQWLGRDDQFAKIYVQFLAALVSAQGARLTQVLTMLVGNFSHSRPSDWAVQGYVDVSRTIVQERLHVALRYLLSLFPAAESVLEPILVGKYPFNNESKRAHLAYVDNLLKVRQYTPELRTDIMDLIVSRLVKIDVEMQMDLDDMDDNLAHQVAMALRAAQERPHLDDEDSDDSDNESVSSDESEDEEYNRIKTIKGNVLKMDSVLDTLFELYTPFFADPDSDEAMEVFADLLTEFSNLILPTIKSRHTQFLIFHFGQKSERLMDAFCGTCINIAFESQRPLILQQAACAYLASFVARGAHVPGHISLKIFEVLGYRMEQMRATYETSCRGPDVRRYAPFYALMQALMYIFCFKWQDLIRSAPEDVDKDDPSSYLDQDIEWEPEVKDIMRRNIHSKLNPLKVCSPIIVDQFAKLAHRFRFMYVYPLIESNKRLRLSQFAGGAYSNGGALRDMAFDANDESWQQLGTYFPFDPYQLPQSKRWVEDDYVKWQVIPGLDADEPDDDSDDEEEGHEEEEVVYETATEEDAAEAN

SEQ ID NO: 27740 - DNA, 2664 bp, Muscodor strobelii; identical to SEQ ID NO: 27737
  misc_feature: SGI EST ID NO. CUFF.65438.0
  misc_feature: Variant of the nucleotide sequence at SEQ ID NO 27738

SEQ ID NO: 27741 - DNA, 1395 bp, Muscodor strobelii
  misc_feature: SGI cDNA ID NO. 569508
  misc_feature: Encodes the peptide sequence at SEQ ID NO 27742
atgcctggttcctcgattggtagtccgacgagcccagactcatcgagaccgaccttcactgaatattggaaacgatcgaaagaacagcacgctgccaagaacatcacatttgtctcaagtaactttgagtcaccacccgatcaaggcaatgatagtggccagagggacggttctactctgaccaaagctcaagctcggcggcagcaagtcagaaaagctcagatccagcatcgtcagcgtaaagcaaattacacccagaaacttgaagaagatgccgccaagcttagagacgacattgccagggttgagcaagaaattactaacctgagcaaatcaaatgaggcgatgcgatctcgactgcagtcacaccagacccagacgaccagcggattccaagtaccgccagccgcgccgctggacttgtcgttcatgaacatgatgtctcccgagtatactgtatccctcgccatgtccgatgagatgaattctccagcattccaagtcactcgaggctcccaatcaggccacagcgcgacggcatcgcctcatcccaccacggcatacggcagcgccacgcctggatcaatcgcagacacgaccatgacagatgtcgttacaacggaaaatgctttaacacaagaccagactgacatggtggtcaatttcattctagcgctagagcacgtctgttgggatcatacacacacgattcacgaagagccgctccatcacccttatcccggcatatcgcccgaccccgaagatccggactggctccacgacgacaaacttaacggccacaccctcactgccacagctattgcgctacaatctgcagagcctccaattctcagatcgatcgatgacctgaaaaagcagctggaaaagcagaagcagcaacagcagcctggctgttctcattccgtaagcgaaataccccagcgtactaacaaagcaccaaccctatcggctttcgccgcggaacagcagattgcctggccggcggcccaactgagcctcgcaaagcttgggcatctcgccagtttgctggacaagcccgatgtggagcttgcacccgtacaagcatggtttgagatcgcgcgcctatacggcttggccgtcgccacggacagcgatattctgcagcgacttcgctatgagtttggccgcgtcgtcaaatgtgttaggttcggagccagcgtgccgcgccccatatttgaaatgattttgacgaaagtcatgggttatctgcctgagaccgtgatcccacttccatgggagactgatgaatgggaaggagaaggagaagaggaaggacaaagtgacacgagtgggaaaccagggcttttcagacgcttgatgaattccgctaaggggaagaaagcagccacatga

SEQ ID NO: 27742 - protein, 464 aa, Muscodor strobelii
  misc_feature: SGI Peptide ID NO. 569508
  misc_feature (6)..(415): NCBI GI: 256733068 Blast Desc: NECHADRAFT_78992 [Nectria haematococca mpVI 77-13-4]
  misc_feature (8)..(415): NCBI GI: 46125415 Blast Desc: FG07085.1 [Gibberella zeae PH-1]
  misc_feature (41)..(414): NCBI GI: 171696058 Blast Desc: protein product [Podospora anserina] gi|170948271|emb|CAP60435.1| protein product [Podospora anserina]
  misc_feature (13)..(120): NCBI GI: 116181816 Blast Desc: CHGG_01536 [Chaetomium globosum CBS 148.51] gi|88185833|gb|EAQ93301.1| CHGG_01536 [Chaetomium globosum CBS 148.51]
  misc_feature (13)..(120): NCBI GI: 156048622 Blast Desc: [Sclerotinia sclerotiorum 1980] gi|154693439|gb|EDN93177.1| [Sclerotinia sclerotiorum 1980]
  misc_feature (265)..(415): NCBI GI: 116181816 Blast Desc: CHGG_01536 [Chaetomium globosum CBS 148.51] gi|88185833|gb|EAQ93301.1| CHGG_01536 [Chaetomium globosum CBS 148.51]
  misc_feature (66)..(419): NCBI GI: 225559615 Blast Desc: conserved [Ajellomyces capsulatus G186AR]
  misc_feature (18)..(417): NCBI GI: 261187788 Blast Desc: conserved [Ajellomyces dermatitidis SLH14081] gi|239593525|gb|EEQ76106.1| conserved [Ajellomyces dermatitidis SLH14081] gi|239613320|gb|EEQ90307.1| conserved [Ajellomyces
  misc_feature (53)..(415): NCBI GI: 169620046 Blast Desc: SNOG_13224 [Phaeosphaeria nodorum SN15] gi|111058431|gb|EAT79551.1| SNOG_13224 [Phaeosphaeria nodorum SN15]
  misc_feature (63)..(424): NCBI GI: 189203981 Blast Desc: conserved [Pyrenophora tritici-repentis Pt-1C-BFP] gi|187985425|gb|EDU50913.1| conserved [Pyrenophora tritici-repentis Pt-1C-BFP]
MPGSSIGSPTSPDSSRPTFTEYWKRSKEQHAAKNITFVSSNFESPPDQGNDSGQRDGSTLTKAQARRQQVRKAQIQHRQRKANYTQKLEEDAAKLRDDIARVEQEITNLSKSNEAMRSRLQSHQTQTTSGFQVPPAAPLDLSFMNMMSPEYTVSLAMSDEMNSPAFQVTRGSQSGHSATASPHPTTAYGSATPGSIADTTMTDVVTTENALTQDQTDMVVNFILALEHVCWDHTHTIHEEPLHHPYPGISPDPEDPDWLHDDKLNGHTLTATAIALQSAEPPILRSIDDLKKQLEKQKQQQQPGCSHSVSEIPQRTNKAPTLSAFAAEQQIAWPAAQLSLAKLGHLASLLDKPDVELAPVQAWFEIARLYGLAVATDSDILQRLRYEFGRVVKCVRFGASVPRPIFEMILTKVMGYLPETVIPLPWETDEWEGEGEEEGQSDTSGKPGLFRRLMNSAKGKKAAT

SEQ ID NO: 27743 - DNA, 2072 bp, Muscodor strobelii
  misc_feature: SGI EST ID NO. CUFF.65484.0
  misc_feature: Variant of the nucleotide sequence at SEQ ID NO 27741
cgataatcttgaatcatagcgcatatgatccgtttgccatttattccatcgtactataatctgacagaattcgcataattgattggtaccggcggtctctagcctggcttcgccttgatccctcgacgttttattaccggggacctcatcgactggacccctctaaacgcttttcagctgtagtagttcacgtacagctccaagctaaccttacgacatcatcgtggtcttctcactgttgtgctcgctgttctctctctgattcagcctcactcttcgccaccttcgcaccaagtcttcccattactcgatcgcaataacagagggcaaccagagacgatagttggaatgcctggttcctcgattggtagtccgacgagcccagactcatcgagaccgaccttcactgaatattggaaacgatcgaaagaacagcacgctgccaagaacatcacatttgtctcaagtaactttgagtcaccacccgatcaaggcaatgatagtggccagagggacggttctactctgaccaaagctcaagctcggcggcagcaagtcagaaaagctcagatccagcatcgtcagcgtaaagcaaattacacccagaaacttgaagaagatgccgccaagcttagagacgacattgccagggttgagcaagaaattactaacctgagcaaatcaaatgaggcgatgcgatctcgactgcagtcacaccagacccagacgaccagcggattccaagtaccgccagccgcgccgctggacttgtcgttcatgaacatgatgtctcccgagtatactgtatccctcgccatgtccgatgagatgaattctccagcattccaagtcactcgaggctcccaatcaggccacagcgcgacggcatcgcctcatcccaccacggcatacggcagcgccacgcctggatcaatcgcagacacgaccatgacagatgtcgttacaacggaaaatgctttaacacaagaccagactgacatggtggtcaatttcattctagcgctagagcacgtctgttgggatcatacacacacgattcacgaagagccgctccatcacccttatcccggcatatcgcccgaccccgaagatccggactggctccacgacgacaaacttaacggccacaccctcactgccacagctattgcgctacaatctgcagagcctccaattctcagatcgatcgatgacctgaaaaagcagctggaaaagcagaagcagcaacagcagcctggctgttctcattccgtaagcgaaataccccagcgtactaacaaagcaccaaccctatcggctttcgccgcggaacagcagattgcctggccggcggcccaactgagcctcgcaaagcttgggcatctcgccagtttgctggacaagcccgatgtggagcttgcacccgtacaagcatggtttgagatcgcgcgcctatacggcttggccgtcgccacggacagcgatattctgcagcgacttcgctatgagtttggccgcgtcgtcaaatgtgttaggttcggagccagcgtgccgcgccccatatttgaaatgattttgacgaaagtcatgggttatctgcctgagaccgtgatcccacttccatgggagactgatgaatgggaaggagaaggagaagaggaaggacaaagtgacacgagtgggaaaccagggcttttcagacgcttgatgaattccgctaaggggaagaaagcagccacatgagatggacggagcttgtcacgaaatggaccctgcctgcatgtatatgcggtccgccgacctatggaagctatttctgcccaacagcaagcgatagaagtggaagataaagacagcacctacatattcctcgaggcatgtgtgggtggctgactgatcggaggcatggtgtactctccgtggagctgcgctgacaaagaaagacggggaggggtatcaaggagggagtgtattatcataatgtacgtttatgcatgtatggataggctgttgctgcctatagctacctatcgacgtatctctgataatccatgcacgactttagacccgcg

SEQ ID NO: 27744 - DNA, 1284 bp, Muscodor strobelii
  misc_feature: SGI cDNA ID NO. 569509
  misc_feature: Encodes the peptide sequence at SEQ ID NO 27745
atgacttccgagtctcaaccatctgatggcctcaaagaggtcaatggacaggcgcttgctcaggacgctgcagatgcggctgaaaacgagaatgcacaagaacaagacaactcacaagacaacttgcgagacgacgaaaaggatgatgcgaacgacgacgcagaggacgacagagttttaatccccttccctatccagtggggtgatcgactatgcggagattgcaggatgaactggttgcaagtaggattccaaaatcctccacagtatccagacacggacgaaaagtctttcttcagaggttttgcggctgttgtggaagactggctgaagagtcacagcctcgctgcattgatggatgtgctcaagcctcatgagtcacgcctcaaaaacattgacaaaatcatctgttatggtctggggtctactgtgggcaagtggtggtgtctcgaccctaattgcaaggaatgcgatgccagaatggcccctgaggctgatcgcgtccgatgccagtacggtacgtacaaaacaatcccattcctttttggtattcgttattttctagaaggatctttgctaatacgtgttgtaatcacagcaactattctcgccggttactttcaagagcttaatggcgagggttcccccaaggtggaagtgtttgcctcggaccccaaacttacaatcactgagatcgagtgcttccccaagctcccgatcccgatcacgattcttaatccctacaagcttgaggcactccaattgatggacgagaacacctttgtcatgtctattgccctgccggagatagtggcactcgataacgcaatcatgcacgttacccgccccagaggcatgatgctacctgagtacgtcgaggatcgaacgaagatgcctgataaattacaggacttctacaacgagtacatccgagttccctgttgcgctctggacggagcgccttgcaatcctgttgacggggaaagtgattccgttgtcgggaaaaacaattctgttgatgagaaggacgattctgttgacgagaaggacaattttgatgatggggaaggcaatcctgatgactgggagagtatttctggtgacgaggagaacgacccggttgagaacaactcggcttattaccgttctccgcttggactgcagacagggctctgggtaagaaaggagcagcaaagtgaggattttgagggaaacggagagcatgacggagagcatgaatgtgatcataaaggaaagggtcgacttgttttcgaccttgtatag

SEQ ID NO: 27745 - protein, 427 aa, Muscodor strobelii
  misc_feature: SGI Peptide ID NO. 569509
MTSESQPSDGLKEVNGQALAQDAADAAENENAQEQDNSQDNLRDDEKDDANDDAEDDRVLIPFPIQWGDRLCGDCRMNWLQVGFQNPPQYPDTDEKSFFRGFAAVVEDWLKSHSLAALMDVLKPHESRLKNIDKIICYGLGSTVGKWWCLDPNCKECDARMAPEADRVRCQYGTYKTIPFLFGIRYFLEGSLLIRVVITATILAGYFQELNGEGSPKVEVFASDPKLTITEIECFPKLPIPITILNPYKLEALQLMDENTFVMSIALPEIVALDNAIMHVTRPRGMMLPEYVEDRTKMPDKLQDFYNEYIRVPCCALDGAPCNPVDGESDSVVGKNNSVDEKDDSVDEKDNFDDGEGNPDDWESISGDEENDPVENNSAYYRSPLGLQTGLWVRKEQQSEDFEGNGEHDGEHECDHKGKGRLVFDLV

SEQ ID NO: 27746 - DNA, 2055 bp, Muscodor strobelii
  misc_feature: SGI cDNA ID NO. 569510
  misc_feature: Encodes the peptide sequence at SEQ ID NO 27747
atggaacagcaggcgcaatcagctagtgaatatcccgtttacatcgggttctggaccaactggtcccaggggaaggtccttggatccagtcttactatctcgcgctcagatgccaacatccttattgcgttcattgccttctttttaacaataaccgttactcatctatggtcaatcatttgtttcgttcttcatctttctttgtcgtctcggaagcctcagagcgcactctatcatcaacgccaagcaatattgcgcaacaatggtggcccagttggcgcatcttggattttcattcaactagcatggctgtggaggcgtggtgatattcttcgcaaagtagttcccatccttgcttgcacgctgtttttggcgattgggttgactgtggcgacggcattttcgtcacgaattgccatcggcagtgaggttttgatctctggcgagaaatgtggcatagtcataggcggaacaaatacttctgataacggcatggtcattctaccgtgggaggggcgcgagatttcgtcttcagcaaactatgcgcaggattgttactcagaatcggtcacgtctctggtgtctcaaacatgccgaaccccaccattcgtgaaacaacaattatcagtcgccgtcgatcgtaatgctagctgcccttttgacaacgctctttgccgaagcaatcattccaatttgttcctcgatactggtcttgtcgatagccatgaccatctgggaataaacgctccgccggagaaaaggctatcgttcagagaaactctacattgcgcaccccttattacggaaggctataagaaacagtacaactactctagagaccggacatacactcgttactattatggagagccgctctggtttttgcggccgatcagcttcataccagagaatgtcacgtacgagtacccaagcgacataagcggtaggactgacattacagatctcaattatgcatatcctgattatactcttgaaattgtcactgcatattcaacgaacggcactgttttgaacgactcgtcatccatgttcagccctgggcctggtctccgtagggaagatgcagatgtctttctcttctttctctcaaccaatacagtcaggttctctgggacgcacatacccaatgatccgtggtattatccaaatcaaacagtgatcgatgatcccagcttcaactggtcagatccttacatcattccggctgtcatttcatttgagccagcatcgccccttggttgtgcttatcaacagcaatactgtaccgaagggggcaaaagttgcactctgctcggcagtgctaacgacgcgattgaagcggcgagcgctctatacgtcgacgaagacatgtacaacaatttctggtggttagcggttgctggttcaaatgggctcgagagtgtaatccgaactttgaggaatcatgctttgacatccagattcggtctttatcttggtcttcaaggacagcttcctgataaccaatggcaacttgatgtacaatattggcaagcaatctcgctagctgcccggcaaagggctctcgccactaatgcagctggcatactcccggatgatgagcctgccttatggcgacctacgaatgcctctgatagaaaactctgccaaaatcagaaaatcatcagtcccgagcataccacctttagtgtatttgggttaagtttcgtcggcgtttttggtatcgttacgataatgatttctctctcaatggagtctatcttcccatacattcagcgtcagttgaaacttgacccatacgcgcggcttgaatgggttatgaacgggactttgcagttgcaacggcttgctcatgagcaactaggctcggggaagtggacacattgcgatgaagcaattccacttgttgccaaggatgagctcctagcatctttgaatgtgaccgatgagaaacatcccgtactcaatacgggcgaccaaatatcggaagaagctactgacgttgagtctgtggtgagccctatatcacagaacaacgcaaatacacatgtataa

SEQ ID NO: 27747 - protein, 684 aa, Muscodor strobelii
  misc_feature: SGI Peptide ID NO. 569510
  misc_feature (7)..(669): NCBI GI: 189194015 Blast Desc: conserved [Pyrenophora tritici-repentis Pt-1C-BFP] gi|187978910|gb|EDU45536.1| conserved [Pyrenophora tritici-repentis Pt-1C-BFP]
  misc_feature (6)..(657): NCBI GI: 169615058 Blast Desc: SNOG_10683 [Phaeosphaeria nodorum SN15] gi|111060957|gb|EAT82077.1| SNOG_10683 [Phaeosphaeria nodorum SN15]
  misc_feature (9)..(661): NCBI GI: 115399382 Blast Desc: [Aspergillus terreus NIH2624] gi|114192163|gb|EAU33863.1| [Aspergillus terreus NIH2624]
  misc_feature (9)..(666): NCBI GI: 119474227 Blast Desc: NFIA_004500 [Neosartorya fischeri NRRL 181] gi|119407142|gb|EAW17092.1| conserved [Neosartorya fischeri NRRL 181]
  misc_feature (9)..(666): NCBI GI: 70986226 Blast Desc: conserved [Aspergillus fumigatus Af293] gi|66846236|gb|EAL86569.1| conserved [Aspergillus fumigatus Af293]
  misc_feature (9)..(666): NCBI GI: 159128250 Blast Desc: conserved [Aspergillus fumigatus A1163]
  misc_feature (13)..(684): NCBI GI: 169772941 Blast Desc: [Aspergillus oryzae RIB40] gi|83768800|dbj|BAE58937.1| protein product [Aspergillus oryzae]
  misc_feature (13)..(622): NCBI GI: 121699395 Blast Desc: ACLA_082720 [Aspergillus clavatus NRRL 1] gi|119396149|gb|EAW06581.1| ACLA_082720 [Aspergillus clavatus NRRL 1]
  misc_feature (13)..(654): NCBI GI: 256723662 Blast Desc: NECHADRAFT_86728 [Nectria haematococca mpVI 77-13-4]
  misc_feature (13)..(622): NCBI GI: 169618215 Blast Desc: SNOG_12297 [Phaeosphaeria nodorum SN15] gi|160703576|gb|EAT80110.2| SNOG_12297 [Phaeosphaeria nodorum SN15]
MEQQAQSASEYPVYIGFWTNWSQGKVLGSSLTISRSDANILIAFIAFFLTITVTHLWSIICFVLHLSLSSRKPQSALYHQRQAILRNNGGPVGASWIFIQLAWLWRRGDILRKVVPILACTLFLAIGLTVATAFSSRIAIGSEVLISGEKCGIVIGGTNTSDNGMVILPWEGREISSSANYAQDCYSESVTSLVSQTCRTPPFVKQQLSVAVDRNASCPFDNALCRSNHSNLFLDTGLVDSHDHLGINAPPEKRLSFRETLHCAPLITEGYKKQYNYSRDRTYTRYYYGEPLWFLRPISFIPENVTYEYPSDISGRTDITDLNYAYPDYTLEIVTAYSTNGTVLNDSSSMFSPGPGLRREDADVFLFFLSTNTVRFSGTHIPNDPWYYPNQTVIDDPSFNWSDPYIIPAVISFEPASPLGCAYQQQYCTEGGKSCTLLGSANDAIEAASALYVDEDMYNNFWWLAVAGSNGLESVIRTLRNHALTSRFGLYLGLQGQLPDNQWQLDVQYWQAISLAARQRALATNAAGILPDDEPALWRPTNASDRKLCQNQKIISPEHTTFSVFGLSFVGVFGIVTIMISLSMESIFPYIQRQLKLDPYARLEWVMNGTLQLQRLAHEQLGSGKWTHCDEAIPLVAKDELLASLNVTDEKHPVLNTGDQISEEATDVESVVSPISQNNANTHV

SEQ ID NO: 27748 - DNA, 468 bp, Muscodor strobelii
  misc_feature: SGI EST ID NO. CUFF.65420.0
  misc_feature: Variant of the nucleotide sequence at SEQ ID NO 27746
cggacatacactcgttactattatggagagccgctctggtttttgcggccgatcagcttcataccagagaatgtcacgtacgagtacccaagcgacataagcggtaggactgacattacagatctcaattatgcatatcctgattatactcttgaaattgtcactgcatattcaacgaacggcactgttttgaacgactcgtcatccatgttcagccctgggcctggtctccgtagggaagatgcagatgtctttctcttctttctctcaaccaatacagtcaggttctctgggacgcacatacccaatgatccgtggtattatccaaatcaaacagtgatcgatgatcccagcttcaactggtcagatccttacatcattccggctgtcatttcatttgagccagcatcgccccttggttgtgcttatcaacagcaatactgtaccgaagggggcaaaagttgcact

SEQ ID NO: 27749 - DNA, 5619 bp, Muscodor strobelii
  misc_feature: SGI cDNA ID NO. 569511
  misc_feature: Encodes the peptide sequence at SEQ ID NO 27750
atggccttcgagcctgggccccgtcgttccatgtccccagagagctctggacgcaatactcccaccccgcgacaatggcggaatcagctaagcgcagacgaggtcccgtcccgagacaagcactatcgaaagtatgcgtcaggcgtcgagcgagccctgtcgctgttcgacactgccctcgaggaatgggccgactatatctcctttctcagtagacttctcaaggccctccaagctcgacaggccaataccatcaccatcccctccaaagtcctcgtcgcaaagcgtctcgcccagtgcctcaacccttctctcccctcgggcgtacaccagaaagccatcgaagtatacagctacatcttctcggtcattggcgacgatggcctctccagagaccttcccctatacctctctggcctggctcccaccctctcttttgcctccttgaccgttcgagctcgcttcctagacctttccgagaaatacctgcttcgagtagaaccaaaagccctacgacctgctatgaagtccataatattggcacttttccctggacttgaagacgaaacaagcgaagacttcgatcgcacctcgaatttagtcgagagtttcaagaaagccatacggcccgctgatggcaagctgttgacaaacacccattcatctggagacgacttcttctggcagtgtttttttctggccggcatcaccagcggtggtcggcgacccggcgcattggcctatcttgtccgcaacctgccgcaattggggcactctctaaatccaagcgacaacatccttaatggcatcgatcgcctgaacgaagatttgtcatgtctggtgacttcaccagagccggggctactcctaaggtgctttgccgccgggctcgcagacgaacagctcctcatacagcgaggcttcctagatattctagtcactcatttgccgttgcactcccgcgtcttgcagaatcgtgtgaaaccagacgatctggagctgcttctgcgtgccgctgttggtgtagtaacaaggagagatatgagcttgaatcgaaggctttgggcctggtttcttggcccagaccctgctccacaagaccaagagaacggagctgaatcaccaacgtctccatctgaccatcctcatggctatttggcttccaagacgaactactttgagcggtatgggctgcagccgctgactaccgccctcctatccatgattcaggggttgtccaacaccaacgtggcagaacgagcaaagccgtaccggatatgtctatctctcatggatagatgggagatcggcggcttggtagtgcccgagatcttccttcccgtcattatcagtgtgaaggacttcaagtccaaggctgcggacagatccgagttcaatgaagtgttgcgtagcgccagcgtatttttcgatggcgtggaaagtggtctcatatacggcgagcttgtgggacttatagcccaagccataagccccggtaacctgtcgcaagccgaacgtgcagagaagctaacacttgtcgagttcatcgcgtctcacttcaatattcgagaagaggaaatggtgaccttgcacgcacctctcgtagccctgtcggtacttgccatgatagatgatgtcagcgagcgagccagcaaagcttctccgttatccgacagcgataatcaggcggtgatcacccaagcccttgggattgtccgaggcttgttcgacattataccagaacgagcatttccgacgaagtcgcggcaagactcagacctgcccgtcgaaaactcgacatcggtatctgtctcgaatagcgagcttctgaagaagatccggcacttctacgtctccgaacaaggcaacctagaagccgcgtcgattcccttctcaccctttgaagtaggaactctgttggttgaaaaatcgcgcagcctcgtatgtgatggtttcacgtcctcgaatcacttgattgaagtttcagccaggacacgactgcttgtcctgctactatcaaaaatctcttcggattatgttctcgacacagtccgtctacttgattctatgcatactcagctcgcccatcccacgatacccttcacctcattcaaatctattctttcacttgttactcaattatatatgaacgatcttatctcgaccccctcactgtcagatctagtagagcccttggtgtctcatgcatggcagttcttgtcattagctgagccaaaatatcacgtagaaacagttagatgtttatggcagcttcaaactgctctcacgcctgctagtcgcgatatagaggcgacgattgcaaaactcatgcttcagagcgacatctcgggcactttcgcagttcggcccgccgaccctggccgaaatttcactgtcctttggtcccacacattgcaagacaacgcctcatactcagataggagaggtcccaagacacccatgggagaatcaaaacctcagtttagactttcagggatggaccattacgaagtcatgctcacgcgaccactttttctcatgctggatgctctattagacgagcgtacacagctctttatggtggtgaaaaattggcttaatactatggtcggcatcgagaagttattcctagtatttgtgaccaaaatctcacagctgcgattcctgcgtaccgtctcgagctctgtagcatcaacagccagtcaatccataagcttctcagacgacgatgatcttgatctcgggttgtactatattcgtaccctatcaaacatccttcgatgggctccagattcaatatggggcgtattcgcaactaggactatcgatcagcctggatccagcatttcacaaatcaccggcaccgaaggagacattccacttcaagagtttttcgtacatgtctgtatgcgatgcatagcaggtaatatttttcctaaagtgcctcaggagcaactacgcatcgctcaattgcatcggagtgcaataacactcctgcatcaaatactccttaatccatacagtgatggtttatcggctttgaaactcgaatctcctctgattgagcgactagaacagtctctcaatatcccagacccccatgtgcaagtcctcttactagacgtggttttcgcttcgcttaagctgcgggagtcgccaacatcagaaataccaacttcaccaaccggagagaagcgtaacttgagctacccttctgggagcatgcggctctcgtcggtcgctcttgaccgcattacggagctcccatcgcccccacctacccttctcaaatgcatacaatctggacttagcacaccaagtagccgctcggtgctggatagctgggtaggattcttgacggaatgcctcccgttgtattcaaacactatttttcaagttcttatccctctagtcgagactctatgtgagcagataggaggcacgttcagcgatttgcaacagatgtttgaacaaaatggaagaccatcagagagcatagcagcccctgagtcgacacttatatcgttattgaatgccctcgagcagattcttgctcgagctcatgatagactaattgcggaagaatctcgcgctcaagtagtcaagagccctgatcaaccccaaggtttctttggaaacatggtatctggtgtcttcaactcggatgcgccacaatctcgcagtgcaactgcgaacgatcgactcactgtacttcttgcatttcaagatgcggttcgcatgtgttttaagatctggtcctggggccaaggcagcgatgcaggtcggctcgatatggagtcggccgcttcgttcaaatttacatctcttcgaatgcggaatcgcgcaaggcgtttgctagaacacgtattcacggcagaagcactagaatgcctagagaccgttattgatatctggcgagcgtcgtcagaagacacgggtgaaaaaaaggaaactgaagtattcaacctgcttcccgcacttgatggctcacggccacgtcatacgataccagcgatatttaatgcaatttacagtcgcgccaatcccaacgctttagaaccgtctcgacgatcaactatgacagtctcgttgcaagacacagatttggtcattttcttagtcgactacgcacggtcactcgaagatgatgccatggatgagatatggcaggattgcatggctttcttgaaggacctgttgggtaacccctttccacatcggcaaacgttgcctagtctcttggaattcgctgcgatcttgggtgagaaagttgacaacaccaactttggtgaacaacgaaagatgcgaagggaactcggtgatctatttcttcgactcctcacagctctcttcaccacaagaccagcatccttcatcgacggtccttctgcctcgcaagatgatgcgagtcagaagaacagaacgcctgcagaaagggcagatgatgtggtcggtatcttggctcggatcgtccccaatctgcccaagatcctagtcgaatcagaccgtgtattgaatgcatctcaggctatctccgctaacttaatcggtccatctatccgatcaaaaactttccctggttctattagcaagacgactctggctctggttcaagaacttacgaggctaccgaataaccagaaaacatggaagaaagacgttggtgatgcattcaacgagccaagattcttcaactcttcgccagctctagcgcagactggttggttgccgcttctgaaattgtggaccgtaactgacaaagaccggatgacggagatattgggtcgaattgcatcgccaacaacggcaggcattgtgttcggggttggtgcgacttcagcaagacttgaggccgaccgcaagacgcagctaaatctccggcggattgcgactttggttctggcttgtggaatggacacatttgtcactgacctgccagcgatcttggatcgtctagtcgagcttctagctgccacagcaacatcttctccatcctcgacgactcgcgccgatatctatatggttatccgtgccttggtattacggacatccaatgtacatttggcccccttatggcccatcgtcaatgccgagctccacgcggccatgtcgtccgttgcggcgcctgacaatagtccttcctcagacctgtataataacctctcaatcttgaacgcttgcaagcttctcgatattttgatcgctgtggcacctgacgacttccaactacacgagtggcttttcatcacggacacgatcgatgcgatctaccgatcggctaattatcagcccgtcgcactcgtggacgaactatcagaagaactagggagccagacagttacgtcaactctgcctactgaatcagcagccgcgatggctttagcctcgggtggatcgggacagagacgacctcttctaggacctggcgggatcaacgacgagctggcagtcgataggagagacgagctcatcgttaagattctgagaccgttcttcggacagctgagcatctatgcttttgagtctacttacgctatgggcgtggtggatatcgagggctgtgtaaagagtttgctgagagatgtttttgatgagaagagtatcgttaaggctttgtag

SEQ ID NO: 27750 - protein, 1872 aa, Muscodor strobelii
  misc_feature: SGI Peptide ID NO. 569511
  misc_feature (33)..(377): Pfam Id: PF04118 Pfam Desc: Dopey, N-terminal
  misc_feature (33)..(197): Pfam Id: PF04118 Pfam Desc: Dopey, N-terminal
  misc_feature (284)..(377): Pfam Id: PF04118 Pfam Desc: Dopey, N-terminal
  misc_feature (1)..(1872): NCBI GI: 116180642 Blast Desc: CHGG_00949 [Chaetomium globosum CBS 148.51] gi|88185246|gb|EAQ92714.1| CHGG_00949 [Chaetomium globosum CBS 148.51]
  misc_feature (1)..(1872): NCBI GI: 29150112 Blast Desc: regulator of reproduction DopA [Neurospora crassa]
  misc_feature (1)..(1872): NCBI GI: 261357345 Blast Desc: dopey [Verticillium albo-atrum VaMs.102]
  misc_feature (1)..(1872): NCBI GI: 256732617 Blast Desc: [Nectria haematococca mpVI 77-13-4]
  misc_feature (80)..(1872): NCBI GI: 171687483 Blast Desc: protein product [Podospora anserina] gi|170943703|emb|CAP69355.1| protein product [Podospora anserina]
  misc_feature (1)..(1872): NCBI GI: 85091971 Blast Desc: NCU09219 [Neurospora crassa OR74A] gi|28920564|gb|EAA29927.1| conserved [Neurospora crassa OR74A]
  misc_feature (1)..(1852): NCBI GI: 46125413 Blast Desc: FG07084.1 [Gibberella zeae PH-1]
  misc_feature (1)..(1805): NCBI GI: 156061651 Blast Desc: SS1G_02971 [Sclerotinia sclerotiorum 1980] gi|154700372|gb|EDO00111.1| SS1G_02971 [Sclerotinia sclerotiorum 1980]
  misc_feature (21)..(1868): NCBI GI: 225681064 Blast Desc: conserved [Paracoccidioides brasiliensis Pb03]
  misc_feature (11)..(1861): NCBI GI: 189200697 Blast Desc: cellular morphogenesis regulator DopA [Pyrenophora tritici-repentis Pt-1C-BFP] gi|187983784|gb|EDU49272.1| cellular morphogenesis regulator DopA [Pyrenophora tritici-repentis
MAFEPGPRRSMSPESSGRNTPTPRQWRNQLSADEVPSRDKHYRKYASGVERALSLFDTALEEWADYISFLSRLLKALQARQANTITIPSKVLVAKRLAQCLNPSLPSGVHQKAIEVYSYIFSVIGDDGLSRDLPLYLSGLAPTLSFASLTVRARFLDLSEKYLLRVEPKALRPAMKSIILALFPGLEDETSEDFDRTSNLVESFKKAIRPADGKLLTNTHSSGDDFFWQCFFLAGITSGGRRPGALAYLVRNLPQLGHSLNPSDNILNGIDRLNEDLSCLVTSPEPGLLLRCFAAGLADEQLLIQRGFLDILVTHLPLHSRVLQNRVKPDDLELLLRAAVGVVTRRDMSLNRRLWAWFLGPDPAPQDQENGAESPTSPSDHPHGYLASKTNYFERYGLQPLTTALLSMIQGLSNTNVAERAKPYRICLSLMDRWEIGGLVVPEIFLPVIISVKDFKSKAADRSEFNEVLRSASVFFDGVESGLIYGELVGLIAQAISPGNLSQAERAEKLTLVEFIASHFNIREEEMVTLHAPLVALSVLAMIDDVSERASKASPLSDSDNQAVITQALGIVRGLFDIIPERAFPTKSRQDSDLPVENSTSVSVSNSELLKKIRHFYVSEQGNLEAASIPFSPFEVGTLLVEKSRSLVCDGFTSSNHLIEVSARTRLLVLLLSKISSDYVLDTVRLLDSMHTQLAHPTIPFTSFKSILSLVTQLYMNDLISTPSLSDLVEPLVSHAWQFLSLAEPKYHVETVRCLWQLQTALTPASRDIEATIAKLMLQSDISGTFAVRPADPGRNFTVLWSHTLQDNASYSDRRGPKTPMGESKPQFRLSGMDHYEVMLTRPLFLMLDALLDERTQLFMVVKNWLNTMVGIEKLFLVFVTKISQLRFLRTVSSSVASTASQSISFSDDDDLDLGLYYIRTLSNILRWAPDSIWGVFATRTIDQPGSSISQITGTEGDIPLQEFFVHVCMRCIAGNIFPKVPQEQLRIAQLHRSAITLLHQILLNPYSDGLSALKLESPLIERLEQSLNIPDPHVQVLLLDVVFASLKLRESPTSEIPTSPTGEKRNLSYPSGSMRLSSVALDRITELPSPPPTLLKCIQSGLSTPSSRSVLDSWVGFLTECLPLYSNTIFQVLIPLVETLCEQIGGTFSDLQQMFEQNGRPSESIAAPESTLISLLNALEQILARAHDRLIAEESRAQVVKSPDQPQGFFGNMVSGVFNSDAPQSRSATANDRLTVLLAFQDAVRMCFKIWSWGQGSDAGRLDMESAASFKFTSLRMRNRARRLLEHVFTAEALECLETVIDIWRASSEDTGEKKETEVFNLLPALDGSRPRHTIPAIFNAIYSRANPNALEPSRRSTMTVSLQDTDLVIFLVDYARSLEDDAMDEIWQDCMAFLKDLLGNPFPHRQTLPSLLEFAAILGEKVDNTNFGEQRKMRRELGDLFLRLLTALFTTRPASFIDGPSASQDDASQKNRTPAERADDVVGILARIVPNLPKILVESDRVLNASQAISANLIGPSIRSKTFPGSISKTTLALVQELTRLPNNQKTWKKDVGDAFNEPRFFNSSPALAQTGWLPLLKLWTVTDKDRMTEILGRIASPTTAGIVFGVGATSARLEADRKTQLNLRRIATLVLACGMDTFVTDLPAILDRLVELLAATATSSPSSTTRADIYMVIRALVLRTSNVHLAPLWPIVNAELHAAMSSVAAPDNSPSSDLYNNLSILNACKLLDILIAVAPDDFQLHEWLFITDTIDAIYRSANYQPVALVDELSEELGSQTVTSTLPTESAAAMALASGGSGQRRPLLGPGGINDELAVDRRDELIVKILRPFFGQLSIYAFESTYAMGVVDIEGCVKSLLRDVFDEKSIVKAL

SEQ ID NO: 27751 - DNA, 9493 bp, Muscodor strobelii
  misc_feature: SGI EST ID NO. CUFF.65479.0
  misc_feature: Variant of the nucleotide sequence at SEQ ID NO 27749
aaaaattccagattgacatttcttctcgaaaaggggctgacattctttacataacaggcaccagaaccgaaccatcatcaacaatcgcataaaccaggacaacacatcatacgatgagttctacaactggggcggccattcctcattcctcgtaaaccttgcctacgcaaacgcgacctcctcctccccctcccaatcactcacccactccgttcccgtccatacaacaaaagcaccactacaacctcgcgccaaccactgggcgcaattctgctccgaagacaactgcgaagactgcgggatatcagtccgattaacagaccgagggtgtctagaccaaccacctcgtaaatccatcaaattccatacccattggtggaaagattgggataaggagatagaagctgccaggctactgctccatcctaaatatggttgtgggtgccattttaattcgacgcacttacctaggatggaagggagatgggagatgtgctacaatatcacgcatctgccggcggatagctatagttttaagtggacgtatgtagaggggccacaggagtttccaccagattgctgagttttatggtagtatggacaagtgttacgaggctagagggatagataacgattaattatctttaattgtcacatttgatacagaattccgggttcggaatcaaagtttaaacatgtttactgtatcagtttgtcttttctggcaccgattcggctaaatgttcaaggtcttgtatcaaacagctggcagaaacatggtccatcatatttgaagacacagatcagggttgctgatcactttgtctttggatcccggaccagtagctcgcctcgtggctcacctcccccggaacccgtaacgaaacctcaggccaaggttgaccacatcacgacagccaatgagccaacaaatatcatgatgtcttcggaatatcagaagactccaccaccaataataaacaaccgttcctcctcccgtttcgcccactgcatgatcttattcgcgccctgcgtcatgacagcacgactcgtattcggacccgtcacacaatagagctcaaacacaggcgtgatccaggccagactcgccgcgtcctcgctgacacagtggaggaccttgagatgtgagtgcttcgtgtggacgctggtgtggaggtgggagtataaggacataagtctgcggtgggcgataacggagttgaatgtgggctgtagggacggcatgatgaattgcacgttggctttggatttaaagaggaagtggcttatgtgtgtccctggcgcgatttcgctgacttgtggacgaccctttgccacggctgatttgatgatttctaggtgaccctttttggtgagttctgtcacgacgtcgtcgcgcattttttgcagggcgaagaagctttctttgtctgggctgatgaggattatggccgtggcgtcgcttgtcgtcggtgattctcctgtagatgaggccgggtttgaggcttggctatcgaggaaactaacgtacatgtagagataacctctgttgttgaaggctggtaaacagaggggaatccagttctcgcctcctgctgcttttatgccgcctgattcgaatagcatgttgaagattagttggagatcgcttgggtggagggagtgccttcgaggtcgaatgacgctcacaagtcgtccgccggcgacaattaagccgtagaggagctggtcagctctggctttgaggaatgcgttgtttatggagtggcggtgggattttcgcagcttcaagcattccaaagcacccaacaatgacgagggcgagcctttggtgaagctgtccgcgagcgacgacagcagaatctctgtgccttgtagtggcttccggagatcggtcgaagggcggttcgcgaagatgttggtcaaagtgggaagggtcagcgtagacaatatctgcatgtacagagcatcgagctgggccctcagttgggcatcgctctcccccagtctactaatggccacgaagtagaggggcccctgggtagtgacgacaaatcgtgcactcccagccgtgaaaccgagaagcgggttcttggcgccctcgtaaaatgagatgatagtttggacgacacccatggaagaattaattagggacaaatccccatgcctgctgtagatgggcttgccggctgaggagaggatcatgtagtgttttaacttggacttccagacttgcagtctatcaccgtcattccatgaccctgactcttctggaatctcgtcgaattcatgttcgaattcgtccctcatgaccttctgccccggacttatgacttcgaagggtagcacagcagctgattgcgaccgcagtagtctccaagctgggcttttcctgtgtgcatctcctccctgtaacagactctcgagatctccatggggtcgaagagtagggctgcttgcgctcaggatgctcatagaatcgtctgtgtcctgtttcctcacactgccaatcgaatgcaagccggtggccgacaagatctggctttccaaggtggcagtgggtgaggcagggcggtcgacaacgtcagtcgagctgaaggtgccgcgtgagccatcgggaaatgatagtgtctgaatgttcagcgacgagagagcggttgtcggtctggacacgaggccgggtctctctttggatggttgttgcagaggcctcggtggcaagggaggcggtggtgtctcttgccgctcatatcgagctgcgctggatgtcgaggcggcatcctgattgcccatgatgctcgtcggaagggttgcgcacccgtatcatggtgacttcagtgataagtctaccacgcaggaggcggtgtgagcgctagcgaatgcattcgtttgctgctatgaccggtcaaagctttatcgatatatcgtttcaactctctattattccaatcattgtgctttgatcatttgtggggggaagtgcagcgcaattgcatgcagcaaccgtggaaattacgaatggtaaagttgacgatattcccattaaagattgccaattctggtgtggaggaggacctcgggagaccctggtccagacgtcatacctgttaccttacccatgctcactatgccattcatgatttctttgtattttgggcatggcccgccctccatcttgtctccatttctttgagttacagcttgggaagtggttgattgctatccgccattggtggctccttccccgaagatgcccctctacgacagccttcgtcaacacttcagactgctgtgcagcattgttggagtggcacgcaggaatgggatgacatggaggggcacgggggaccagattgggggtaagggcgcaatatcgatctagtagtttgtactctctcatggtgctagtgacccataatcgtcccgtgtagcgggtacctagtagacaagattagcagcggcagccatgacagcaggtgcctgggcgaacctcatccttgtctgcatcgtgtcttcaactttccgaacctccagctcgcacgagactgcgattgcgattgtgccgacgttgatgttggggggagaaatgcatgccattctacccatctgcccccggcgcaacctcatgctttcgcactctatacctccttgaatcgccctcacacgatcatggccttcgagcctgggccccgtcgttccatgtccccagagagctctggacgcaatactcccaccccgcgacaatggcggaatcagctaagcgcagacgaggtcccgtcccgagacaagcactatcgaaagtatgcgtcaggcgtcgagcgagccctgtcgctgttcgacactgccctcgaggaatgggccgactatatctcctttctcagtagacttctcaaggccctccaagctcgacaggccaataccatcaccatcccctccaaagtcctcgtcgcaaagcgtctcgcccagtgcctcaacccttctctcccctcgggcgtacaccagaaagccatcgaagtatacagctacatcttctcggtcattggcgacgatggcctctccagagaccttcccctatacctctctggcctggctcccaccctctcttttgcctccttgaccgttcgagctcgcttcctagacctttccgagaaatacctgcttcgagtagaaccaaaagccctacgacctgctatgaagtccataatattggcacttttccctggacttgaagacgaaacaagcgaagacttcgatcgcacctcgaatttagtcgagagtttcaagaaagccatacggcccgctgatggcaagctgttgacaaacacccattcatctggagacgacttcttctggcagtgtttttttctggccggcatcaccagcggtggtcggcgacccggcgcattggcctatcttgtccgcaacctgccgcaattggggcactctctaaatccaagcgacaacatccttaatggcatcgatcgcctgaacgaagatttgtcatgtctggtgacttcaccagagccggggctactcctaaggtgctttgccgccgggctcgcagacgaacagctcctcatacagcgaggcttcctagatattctagtcactcatttgccgttgcactcccgcgtcttgcagaatcgtgtgaaaccagacgatctggagctgcttctgcgtgccgctgttggtgtagtaacaaggagagatatgagcttgaatcgaaggctttgggcctggtttcttggcccagaccctgctccacaagaccaagagaacggagctgaatcaccaacgtctccatctgaccatcctcatggctatttggcttccaagacgaactactttgagcggtatgggctgcagccgctgactaccgccctcctatccatgattcaggggttgtccaacaccaacgtggcagaacgagcaaagccgtaccggatatgtctatctctcatggatagatgggagatcggcggcttggtagtgcccgagatcttccttcccgtcattatcagtgtgaaggacttcaagtccaaggctgcggacagatccgagttcaatgaagtgttgcgtagcgccagcgtatttttcgatggcgtggaaagtggtctcatatacggcgagcttgtgggacttatagcccaagccataagccccggtaacctgtcgcaagccgaacgtgcagagaagctaacacttgtcgagttcatcgcgtctcacttcaatattcgagaagaggaaatggtgaccttgcacgcacctctcgtagccctgtcggtacttgccatgatagatgatgtcagcgagcgagccagcaaagcttctccgttatccgacagcgataatcaggcggtgatcacccaagcccttgggattgtccgaggcttgttcgacattataccagaacgagcatttccgacgaagtcgcggcaagactcagacctgcccgtcgaaaactcgacatcggtatctgtctcgaatagcgagcttctgaagaagatccggcacttctacgtctccgaacaaggcaacctagaagccgcgtcgattcccttctcaccctttgaagtaggaactctgttggttgaaaaatcgcgcagcctcgtatgtgatggtttcacgtcctcgaatcacttgattgaagtttcagccaggacacgactgcttgtcctgctactatcaaaaatctcttcggattatgttctcgacacagtccgtctacttgattctatgcatactcagctcgcccatcccacgatacccttcacctcattcaaatctattctttcacttgttactcaattatatatgaacgatcttatctcgaccccctcactgtcagatctagtagagcccttggtgtctcatgcatggcagttcttgtcattagctgagccaaaatatcacgtagaaacagttagatgtttatggcagcttcaaactgctctcacgcctgctagtcgcgatatagaggcgacgattgcaaaactcatgcttcagagcgacatctcgggcactttcgcagttcggcccgccgaccctggccgaaatttcactgtcctttggtcccacacattgcaagacaacgcctcatactcagataggagaggtcccaagacacccatgggagaatcaaaacctcagtttagactttcagggatggaccattacgaagtcatgctcacgcgaccactttttctcatgctggatgctctattagacgagcgtacacagctctttatggtggtgaaaaattggcttaatactatggtcggcatcgagaagttattcctagtatttgtgaccaaaatctcacagctgcgattcctgcgtaccgtctcgagctctgtagcatcaacagccagtcaatccataagcttctcagacgacgatgatcttgatctcgggttgtactatattcgtaccctatcaaacatccttcgatgggctccagattcaatatggggcgtattcgcaactaggactatcgatcagcctggatccagcatttcacaaatcaccggcaccgaaggagacattccacttcaagagtttttcgtacatgtctgtatgcgatgcatagcaggtaatatttttcctaaagtgcctcaggagcaactacgcatcgctcaattgcatcggagtgcaataacactcctgcatcaaatactccttaatccatacagtgatggtttatcggctttgaaactcgaatctcctctgattgagcgactagaacagtctctcaatatcccagacccccatgtgcaagtcctcttactagacgtggttttcgcttcgcttaagctgcgggagtcgccaacatcagaaataccaacttcaccaaccggagagaagcgtaacttgagctacccttctgggagcatgcggctctcgtcggtcgctcttgaccgcattacggagctcccatcgcccccacctacccttctcaaatgcatacaatctggacttagcacaccaagtagccgctcggtgctggatagctgggtaggattcttgacggaatgcctcccgttgtattcaaacactatttttcaagttcttatccctctagtcgagactctatgtgagcagataggaggcacgttcagcgatttgcaacagatgtttgaacaaaatggaagaccatcagagagcatagcagcccctgagtcgacacttatatcgttattgaatgccctcgagcagattcttgctcgagctcatgatagactaattgcggaagaatctcgcgctcaagtagtcaagagccctgatcaaccccaaggtttctttggaaacatggtatctggtgtcttcaactcggatgcgccacaatctcgcagtgcaactgcgaacgatcgactcactgtacttcttgcatttcaagatgcggttcgcatgtgttttaagatctggtcctggggccaaggcagcgatgcaggtcggctcgatatggagtcggccgcttcgttcaaatttacatctcttcgaatgcggaatcgcgcaaggcgtttgctagaacacgtattcacggcagaagcactagaatgcctagagaccgttattgatatctggcgagcgtcgtcagaagacacgggtgaaaaaaaggaaactgaagtattcaacctgcttcccgcacttgatggctcacggccacgtcatacgataccagcgatatttaatgcaatttacagtcgcgccaatcccaacgctttagaaccgtctcgacgatcaactatgacagtctcgttgcaagacacagatttggtcattttcttagtcgactacgcacggtcactcgaagatgatgccatggatgagatatggcaggattgcatggctttcttgaaggacctgttgggtaacccctttccacatcggcaaacgttgcctagtctcttggaattcgctgcgatcttgggtgagaaagttgacaacaccaactttggtgaacaacgaaagatgcgaagggaactcggtgatctatttcttcgactcctcacagctctcttcaccacaagaccagcatccttcatcgacggtccttctgcctcgcaagatgatgcgagtcagaagaacagaacgcctgcagaaagggcagatgatgtggtcggtatcttggctcggatcgtccccaatctgcccaagatcctagtcgaatcagaccgtgtattgaatgcatctcaggctatctccgctaacttaatcggtccatctatccgatcaaaaactttccctggttctattagcaagacgactctggctctggttcaagaacttacgaggctaccgaataaccagaaaacatggaagaaagacgttggtgatgcattcaacgagccaagattcttcaactcttcgccagctctagcgcagactggttggttgccgcttctgaaattgtggaccgtaactgacaaagaccggatgacggagatattgggtcgaattgcatcgccaacaacggcaggcattgtgttcggggttggtgcgacttcagcaagacttgaggccgaccgcaagacgcagctaaatctccggcggattgcgactttggttctggcttgtggaatggacacatttgtcactgacctgccagcgatcttggatcgtctagtcgagcttctagctgccacagcaacatcttctccatcctcgacgactcgcgccgatatctatatggttatccgtgccttggtattacggacatccaatgtacatttggcccccttatggcccatcgtcaatgccgagctccacgcggccatgtcgtccgttgcggcgcctgacaatagtccttcctcagacctgtataataacctctcaatcttgaacgcttgcaagcttctcgatattttgatcgctgtggcacctgacgacttccaactacacgagtggcttttcatcacggacacgatcgatgcgatctaccgatcggctaattatcagcccgtcgcactcgtggacgaactatcagaagaactagggagccagacagttacgtcaactctgcctactgaatcagcagccgcgatggctttagcctcgggtggatcgggacagagacgacctcttctaggacctggcgggatcaacgacgagctggcagtcgataggagagacgagctcatcgttaagattctgagaccgttcttcggacagctgagcatctatgcttttgagtctacttacgctatgggcgtggtggatatcgagggctgtgtaaagagtttgctgagagatgtttttgatgagaagagtatcgttaaggctttgtaggagataggggtgaggtgcttttgatgcttgtatgagtacgatggggcgactgcgcaaatgcgcaacttgtatcttagcctagaattgaggttttcgatattatgtgtctggtttctgtgatgagatgtgcgaaacattgccgactaccaagattcttgctagagttaagctgtgtaaggaaagacatgctaacgctacaattcgc

SEQ ID NO: 27752 - DNA, 1839 bp, Muscodor strobelii
  misc_feature: SGI cDNA ID NO. 569512
  misc_feature: Reduced expression when VOC is produced
  misc_feature: Encodes the peptide sequence at SEQ ID NO 27753
atgggcaatcaggatgccgcctcgacatccagcgcagctcgatatgagcggcaagagacaccaccgcctcccttgccaccgaggcctctgcaacaaccatccaaagagagacccggcctcgtgtccagaccgacaaccgctctctcgtcgctgaacattcagacactatcatttcccgatggctcacgcggcaccttcagctcgactgacgttgtcgaccgccctgcctcacccactgccaccttggaaagccagatcttgtcggccaccggcttgcattcgattggcagtgtgaggaaacaggacacagacgattctatgagcatcctgagcgcaagcagccctactcttcgaccccatggagatctcgagagtctgttacagggaggagatgcacacaggaaaagcccagcttggagactactgcggtcgcaatcagctgctgtgctacccttcgaagtcataagtccggggcagaaggtcatgagggacgaattcgaacatgaattcgacgagattccagaagagtcagggtcatggaatgacggtgatagactgcaagtctggaagtccaagttaaaacactacatgatcctctcctcagccggcaagcccatctacagcaggcatggggatttgtccctaattaattcttccatgggtgtcgtccaaactatcatctcattttacgagggcgccaagaacccgcttctcggtttcacggctgggagtgcacgatttgtcgtcactacccaggggcccctctacttcgtggccattagtagactgggggagagcgatgcccaactgagggcccagctcgatgctctgtacatgcagatattgtctacgctgacccttcccactttgaccaacatcttcgcgaaccgcccttcgaccgatctccggaagccactacaaggcacagagattctgctgtcgtcgctcgcggacagcttcaccaaaggctcgccctcgtcattgttgggtgctttggaatgcttgaagctgcgaaaatcccaccgccactccataaacaacgcattcctcaaagccagagctgaccagctcctctacggcttaattgtcgccggcggacgacttgtgagcgtcattcgacctcgaaggcactccctccacccaagcgatctccaactaatcttcaacatgctattcgaatcaggcggcataaaagcagcaggaggcgagaactggattcccctctgtttaccagccttcaacaacagaggttatctctacatgtacgttagtttcctcgatagccaagcctcaaacccggcctcatctacaggagaatcaccgacgacaagcgacgccacggccataatcctcatcagcccagacaaagaaagcttcttcgccctgcaaaaaatgcgcgacgacgtcgtgacagaactcaccaaaaagggtcacctagaaatcatcaaatcagccgtggcaaagggtcgtccacaagtcagcgaaatcgcgccagggacacacataagccacttcctctttaaatccaaagccaacgtgcaattcatcatgccgtccctacagcccacattcaactccgttatcgcccaccgcagacttatgtccttatactcccacctccacaccagcgtccacacgaagcactcacatctcaaggtcctccactgtgtcagcgaggacgcggcgagtctggcctggatcacgcctgtgtttgagctctattgtgtgacgggtccgaatacgagtcgtgctgtcatgacgcagggcgcgaataagatcatgcagtgggcgaaacgggaggaggaacggttgtttattattggtggtggagtcttctga

SEQ ID NO: 27753 - protein, 612 aa, Muscodor strobelii
  misc_feature: SGI Peptide ID NO. 569512
  misc_feature (183)..(612): Pfam Id: PF03164 Pfam Desc: Trafficking protein Mon1
  misc_feature (45)..(612): NCBI GI: 261357346 Blast Desc: vacuolar fusion protein MON1 [Verticillium albo-atrum VaMs.102]
  misc_feature (42)..(612): NCBI GI: 116180644 Blast Desc: CHGG_00950 [Chaetomium globosum CBS 148.51] gi|121791510|sp|Q2HFQ4.1|MON1_CHAGB RecName: Full=Vacuolar fusion protein MON1 gi|88185247|gb|EAQ92715.1| CHGG_00950 [Chaetomium
  misc_feature (23)..(612): NCBI GI: 46125411 Blast Desc: FG07083.1 [Gibberella zeae PH-1] gi|121813069|sp|Q4I6S5.1|MON1_GIBZE RecName: Full=Vacuolar fusion protein MON1
  misc_feature (39)..(612): NCBI GI: 256733067 Blast Desc: [Nectria haematococca mpVI 77-13-4]
  misc_feature (34)..(612): NCBI GI: 39941688 Blast Desc: MGG_05755 [Magnaporthe grisea 70-15] gi|145022465|gb|EDK06485.1| MGG_05755 [Magnaporthe grisea 70-15]
  misc_feature (42)..(612): NCBI GI: 74619552 Blast Desc: MON1_NEUCR RecName: Full=Vacuolar fusion protein mon-1 gi|29150113|emb|CAD79674.1| conserved [Neurospora crassa]
  misc_feature (42)..(612): NCBI GI: 164423186 Blast Desc: NCU09220 [Neurospora crassa OR74A] gi|157069983|gb|EAA29928.2| conserved [Neurospora crassa OR74A]
  misc_feature (40)..(612): NCBI GI: 171687481 Blast Desc: protein product [Podospora anserina] gi|170943702|emb|CAP69354.1| protein product [Podospora anserina]
  misc_feature (3)..(612): NCBI GI: 261195178 Blast Desc: vacuolar fusion protein mon1 [Ajellomyces dermatitidis SLH14081] gi|239587865|gb|EEQ70508.1| vacuolar fusion protein mon1 [Ajellomyces dermatitidis SLH14081]
  misc_feature (3)..(612): NCBI GI: 239610646 Blast Desc: trafficking protein Mon1 [Ajellomyces dermatitidis ER-3]
  misc_feature: Useful for introducing or modulating the production of volatile compounds
MGNQDAASTSSAARYERQETPPPPLPPRPLQQPSKERPGLVSRPTTALSSLNIQTLSFPDGSRGTFSSTDVVDRPASPTATLESQILSATGLHSIGSVRKQDTDDSMSILSASSPTLRPHGDLESLLQGGDAHRKSPAWRLLRSQSAAVLPFEVISPGQKVMRDEFEHEFDEIPEESGSWNDGDRLQVWKSKLKHYMILSSAGKPIYSRHGDLSLINSSMGVVQTIISFYEGAKNPLLGFTAGSARFVVTTQGPLYFVAISRLGESDAQLRAQLDALYMQILSTLTLPTLTNIFANRPSTDLRKPLQGTEILLSSLADSFTKGSPSSLLGALECLKLRKSHRHSINNAFLKARADQLLYGLIVAGGRLVSVIRPRRHSLHPSDLQLIFNMLFESGGIKAAGGENWIPLCLPAFNNRGYLYMYVSFLDSQASNPASSTGESPTTSDATAIILISPDKESFFALQKMRDDVVTELTKKGHLEIIKSAVAKGRPQVSEIAPGTHISHFLFKSKANVQFIMPSLQPTFNSVIAHRRLMSLYSHLHTSVHTKHSHLKVLHCVSEDAASLAWITPVFELYCVTGPNTSRAVMTQGANKIMQWAKREEERLFIIGGGVF

SEQ ID NO: 27754 - DNA, 957 bp, Muscodor strobelii
  misc_feature: SGI cDNA ID NO. 569513
  misc_feature: Encodes the peptide sequence at SEQ ID NO 27755
atgtcgttcaccctcctctttgtcataggttccgtcataggaataggcagtttcttgccagatatcattggggaagtggccgagagaacgaggcctggtgatctagtcatgtctggtgtcaggctcacagtgccgctttcccattccagcaaacggcttggtgtgcctgaagttcaacttttcagcgaatatggcgagaggattagttcgccggatttaatggtggtagaaatcggagagggccaatatacagacatctccgtggtgatgaataaagatcacgagcatcaacagccttcgtatggcacgttcgaagctgggagcaacggaatatgtgttgctaccatcggtttagttaccccagctggtgatagatgggggtggagtggcgattgggggagagcctgcggcggagcatggtactattcgaatatcgttgctaccacagacaactacaggcctgactgcgtgtggattgacggcaacaacgattcttcgattcaagaaactgcgtttcaagtccatttcccagagtatcgcccgacgatccgaaacaatactgtgccaggggatcaagatcaaatgctggcgttcatgtgcaacagcggaaaaccattcaaattaaaccagggacacggtagtttcgattctgtcgacttctgggaccccccattagttcataacgacactcgaatgtatcagcggtacgatcgcaataccacagcgattgtcgactcgaagggttctatcccgactcgaaacggcttcgacgcctttcctcgagcgctcgtaacagaccataacgcattcaactcggcagagcggctgtgttcccatccgaagtcctacggcccggactacaaagacaccgcttctgaaactttctgtcgtatggcggacaaacaactgttcccgttctgtgacgggactaattacagccgttgctttgacgcgtga

SEQ ID NO: 27755 - protein, 318 aa, Muscodor strobelii
  misc_feature: SGI Peptide ID NO. 569513
  misc_feature (5)..(317): NCBI GI: 39942458 Blast Desc: MGG_03309 [Magnaporthe grisea 70-15] gi|145015685|gb|EDK00175.1| MGG_03309 [Magnaporthe grisea 70-15]
  misc_feature (33)..(317): NCBI GI: 171682656 Blast Desc: protein product [Podospora anserina] gi|170941287|emb|CAP66937.1| protein product [Podospora anserina]
  misc_feature (8)..(317): NCBI GI: 238838945 Blast Desc: conserved [Microsporum canis CBS 113480]
  misc_feature (8)..(310): NCBI GI: 67540572 Blast Desc: AN6456.2 [Aspergillus nidulans FGSC A4] gi|40739288|gb|EAA58478.1| AN6456.2 [Aspergillus nidulans FGSC A4] gi|259479315|tpe|CBF69436.1| TPA: conserved [Aspergillus FGSC
  misc_feature (55)..(317): NCBI GI: 149209779 Blast Desc: MGCH7_ch7g372 [Magnaporthe grisea 70-15] gi|86196327|gb|EAQ70965.1| MGCH7_ch7g372 [Magnaporthe grisea 70-15]
  misc_feature (35)..(317): NCBI GI: 238842244 Blast Desc: conserved [Microsporum canis CBS 113480]
  misc_feature (42)..(317): NCBI GI: 121719470 Blast Desc: conserved [Aspergillus clavatus NRRL 1] gi|119404632|gb|EAW15008.1| conserved [Aspergillus clavatus NRRL 1]
  misc_feature (35)..(317): NCBI GI: 159122718 Blast Desc: conserved [Aspergillus fumigatus A1163]
  misc_feature (8)..(316): NCBI GI: 171676806 Blast Desc: protein product [Podospora anserina] gi|170936470|emb|CAP61127.1| protein product [Podospora anserina]
  misc_feature (35)..(317): NCBI GI: 146324267 Blast Desc: conserved [Aspergillus fumigatus Af293] gi|129553759|gb|EAL84208.2| conserved [Aspergillus fumigatus Af293]
MSFTLLFVIGSVIGIGSFLPDIIGEVAERTRPGDLVMSGVRLTVPLSHSSKRLGVPEVQLFSEYGERISSPDLMVVEIGEGQYTDISVVMNKDHEHQQPSYGTFEAGSNGICVATIGLVTPAGDRWGWSGDWGRACGGAWYYSNIVATTDNYRPDCVWIDGNNDSSIQETAFQVHFPEYRPTIRNNTVPGDQDQMLAFMCNSGKPFKLNQGHGSFDSVDFWDPPLVHNDTRMYQRYDRNTTAIVDSKGSIPTRNGFDAFPRALVTDHNAFNSAERLCSHPKSYGPDYKDTASETFCRMADKQLFPFCDGTNYSRCFDA

SEQ ID NO: 27756 - DNA, 1122 bp, Muscodor strobelii
  misc_feature: SGI cDNA ID NO. 569514
  misc_feature: Encodes the peptide sequence at SEQ ID NO 27757
atggcttcggattctaatccccctgattccgatgccgcaggtcatcggtcaacatccgagacactcgacgctatgttggcgttctgtcgtggtctcaagaagaaattacagaccaaaccagagccatgccaacatccaaaatcagagacggcactccgccagacagagaagcggacattcaaagaaccgcagactatggcagatgtgggattttacaattctacgggtcaactaaacgatcaatcttccacgctgcttgaaggactctgtgctgaacttggcgagagttcacccagaaattcgaaagtctctcaacggccaccgggaagatttcaagaggagtttgaacatcccgagattattccccctcatcctgcgtttgctgtggaagagagcccgagctcgagtaacgaggttacgctcgtgccgagcggcgagcagagtctgaggaatagtaaagagaagaggcggggcagttttgctcccgcaagcagtcttctttctaaagcctctagacagaccatctccggtgcgactgtacgacttgttaactcaagtccttcgctggcggaacaaccacaaataccgacagcagcgggaatcgcatcggaaccatctgtcccagtagctctagcatcaacatcggctcaacctacaacatcttcagcagccgctattgtagcaccaccagcgccccaattctcctcatcacgtcctcaaaaccccgaacgcggccgaggccgcactcgtacccgaaacggaccaccgctctcatcatccgcctcattcgcaggcctgcggcaattcgcccacagtctgaaaaacctgcgatcccgctctcgctcccgcaagccccggaccgagctgccgcgtctcgaagttcaactacccactagcctcacagctcggtctgtactcgccgatctagggtacgaaagccagagctctgatgacgaagaagagggagagggagaggcagtgaggatacagaaggagaccgctgctaagtactggtctcttagtgattatcgtaatagtgtgatgtggaggccggatgctatgggtaaggatccgcggcttgtgcggattcctagtgggcggtggtttggaagtcggatttga

SEQ ID NO: 27757 - protein, 373 aa, Muscodor strobelii
  misc_feature: SGI Peptide ID NO. 569514
MASDSNPPDSDAAGHRSTSETLDAMLAFCRGLKKKLQTKPEPCQHPKSETALRQTEKRTFKEPQTMADVGFYNSTGQLNDQSSTLLEGLCAELGESSPRNSKVSQRPPGRFQEEFEHPEIIPPHPAFAVEESPSSSNEVTLVPSGEQSLRNSKEKRRGSFAPASSLLSKASRQTISGATVRLVNSSPSLAEQPQIPTAAGIASEPSVPVALASTSAQPTTSSAAAIVAPPAPQFSSSRPQNPERGRGRTRTRNGPPLSSSASFAGLRQFAHSLKNLRSRSRSRKPRTELPRLEVQLPTSLTARSVLADLGYESQSSDDEEEGEGEAVRIQKETAAKYWSLSDYRNSVMWRPDAMGKDPRLVRIPSGRWFGSRI

SEQ ID NO: 27758 - DNA, 256 bp, Muscodor strobelii
  misc_feature: SGI EST ID NO. CUFF.65447.0
  misc_feature: Variant of the nucleotide sequence at SEQ ID NO 27756
tcagcagccgctattgtagcaccaccagcgccccaattctcctcatcacgtcctcaaaaccccgaacgcggccgaggccgcactcgtacccgaaacggaccaccgctctcatcatccgcctcattcgcaggcctgcggcaattcgcccacagtctgaaaaacctgcgatcccgctctcgctcccgcaagccccggaccgagctgccgcgtctcgaagttcaactacccactagcctcacagctcggtctgtactcg

SEQ ID NO: 27759 - DNA, 1500 bp, Muscodor strobelii
  misc_feature: SGI cDNA ID NO. 569515
  misc_feature: Encodes the peptide sequence at SEQ ID NO 27760
atgcgttcagcccttgctttcggccttctggccgctgcctcagttgcatctgcggctgatgctgcctcggacgttgtccagctcaagaaggacaacttcgatgagttcgtcaaggacaacaacctcgtcctcgcagagttcttcgccccgtggtgtggccactgcaaggccctcgccccagagtacgaagaggctgccacgacattaaaagagaaggatatcaagctcgtcaaggtcgactgcacagaagaggccgacctctgccagtcgtatggtgtcgagggctacccgaccctcaagatcttccgtggtcctgagaacatcactccctactccggccagcgcaaagctgctgccatcacctcctacatgatcaagcagtccctccccgctgtctccatattaaatgcagaaaccctcgaggacttcaagaccgccgacaaggttgtcctcgttgcctacgtagacgcatccgacaaatcctccaacgagacctacacagccatcgctgagaagctccgagacaactatctcttcggtgccaccaatgatgccgctctggccgaggctgagggtgttactgcccccgctctggttctctacaaacagttcgacgagggcaagtctgtctactcggacaagttcgatgaggatgccattgttgctttcaccaagactgcctctacccctcttgtcggagaggtcggccctgagacgtactctgagtacatgtctgccggcattccacttgcctacatctttgccgagactcccgaggagcggacggagcttggtgaggctctcaagcctattgccgagaagtacaagggcaagatcaacttcgccactattgatgccaagtctttcggtgcccacgccggtaacttgaacctccccactgacaagttcccctccttcgccatccaggagaccgtcaagaaccagaagttccccttcgacactgagaaggagatcactcccgagaccatcggtgcctttgtcgaggacttctccgccggcaagatcgagcccagtctcaagtctgagcctatccctgagactcaggagggtgccgtcaccgtcgtcgttggaaagacctacgaggagatcgttctggatgacaccaaggacgttctgatcgagttctacgctccctggtgcggtcactgcaaggccttggcccccaagtacgaggacttggctgctctgtacgccaacagcgagttcaaggacaaggttgtcatcgccaaggttgatgccactgccaatgatgtgcctgatgaggttagaggcttccccaccatcaagatgtacgctgctggctccaagggtgagcccgccacttacagtggttcccgaactgttgaggacttgatcaagttcatcaaggagaatggcaagtacaaggctgaggtcgaggagaagactgaggagactcccgttgcccctgctgctaccgagtcccctgaggccaaggagtctgaacgtgatgagctatag

SEQ ID NO: 27760 - protein, 499 aa, Muscodor strobelii
  misc_feature: SGI Peptide ID NO. 569515
  misc_feature (24)..(127): Pfam Id: PF00085 Pfam Desc: Thioredoxin
  misc_feature (358)..(465): Pfam Id: PF00085 Pfam Desc: Thioredoxin
  misc_feature (23)..(474): NCBI GI: 1709618 Blast Desc: PDI_HUMIN RecName: Full=Protein disulfide-isomerase; Short=PDI; Flags: Precursor gi|712823|gb|AAC60578.1| protein disulfide isomerase [Humicola insolens] gi|1089933|prf||2018168A
  misc_feature (23)..(499): NCBI GI: 85091979 Blast Desc: protein disulfide-isomerase precursor [Neurospora crassa OR74A] gi|28920568|gb|EAA29931.1| protein disulfide-isomerase precursor [Neurospora crassa OR74A]
  misc_feature (23)..(472): NCBI GI: 171687485 Blast Desc: protein product [Podospora anserina] gi|170943704|emb|CAP69356.1| protein product [Podospora anserina]
  misc_feature (23)..(499): NCBI GI: 3288650 Blast Desc: protein disulphide isomerase [Hypocrea jecorina]
  misc_feature (24)..(491): NCBI GI: 156061643 Blast Desc: SS1G_02967 [Sclerotinia sclerotiorum 1980] gi|154700368|gb|EDO00107.1| SS1G_02967 [Sclerotinia sclerotiorum 1980]
  misc_feature (28)..(472): NCBI GI: 154319484 Blast Desc: BC1G_02223 [Botryotinia fuckeliana B05.10] gi|150855881|gb|EDN31073.1| BC1G_02223 [Botryotinia fuckeliana B05.10]
  misc_feature (5)..(499): NCBI GI: 261357348 Blast Desc: disulfide-isomerase [Verticillium albo-atrum VaMs.102]
  misc_feature (13)..(494): NCBI GI: 189200725 Blast Desc: protein disulfide-isomerase [Pyrenophora tritici-repentis Pt-1C-BFP] gi|187983798|gb|EDU49286.1| protein disulfide-isomerase [Pyrenophora tritici-repentis Pt-1C-BFP]
  misc_feature (23)..(469): NCBI GI: 169618128 Blast Desc: SNOG_12251 [Phaeosphaeria nodorum SN15] gi|111059543|gb|EAT80663.1| SNOG_12251 [Phaeosphaeria nodorum SN15]
  misc_feature (1)..(471): NCBI GI: 212528798 Blast Desc: protein disulfide isomerase Pdi1, [Penicillium marneffei ATCC 18224] gi|210073954|gb|EEA28041.1| protein disulfide isomerase Pdi1, [Penicillium marneffei ATCC 18224]
  misc_feature (27)..(474): SWISSPROT Homolog: EC 5.3.4.1 Protein disulfide-isomerase
MRSALAFGLLAAASVASAADAASDVVQLKKDNFDEFVKDNNLVLAEFFAPWCGHCKALAPEYEEAATTLKEKDIKLVKVDCTEEADLCQSYGVEGYPTLKIFRGPENITPYSGQRKAAAITSYMIKQSLPAVSILNAETLEDFKTADKVVLVAYVDASDKSSNETYTAIAEKLRDNYLFGATNDAALAEAEGVTAPALVLYKQFDEGKSVYSDKFDEDAIVAFTKTASTPLVGEVGPETYSEYMSAGIPLAYIFAETPEERTELGEALKPIAEKYKGKINFATIDAKSFGAHAGNLNLPTDKFPSFAIQETVKNQKFPFDTEKEITPETIGAFVEDFSAGKIEPSLKSEPIPETQEGAVTVVVGKTYEEIVLDDTKDVLIEFYAPWCGHCKALAPKYEDLAALYANSEFKDKVVIAKVDATANDVPDEVRGFPTIKMYAAGSKGEPATYSGSRTVEDLIKFIKENGKYKAEVEEKTEETPVAPAATESPEAKESERDEL

SEQ ID NO: 27761 - DNA, 2179 bp, Muscodor strobelii
  misc_feature: SGI EST ID NO. CUFF.65898.0
  misc_feature: Variant of the nucleotide sequence at SEQ ID NO 27759
tggaaagggacacatttccacaactttacggacctcttcgcgcctttgattattaagttgcggtgaatagtacaacggccattaaggtgtaaaccttctttttaagctgctgctgtgcaatcttcatcttccattttttatttactacttgtcctcctcgacccataaacagcctcagtccttaattgtttcttgcagctgaacatcgactgagaaaaggtacttataagccccggcctgtgtcctacatcacttccccatcacttcatcgaccatcccactttgtccccgccacgtttcccgttaccaacgggatttcgatagcgatattcgctacctacactttgctttaccaccaatacctctatcagttagggccttgtctttcggtaactaatcgctctgtaccgcagtctgcagatatgcgttcagcccttgctttcggccttctggccgctgcctcagttgcatctgcggctgatgctgcctcggacgttgtccagctcaagaaggacaacttcgatgagttcgtcaaggacaacaacctcgtcctcgcagagttcttcgccccgtggtgtggccactgcaaggccctcgccccagagtacgaagaggctgccacgacattaaaagagaaggatatcaagctcgtcaaggtcgactgcacagaagaggccgacctctgccagtcgtatggtgtcgagggctacccgaccctcaagatcttccgtggtcctgagaacatcactccctactccggccagcgcaaagctgctgccatcacctcctacatgatcaagcagtccctccccgctgtctccatattaaatgcagaaaccctcgaggacttcaagaccgccgacaaggttgtcctcgttgcctacgtagacgcatccgacaaatcctccaacgagacctacacagccatcgctgagaagctccgagacaactatctcttcggtgccaccaatgatgccgctctggccgaggctgagggtgttactgcccccgctctggttctctacaaacagttcgacgagggcaagtctgtctactcggacaagttcgatgaggatgccattgttgctttcaccaagactgcctctacccctcttgtcggagaggtcggccctgagacgtactctgagtacatgtctgccggcattccacttgcctacatctttgccgagactcccgaggagcggacggagcttggtgaggctctcaagcctattgccgagaagtacaagggcaagatcaacttcgccactattgatgccaagtctttcggtgcccacgccggtaacttgaacctccccactgacaagttcccctccttcgccatccaggagaccgtcaagaaccagaagttccccttcgacactgagaaggagatcactcccgagaccatcggtgcctttgtcgaggacttctccgccggcaagatcgagcccagtctcaagtctgagcctatccctgagactcaggagggtgccgtcaccgtcgtcgttggaaagacctacgaggagatcgttctggatgacaccaaggacgttctgatcgagttctacgctccctggtgcggtcactgcaaggccttggcccccaagtacgaggacttggctgctctgtacgccaacagcgagttcaaggacaaggttgtcatcgccaaggttgatgccactgccaatgatgtgcctgatgaggttagaggcttccccaccatcaagatgtacgctgctggctccaagggtgagcccgccacttacagtggttcccgaactgttgaggacttgatcaagttcatcaaggagaatggcaagtacaaggctgaggtcgaggagaagactgaggagactcccgttgcccctgctgctaccgagtcccctgaggccaaggagtctgaacgtgatgagctatagacgctatccggacaaaaaagtatcgtgtacagtttctctcagcatttctctcttcgggtatgggtatatcgtggacggttcaatcgactgtccctaaacattctgcggattccagatagaatgcggatgtctggtaattagcataggtttcatggatttcttttttttctctcgggaaaccttgtgtattccacatgtgtaatgacataaaatctggtagatcttgatgtataagaaacgacattctttgacgaaat

SEQ ID NO: 27762 - DNA, 426 bp, Muscodor strobelii
  misc_feature: SGI cDNA ID NO. 569516
  misc_feature: Encodes the peptide sequence at SEQ ID NO 27763
atgatgaacaccgaacccctcatccgaatcacagtgctcataaaacgcagaccaggaatgacagaagacgagttcagcgactactggataaacaaacacggacctctcgcacacgcatggctaatacgttgtggaatagtccgatatgtccagtgcatcacaacatccaaacatcgagacctagcaaaaaagatggcagaagccaccggtcggccaccgctagattacgacggcatcggtgaattttgggtgaggaagtacgaagacttcgagtccgcattcctagaccaggagtatcatgagaatatcaggccagacgaagtaaagttgtgcgacatggactcgatacaaatcactgtcggcgtcgaacatgtcgctattgataatgggaaggttcttgagacgcatgaaagaactaagtattag

SEQ ID NO: 27763 - protein, 141 aa, Muscodor strobelii
  misc_feature: SGI Peptide ID NO. 569516
  misc_feature (2)..(139): NCBI GI: 261361301 Blast Desc: conserved [Verticillium albo-atrum VaMs.102]
  misc_feature (3)..(139): NCBI GI: 46127683 Blast Desc: FG08219.1 [Gibberella zeae PH-1]
  misc_feature (1)..(133): NCBI GI: 212542755 Blast Desc: conserved [Penicillium marneffei ATCC 18224] gi|210066439|gb|EEA20532.1| conserved [Penicillium marneffei ATCC 18224]
  misc_feature (2)..(133): NCBI GI: 169600773 Blast Desc: SNOG_03236 [Phaeosphaeria nodorum SN15] gi|160705512|gb|EAT89967.2| SNOG_03236 [Phaeosphaeria nodorum SN15]
  misc_feature (5)..(132): NCBI GI: 71023765 Blast Desc: UM05965.1 [Ustilago maydis 521] gi|46101462|gb|EAK86695.1| UM05965.1 [Ustilago maydis 521]
  misc_feature (7)..(124): NCBI GI: 254480775 Blast Desc: conserved [marine gamma proteobacterium HTCC2148] gi|214039358|gb|EEB80018.1| conserved [marine gamma proteobacterium HTCC2148]
  misc_feature (2)..(132): NCBI GI: 145235555 Blast Desc: An03g05450 [Aspergillus niger] gi|134058113|emb|CAK38307.1| protein product [Aspergillus niger]
  misc_feature (7)..(127): NCBI GI: 197105983 Blast Desc: PHZ_c2522 [Phenylobacterium zucineum HLK1] gi|196479403|gb|ACG78931.1| conserved [Phenylobacterium zucineum HLK1]
  misc_feature (7)..(133): NCBI GI: 242821235 Blast Desc: conserved [Talaromyces stipitatus ATCC 10500] gi|218712560|gb|EED11985.1| conserved [Talaromyces stipitatus ATCC 10500]
  misc_feature (7)..(127): NCBI GI: 284038690 Blast Desc: Ethyl tert-butyl ether degradation EthD [Spirosoma linguale DSM 74] gi|283817983|gb|ADB39821.1| Ethyl tert-butyl ether degradation EthD [Spirosoma linguale DSM 74]
MMNTEPLIRITVLIKRRPGMTEDEFSDYWINKHGPLAHAWLIRCGIVRYVQCITTSKHRDLAKKMAEATGRPPLDYDGIGEFWVRKYEDFESAFLDQEYHENIRPDEVKLCDMDSIQITVGVEHVAIDNGKVLETHERTKY

SEQ ID NO: 27764 - DNA, 644 bp, Muscodor strobelii
  misc_feature: SGI EST ID NO. CUFF.65482.0
  misc_feature: Variant of the nucleotide sequence at SEQ ID NO 27762
ccccgcaagacgcatgaatcatgtaactgccaatatcaagtcgacaagtaagaagaaactagaataatagactaccttataagacgacagaggatcatcctcttattaaatcccatctgagtaaacgcagtatcccagcccaagatgatgaacaccgaacccctcatccgaatcacagtgctcataaaacgcagaccaggaatgacagaagacgagttcagcgactactggataaacaaacacggacctctcgcacacgcatggctaatacgttgtggaatagtccgatatgtccagtgcatcacaacatccaaacatcgagacctagcaaaaaagatggcagaagccaccggtcggccaccgctagattacgacggcatcggtgaattttgggtgaggaagtacgaagacttcgagtccgcattcctagaccaggagtatcatgagaatatcaggccagacgaagtaaagttgtgcgacatggactcgatacaaatcactgtcggcgtcgaacatgtcgctattgataatgggaaggttcttgagacgcatgaaagaactaagtattaggctctattactgtcatcttatgaattgaatctttttgatatggggcatatttctgaaacctgctggggtatgag

SEQ ID NO: 27765 - DNA, 1242 bp, Muscodor strobelii
  misc_feature: SGI cDNA ID NO. 569517
  misc_feature: Reduced expression when VOC is produced
  misc_feature: Encodes the peptide sequence at SEQ ID NO 27766
atggatggtgatccggtagtcgagccagagctcgactccttcagcttgaccttccctctgccctatcgcgtcgccttcattgtcgttctcgccgtctggggctggggcttcaatctccattacctctactacctaaaaatcaatgttcccgaactcatacgatacccgggccggacctcctccaggcacccaccacatcaccactccgcataccgactggcgaccgtcctctcaggcgtcttcgctttctccctcgttgtcttctggatctttacgcgccgcaatccagatctcgtgctggcatgggactggttaccgctcacttatctagtggtcctaatcttaatattcgtgctccctctaccacgaaactcggggcttccacagacaggccgtattcgtctgcgctcaacactccgccgcatcgccataggcggtatcgcagaagccaaagatggcaagtttggcgatattttgctagccgatgtcctgacgtcctatgctaaagtcctaggcgatctctacgtcgcgctatgcatgttcttccgctccgacggctcggcaacagcacgtcctgaccgtggctgtggtggcgtcgtaattgtacctctcatactcgccattccctcactcatccgtcttcgacaatgtctcatcgagtacggtcgcgtaaagcgcggccctattaatcctgcccagggctggggtggccaacaccttgcgaacgcactgaaatactccaccgcatttcccgtcatcttattctccgctctgcagcggaactgggccacgaattctgtgggaatgtaccgtctttgggtcgcctcctgcgccgtgaattcgttatactctttctactgggacgtagctaaggactgggatctcacgctctttaatccacgcgcgcggaacaaccccgaacacccctttggcttgcgcaaaacacttcgcgtcggcacaccacagttgtactacggagtcattgcgctcgatcttgtgctgcgatgcacttggagtctaaagctttcaccacatttggatcgtatcgcagactttgaaagttcgatattcatcgtcgaactactggaagtggtgagaagatggatatggatattcttccgtgtcgagaccgagtggatacgaaacaaaaactctggccctgctttggggttaggcctaggggagagcgtgaatgatattatgctggcagactttggcggaaaatatgaggacgaagattag

SEQ ID NO: 27766 - protein, 413 aa, Muscodor strobelii
  misc_feature: SGI Peptide ID NO. 569517
  misc_feature (195)..(380): Pfam Id: PF03124 Pfam Desc: EXS family
  misc_feature (1)..(413): NCBI GI: 116182432 Blast Desc: CHGG_01844 [Chaetomium globosum CBS 148.51] gi|88186141|gb|EAQ93609.1| CHGG_01844 [Chaetomium globosum CBS 148.51]
  misc_feature (1)..(413): NCBI GI: 171695394 Blast Desc: protein product [Podospora anserina] gi|170947939|emb|CAP60103.1| protein product [Podospora anserina]
  misc_feature (1)..(413): NCBI GI: 85111994 Blast Desc: NCU03278 [Neurospora crassa OR74A] gi|28925976|gb|EAA34968.1| conserved [Neurospora crassa OR74A]
  misc_feature (1)..(413): NCBI GI: 169601830 Blast Desc: SNOG_03791 [Phaeosphaeria nodorum SN15] gi|111067876|gb|EAT88996.1| SNOG_03791 [Phaeosphaeria nodorum SN15]
  misc_feature (1)..(413): NCBI GI: 145614610 Blast Desc: MGG_11390 [Magnaporthe grisea 70-15] gi|145021512|gb|EDK05641.1| MGG_11390 [Magnaporthe grisea 70-15]
  misc_feature (1)..(413): NCBI GI: 156058155 Blast Desc: SS1G_04809 [Sclerotinia sclerotiorum 1980] gi|154702594|gb|EDO02333.1| SS1G_04809 [Sclerotinia sclerotiorum 1980]
  misc_feature (10)..(412): NCBI GI: 242775491 Blast Desc: protein-ER retention protein (Erd1), [Talaromyces stipitatus ATCC 10500] gi|218722274|gb|EED21692.1| protein-ER retention protein (Erd1), [Talaromyces stipitatus ATCC 10500]
  misc_feature (7)..(411): NCBI GI: 212532411 Blast Desc: protein-ER retention protein (Erd1), [Penicillium marneffei ATCC 18224] gi|210071726|gb|EEA25815.1| protein-ER retention protein (Erd1), [Penicillium marneffei ATCC 18224]
  misc_feature (1)..(412): NCBI GI: 261190756 Blast Desc: EXS family protein [Ajellomyces dermatitidis SLH14081] gi|239591210|gb|EEQ73791.1| EXS family protein [Ajellomyces dermatitidis SLH14081]
  misc_feature (1)..(412): NCBI GI: 225556095 Blast Desc: conserved [Ajellomyces capsulatus G186AR]
  misc_feature: Useful for introducing or modulating the production of volatile compounds
MDGDPVVEPELDSFSLTFPLPYRVAFIVVLAVWGWGFNLHYLYYLKINVPELIRYPGRTSSRHPPHHHSAYRLATVLSGVFAFSLVVFWIFTRRNPDLVLAWDWLPLTYLVVLILIFVLPLPRNSGLPQTGRIRLRSTLRRIAIGGIAEAKDGKFGDILLADVLTSYAKVLGDLYVALCMFFRSDGSATARPDRGCGGVVIVPLILAIPSLIRLRQCLIEYGRVKRGPINPAQGWGGQHLANALKYSTAFPVILFSALQRNWATNSVGMYRLWVASCAVNSLYSFYWDVAKDWDLTLFNPRARNNPEHPFGLRKTLRVGTPQLYYGVIALDLVLRCTWSLKLSPHLDRIADFESSIFIVELLEVVRRWIWIFFRVETEWIRNKNSGPALGLGLGESVNDIMLADFGGKYEDED

SEQ ID NO: 27767 - DNA, 1943 bp, Muscodor strobelii
  misc_feature: SGI EST ID NO. CUFF.65664.1
  misc_feature: Variant of the nucleotide sequence at SEQ ID NO 27765
ggtgtggcgtgacgtagatccctcccctaattatatcctaaattcgcatccgcaatcaaggacttgtagattgagatttggcctcaatttatctgtttgtcttgcacaacttataacgtacaacactaacttaaccttctcgccttcgactatacgcacggcgagctgcggtcaaatccccctcgatgagtattcctaccgtaagccatggatggtgatccggtagtcgagccagagctcgactccttcagcttgaccttccctctgccctatcgcgtcgccttcattgtcgttctcgccgtctggggctggggcttcaatctccattacctctactacctaaaaatcaatgttcccgaactcatacgatacccgggccggacctcctccaggcacccaccacatcaccactccgcataccgactggcgaccgtcctctcaggcgtcttcgctttctccctcgttgtcttctggatctttacgcgccgcaatccagatctcgtgctggcatgggactggttaccgctcacttatctagtggtcctaatcttaatattcgtgctccctctaccacgaaactcggggcttccacagacaggccgtattcgtctgcgctcaacactccgccgcatcgccataggcggtatcgcagaagccaaagatggcaagtttggcgatattttgctagccgatgtcctgacgtcctatgctaaagtcctaggcgatctctacgtcgcgctatgcatgttcttccgctccgacggctcggcaacagcacgtcctgaccgtggctgtggtggcgtcgtaattgtacctctcatactcgccattccctcactcatccgtcttcgacaatgtctcatcgagtacggtcgcgtaaagcgcggccctattaatcctgcccagggctggggtggccaacaccttgcgaacgcactgaaatactccaccgcatttcccgtcatcttattctccgctctgcagcggaactgggccacgaattctgtgggaatgtaccgtctttgggtcgcctcctgcgccgtgaattcgttatactctttctactgggacgtagctaaggactgggatctcacgctctttaatccacgcgcgcggaacaaccccgaacacccctttggcttgcgcaaaacacttcgcgtcggcacaccacagttgtactacggagtcattgcgctcgatcttgtgctgcgatgcacttggagtctaaagctttcaccacatttggatcgtatcgcagactttgaaagttcgatattcatcgtcgaactactggaagtggtgagaagatggatatggatattcttccgtgtcgagaccgagtggatacgaaacaaaaactctggccctgctttggggttaggcctaggggagagcgtgaatgatattatgctggcagactttggcggaaaatatgaggacgaagattagaactctaatccttggttgtttgaatggtatgatacgactatgccttggtgaagatccggcttcgcatgtattgtatcaatacgctatatcatgagggaatggatagatagaggattgggcgttcatatggcattgtccggcgtttatttcttacatagttgtatgtggtagagaccattgcccccttggtggttgttagtcaacctgaagttctatattgatatatactaagaaaatgtacctatagacggagcaaagagcatgataaaaagcccctttgtattataatccagtactgtatacgagagcaggctcgaatgcgcacgcattgcgaataaggcaaatatactatgaggagcccgtttgcatttggcgtatacggtagctagcaggaaaattcgaagggccagtggtcatggtctacgagatcaggactatccactgatcttaattaattctactgagctggtcgcaatcactatcgcgtacctctg

SEQ ID NO: 27768 - DNA, 1005 bp, Muscodor strobelii
  misc_feature: SGI cDNA ID NO. 569518
  misc_feature: Reduced expression when VOC is produced
  misc_feature: Encodes the peptide sequence at SEQ ID NO 27769
atggcgacaaccgcagcacctttgccatcttcatcctctctctccaacccaccatacccatacgccttcgcgccagacataatacgcgcccaccagaaagatgcctacttccaaggcctcctcacaaaccagctcacagacctgcaccgtcgtctcctgggcgcacgatccgcacacgcctggaccaacgagtcccgcacaatcgccgacctcttatacctctgtctcaccaccctcctcgggaaccgcacattgggcgaagagaaaaaaccaacatggacgcataaaatgcagtcctacctcctaaccaatctccccaccctcacctcgcccgcgcctatccacgctctcggactcgcgctattctacttctccggctcctactacgagctcgccaagcgactcacccggctacgctatgtcttcacctcgcgcgcgcccctaggagccgagggtgagccctccgccgacagagcaggatacgaagtcctaggtgtgctcctcgcagtccagatgagcgtccaagcatacctacacatcaaatctaccctctcaactctctcaccaagcacccgcgagcgaagtacagctttaggaggcgacgtaaatatctccctagactcgcacgcctacagcgccaacaacgccatcctcctaacacaaatgggcacaccgggctcgacctcaacgccaaacacacatctcgacatcgcagccgttacacacactcctccacccccttccccttcttcttcaaactccaaacctaactcagatgggataagatacgatctagcggacgaagagaaaatgaagtggatcaaaggcgcgcaacagagaaagtgtactctatgtctggaggcgttgaaggaccctgctgcgacgcagtgcggccatgtgttttgctgggcttgtataggggactgggttagggagaagccgcagtgtccgctttgtagacgggaggcgcttgttcagcatattttgcctctgagggctttgtag

SEQ ID NO: 27769 - protein, 334 aa, Muscodor strobelii
  misc_feature: SGI Peptide ID NO. 569518
  misc_feature (282)..(319): Pfam Id: PF00097 Pfam Desc: Zinc finger, C3HC4 type (RING finger)
  misc_feature (34)..(192): Pfam Id: PF04757 Pfam Desc: Pex2 / Pex12 amino terminal region
  misc_feature (34)..(88): Pfam Id: PF04757 Pfam Desc: Pex2 / Pex12 amino terminal region
  misc_feature (2)..(333): NCBI GI: 154275862 Blast Desc: conserved [Ajellomyces capsulatus NAm1] gi|150413849|gb|EDN09214.1| conserved [Ajellomyces capsulatus NAm1]
  misc_feature (9)..(333): NCBI GI: 156058153 Blast Desc: SS1G_04808 [Sclerotinia sclerotiorum 1980] gi|154702593|gb|EDO02332.1| SS1G_04808 [Sclerotinia sclerotiorum 1980]
  misc_feature (82)..(332): NCBI GI: 85111992 Blast Desc: NCU03277 [Neurospora crassa OR74A] gi|28925975|gb|EAA34967.1| conserved [Neurospora crassa OR74A]
  misc_feature (96)..(333): NCBI GI: 169601644 Blast Desc: SNOG_03692 [Phaeosphaeria nodorum SN15] gi|111067777|gb|EAT88897.1| SNOG_03692 [Phaeosphaeria nodorum SN15]
  misc_feature (96)..(333): NCBI GI: 189193461 Blast Desc: peroxisome assembly protein 10 [Pyrenophora tritici-repentis Pt-1C-BFP] gi|187978633|gb|EDU45259.1| peroxisome assembly protein 10 [Pyrenophora tritici-repentis
  misc_feature (97)..(333): NCBI GI: 145611752 Blast Desc: MGG_00145 [Magnaporthe grisea 70-15] gi|145019006|gb|EDK03285.1| MGG_00145 [Magnaporthe grisea 70-15]
  misc_feature (87)..(334): NCBI GI: 171695392 Blast Desc: protein product [Podospora anserina] gi|170947938|emb|CAP60102.1| protein product [Podospora anserina]
  misc_feature (96)..(334): NCBI GI: 256733064 Blast Desc: [Nectria haematococca mpVI 77-13-4]
  misc_feature (96)..(334): NCBI GI: 110617774 Blast Desc: RING-1 [Gibberella zeae]
  misc_feature (90)..(333): NCBI GI: 225556094 Blast Desc: peroxin 10 [Ajellomyces capsulatus G186AR]
  misc_feature: Useful for introducing or modulating the production of volatile compounds
MATTAAPLPSSSSLSNPPYPYAFAPDIIRAHQKDAYFQGLLTNQLTDLHRRLLGARSAHAWTNESRTIADLLYLCLTTLLGNRTLGEEKKPTWTHKMQSYLLTNLPTLTSPAPIHALGLALFYFSGSYYELAKRLTRLRYVFTSRAPLGAEGEPSADRAGYEVLGVLLAVQMSVQAYLHIKSTLSTLSPSTRERSTALGGDVNISLDSHAYSANNAILLTQMGTPGSTSTPNTHLDIAAVTHTPPPPSPSSSNSKPNSDGIRYDLADEEKMKWIKGAQQRKCTLCLEALKDPAATQCGHVFCWACIGDWVREKPQCPLCRREALVQHILPLRAL

SEQ ID NO: 27770 - DNA, 1218 bp, Muscodor strobelii
  misc_feature: SGI cDNA ID NO. 569519
  misc_feature: Reduced expression when VOC is produced
  misc_feature: Encodes the peptide sequence at SEQ ID NO 27771
atggtccatttccccggctttgagtaccgctcacataccagctgtatgacagaagatcaaaagtatcaaggtgccctgtacaaaccaaagaaacaaaagaacaacaacacaacacagaacacagaacaagaagacaccactatggcgcaccacgcgtacgtcgaagatgtggcggaagagtaccatgcatatcagtatcaggtcgattcagacgcggacaatgagcttccaccagaggcgcctacaccgccgccagctgtagtctacaacgccaaccctaatgtctttgactacatgctagatgcgacaccgaatgtttcccatgtgaatctgcagccatatcataatccagtccccgcaagcggaggacgtcagttagtacgattcgagcagcgcgagacggacgaatatgttgatgagtctggatatatggtcgatgacggtgctatggttcggtatagtgctgaagggggcgccttcgaaacgccagcgccaaaatctcaccgaaagaagaccaaagacgccgaccgggagcagaaaaaggataaaaagcgaaagcgactgcatattgacaccagcccccccgcattggatcggatctccgatgaagtcatgacggatgcgcctccggttctgcactcggggctgaccggaggtctcaagggcatgatgcgctcttcgcaattcccaccatcccccgattactcaggaggcgacaacgcctcgcccgctagcccgattaaaaagaagaagcacaccaagtccaagagtaaaagctccgacggcattggcagcaacttgaaagctcttatatctggaacatctaaaacgaaggtttcgaagaagaggaagcattcttcagcctcggaaaagaaagaaaagaagcatcgatcgcatcgccgatcaacggagaaggtaccaaagctcatcgagtacaagaccaagtcaggcgacgagaaggacggcgagagcggtgcattggttgtctacaagccgagatccgaccttttcctaagcttgtgtaataaaggaccggaaagcgaccgaggatgcagtgtcaacaaagcactgaagcgattccaccgggagcgcacgtcatctggcaccagtctcggtaaggtgatggaagagaaagagctatggagatcacttcgcatgcgtcgcaacgaccgtggagagattgttctattttctctcgatggagatcttgaactatga

SEQ ID NO: 27771 - protein, 405 aa, Muscodor strobelii
  misc_feature: SGI Peptide ID NO. 569519
  misc_feature (1)..(22): Pfam Id: PF08790 Pfam Desc: LYAR-type C2HC zinc finger
  misc_feature (1)..(400): NCBI GI: 116182436 Blast Desc: CHGG_01846 [Chaetomium globosum CBS 148.51] gi|88186143|gb|EAQ93611.1| CHGG_01846 [Chaetomium globosum CBS 148.51]
  misc_feature (1)..(399): NCBI GI: 171695390 Blast Desc: protein product [Podospora anserina] gi|170947937|emb|CAP60101.1| protein product [Podospora anserina]
  misc_feature (1)..(399): NCBI GI: 39975421 Blast Desc: MGG_00143 [Magnaporthe grisea 70-15] gi|145019008|gb|EDK03287.1| MGG_00143 [Magnaporthe grisea 70-15]
  misc_feature (1)..(400): NCBI GI: 256732615 Blast Desc: NECHADRAFT_100043 [Nectria haematococca mpVI 77-13-4]
  misc_feature (1)..(399): NCBI GI: 85112861 Blast Desc: NCU03274 [Neurospora crassa OR74A] gi|28926208|gb|EAA35191.1| [Neurospora crassa OR74A]
  misc_feature (14)..(397): NCBI GI: 156056631 Blast Desc: SS1G_04046 [Sclerotinia sclerotiorum 1980] gi|154701832|gb|EDO01571.1| SS1G_04046 [Sclerotinia sclerotiorum 1980]
  misc_feature (48)..(399): NCBI GI: 261355989 Blast Desc: conserved [Verticillium albo-atrum VaMs.102]
  misc_feature (1)..(397): NCBI GI: 145248027 Blast Desc: An13g01230 [Aspergillus niger] gi|134081011|emb|CAK41523.1| protein product [Aspergillus niger]
  misc_feature (1)..(397): NCBI GI: 159123189 Blast Desc: conserved portein [Aspergillus fumigatus A1163]
  misc_feature (1)..(397): NCBI GI: 70987119 Blast Desc: conserved portein [Aspergillus fumigatus Af293] gi|66846670|gb|EAL87002.1| conserved portein [Aspergillus fumigatus Af293]
  misc_feature: Useful for introducing or modulating the production of volatile compounds
MVHFPGFEYRSHTSCMTEDQKYQGALYKPKKQKNNNTTQNTEQEDTTMAHHAYVEDVAEEYHAYQYQVDSDADNELPPEAPTPPPAVVYNANPNVFDYMLDATPNVSHVNLQPYHNPVPASGGRQLVRFEQRETDEYVDESGYMVDDGAMVRYSAEGGAFETPAPKSHRKKTKDADREQKKDKKRKRLHIDTSPPALDRISDEVMTDAPPVLHSGLTGGLKGMMRSSQFPPSPDYSGGDNASPASPIKKKKHTKSKSKSSDGIGSNLKALISGTSKTKVSKKRKHSSASEKKEKKHRSHRRSTEKVPKLIEYKTKSGDEKDGESGALVVYKPRSDLFLSLCNKGPESDRGCSVNKALKRFHRERTSSGTSLGKVMEEKELWRSLRMRRNDRGEIVLFSLDGDLEL

SEQ ID NO: 27772 - DNA, 3397 bp, Muscodor strobelii
  misc_feature: SGI EST ID NO. CUFF.65819.1
  misc_feature: Variant of the nucleotide sequence at SEQ ID NO 27770
tgcaagtcggcttttataacacaacttgatgttttcgcctgattacctatcacgctagcggcttgagtatgtagaggaagttgagattcatagagaaatttctatcttccgcctcacagcccctcaggactctctctctgcccaacctgagatatcaagccgtcctcgctcaacttttgtcatcctattttcatccttcgctcttcgtcacagctttaccaaatccagaagtcggccaactctgccacctccacaggtttctaaatacaatcttgaaggaggactgaagctggagtaaagccccgaaccgattaccgcagccacgcgctcgagacggacccccaattcactgtagaaggtggtacctcaaaggctctcaaagtccacacttatcttatttttgttgatcacgagaaacattgcacccctcgcccctctgagtacacaccatctcaacgcggcccgccagcttggaccctgtcgctcagctaatagtgtgagaagaagctgttgctgtctttcgtactcgaaaaagccatccgcgtcagctgtgtgcacattggtctgtctatagtagtatttgctctgctatacccgtcttcgtagaatgtgtgttatagcataatagcaccatactccagacacttgcccagcaaaccagagtctcgctgcagagtctcggccctccctatcctgtttctgtcacccatcttcacgcagcacgtcgtcatctgttgataatcgaccactcagcggacttggacgcatcaacttcaaatttgtcgcccagcgccagtcagggcaacgcccgaccaattccgtcccaatcaagttacagcagtctcagaccgtctagaaagagaaagacacaatggtttccttttcgtgtgaggtgggtaataaaagtcgaattcccattcaagcccaaggagcccgacaccgagcaaacttcgcctcattctgcccaacgtctccataaggtatctgcccaggtagattttctccttgcaccgttatcagtacacagcctctctttgatgcggcaacagacactcccttcataccgcatacatcactctctgccccatttcgtttttataattgatcacccacacccatccacccacacctacgcaacgaccccaggcactgatcagccgtttcctgccccatcccccattcattcctcacgcgctaggagctcctgggcggccagggtgccgtgttgctacccctggctaccatccgacgggccaaggaagttaggaacaaagcgaccacacctgggctgaaccgccgtcatctcctgacctactatttcactcctccgcccctccaacacgctcaaacatacacaccccctaaactcacctctgtattcttatccttcactgcgccttttgccatttcgttcttgtacaatctaactgtattacttctatccacaggaatgtggtgatgttttgaccaagaagaaacttgatccacatagaaatcgttgtcgaggcgcgaccttcacatgcattgattgtatggtccatttccccggctttgagtaccgctcacataccagctgtatgacagaagatcaaaagtatcaaggtgccctgtacaaaccaaagaaacaaaagaacaacaacacaacacagaacacagaacaagaagacaccactatggcgcaccacgcgtacgtcgaagatgtggcggaagagtaccatgcatatcagtatcaggtcgattcagacgcggacaatgagcttccaccagaggcgcctacaccgccgccagctgtagtctacaacgccaaccctaatgtctttgactacatgctagatgcgacaccgaatgtttcccatgtgaatctgcagccatatcataatccagtccccgcaagcggaggacgtcagttagtacgattcgagcagcgcgagacggacgaatatgttgatgagtctggatatatggtcgatgacggtgctatggttcggtatagtgctgaagggggcgccttcgaaacgccagcgccaaaatctcaccgaaagaagaccaaagacgccgaccgggagcagaaaaaggataaaaagcgaaagcgactgcatattgacaccagcccccccgcattggatcggatctccgatgaagtcatgacggatgcgcctccggttctgcactcggggctgaccggaggtctcaagggcatgatgcgctcttcgcaattcccaccatcccccgattactcaggaggcgacaacgcctcgcccgctagcccgattaaaaagaagaagcacaccaagtccaagagtaaaagctccgacggcattggcagcaacttgaaagctcttatatctggaacatctaaaacgaaggtttcgaagaagaggaagcattcttcagcctcggaaaagaaagaaaagaagcatcgatcgcatcgccgatcaacggagaaggtaccaaagctcatcgagtacaagaccaagtcaggcgacgagaaggacggcgagagcggtgcattggttgtctacaagccgagatccgaccttttcctaagcttgtgtaataaaggaccggaaagcgaccgaggatgcagtgtcaacaaagcactgaagcgattccaccgggagcgcacgtcatctggcaccagtctcggtaaggtgatggaagagaaagagctatggagatcacttcgcatgcgtcgcaacgaccgtggagagattgttctattttctctcgatggagatcttgaactatgaaagtgaaagcaaaactgagacaactacttagatggggggcaccggcgttcattggggcttgattttttccaggggcatagccaacaatgatacctacatacgacgcgtacgataaggggagagggccggcgttgatgcacttcgctgcatactcacatacacacactcaatgacattcggcgcgatcgggaagggacacaactgggatacacatggtacaaaacaactacatcccttttgctcttgaagctggactcggagcccacctcatagagcaaaacggaaaggggacaaaggacacactgggaaacggacggtcatcattctggcagggtgatgatggatctaattgggactatgggattgaaggacggaaattcttatgcttcattagcattcgttggagagactatgattggtgtatatcccccatctgcattttcaacatgcatcttgttgtttcagaagcgatgtttcatactacgggtccgtggttgttactgttcggatttgatatcatatcgtatctagagcttccatatccctacattgtttatgaaacaagttcccaactcctaagactcttcgggaccttccctattattctgttgttatgaatgaaagcttctaatcaacgtgaatatggt

SEQ ID NO: 27773 - DNA, 945 bp, Muscodor strobelii
  misc_feature: SGI cDNA ID NO. 569520
  misc_feature: Reduced expression when VOC is produced
  misc_feature: Encodes the peptide sequence at SEQ ID NO 27774
atgtctcctccgggtgcctcatcacacccgacgtatctggagcagaccgtcgccctgctgtcctccgtggccggatacttgcgcctcccggcgctggccacttcgggtgttgctgcggtcctgacctccctcttgtatttcaagcagaaggctctgatctatccatcaaacatacctgcgaacgctcgcaccgatgtccctcgaccgtcccaatttggactgaaggactgcgaagagctcgtgataccgaccaacgatggcgagaagttgtcagctttttatatccggggcccaagacgtggacgttttgccaactgcacgattttgatgttccacggtaatgcgggcaacattggacaccggctcccaatagctcgaatgctcatcaacacgatcggctgcaatgtcttcatgctagagtatcggggctatggtctgtccactggcgaaccggatgagaaaggtctcacattagatggacagacggcactcgactacatacgcggtcgagccgagaccagaaatcataagatcatagtgtatgggcaaagcttgggaggagccgtcagtatcaagcttgttgcgaaaaaccagcatgctggagacattgtcggcctcatcctggaaaacacgtttctctcgatgcgagccttgatcccttcggtcattccgccagcgaagtatctggcgctgctctgccatcagatatggccgagtgagactatcttgccgagcatcactgaggtaccaatcctattcttgagtgggctgcaagatgagataattccaccctcccacatgcgacggctattcgagctcactacagcgcccacgaagatttggaaacccctgcctggcggtgaccacaactccagcgtgttagaagcaggctactttgaggccattgccgaattcgttggcaacgcagctgggggggagaagtaa

SEQ ID NO: 27774 - protein, 314 aa, Muscodor strobelii
  misc_feature: SGI Peptide ID NO. 569520
  misc_feature (12)..(311): NCBI GI: 256733063 Blast Desc: NECHADRAFT_100042 [Nectria haematococca mpVI 77-13-4]
  misc_feature (12)..(310): NCBI GI: 145611756 Blast Desc: MGG_00142 [Magnaporthe grisea 70-15] gi|145019010|gb|EDK03289.1| MGG_00142 [Magnaporthe grisea 70-15]
  misc_feature (13)..(306): NCBI GI: 171695388 Blast Desc: protein product [Podospora anserina] gi|170947936|emb|CAP60100.1| protein product [Podospora anserina]
  misc_feature (50)..(314): NCBI GI: 46125399 Blast Desc: FG07077.1 [Gibberella zeae PH-1]
  misc_feature (51)..(314): NCBI GI: 116182438 Blast Desc: CHGG_01847 [Chaetomium globosum CBS 148.51] gi|88186144|gb|EAQ93612.1| CHGG_01847 [Chaetomium globosum CBS 148.51]
  misc_feature (10)..(308): NCBI GI: 154323848 Blast Desc: BC1G_00323 [Botryotinia fuckeliana B05.10] gi|150842552|gb|EDN17745.1| BC1G_00323 [Botryotinia fuckeliana B05.10]
  misc_feature (11)..(314): NCBI GI: 261355980 Blast Desc: bem46 [Verticillium albo-atrum VaMs.102]
  misc_feature (58)..(313): NCBI GI: 164427169 Blast Desc: NCU03276 [Neurospora crassa OR74A] gi|157071635|gb|EAA34966.2| conserved [Neurospora crassa OR74A]
  misc_feature (19)..(306): NCBI GI: 169765594 Blast Desc: [Aspergillus oryzae RIB40] gi|83765123|dbj|BAE55266.1| protein product [Aspergillus oryzae]
  misc_feature (18)..(306): NCBI GI: 70987127 Blast Desc: BEM46 family protein [Aspergillus fumigatus Af293] gi|66846674|gb|EAL87006.1| BEM46 family protein [Aspergillus fumigatus Af293] gi|159123185|gb|EDP48305.1| BEM46 family protein
  misc_feature: Useful for introducing or modulating the production of volatile compounds
MSPPGASSHPTYLEQTVALLSSVAGYLRLPALATSGVAAVLTSLLYFKQKALIYPSNIPANARTDVPRPSQFGLKDCEELVIPTNDGEKLSAFYIRGPRRGRFANCTILMFHGNAGNIGHRLPIARMLINTIGCNVFMLEYRGYGLSTGEPDEKGLTLDGQTALDYIRGRAETRNHKIIVYGQSLGGAVSIKLVAKNQHAGDIVGLILENTFLSMRALIPSVIPPAKYLALLCHQIWPSETILPSITEVPILFLSGLQDEIIPPSHMRRLFELTTAPTKIWKPLPGGDHNSSVLEAGYFEAIAEFVGNAAGGEK

SEQ ID NO: 27775 - DNA, 3489 bp, Muscodor strobelii
  misc_feature: SGI EST ID NO. CUFF.65735.4
  misc_feature: Variant of the nucleotide sequence at SEQ ID NO 27773
tcgacatcgtataattcactttgaagaagttcggaaagcttaccattagctgtttcacgctttctccccgcgggaccattcgtgaacagcgaactcccagctccaccgaaccactgcccttggctgcgtggtcgcatgctctgagtggacatagagggcatctttggatcaagccgtccaagagagattcgcctgccgttttctaaggtgggttctatgacttgacccatgcgtgacaacgccagtcgaaacccagccagcagggcacttgctgaccgctgaaaacaccttgtcaggaacagccgcatgagaaacaacgaggtcactccttgtacacgtgttagttggacacggagcagccaagcagcttcccgctccttttctactcatcatcccgcctgcgcctcccaccgatcttgtcatctactgcgtcaagactcgagctgggacggataagacatgtctcctccgggtgcctcatcacacccgacgtatctggagcagaccgtcgccctgctgtcctccgtggccggatacttgcgcctcccggcgctggccacttcgggtgttgctgcggtcctgacctccctcttgtatttcaagcagaaggctctgatctatccatcaaacatacctgcgaacgctcgcaccgatgtccctcgaccgtcccaatttggactgaaggactgcgaagagctcgtgataccgaccaacgatggcgagaagttgtcagctttttatatccggggcccaagacgtggacgttttgccaactgcacgattttgatgttccacggtaatgcgggcaacattggacaccggctcccaatagctcgaatgctcatcaacacgatcggctgcaatgtcttcatgctagagtatcggggctatggtctgtccactggcgaaccggatgagaaaggtctcacattagatggacagacggcactcgactacatacgcggtcgagccgagaccagaaatcataagatcatagtgtatgggcaaagcttgggaggagccgtcagtatcaagcttgttgcgaaaaaccagcatgctggagacattgtcggcctcatcctggaaaacacgtttctctcgatgcgagccttgatcccttcggtcattccgccagcgaagtatctggcgctgctctgccatcagatatggccgagtgagactatcttgccgagcatcactgaggtaccaatcctattcttgagtgggctgcaagatgagataattccaccctcccacatgcgacggctattcgagctcactacagcgcccacgaagatttggaaacccctgcctggcggtgaccacaactccagcgtgttagaagcaggctactttgaggccattgccgaattcgttggcaacgcagctgggggggagaagtaatgattttgatgccgttacgaaaaaagaaacaagacaatgacattgcatgaaaggcctggctttgcatttaatacgtttaccgatgatgacagagacaaaaaatggacgaaacagaaaacctttcttctaacgatacccccttttcaacacaaggaagattggactttcactgatagagctgtatgacttttcactagccttaatgtatcggatagtgtagttttatgaagaatgaggttacaagtcattatgatctatgacaactcttcatgattgtcgtgttggccaccgttcactctgttgccaagcttcgcatgatttaatttaatccgatctagtgccagagcaaagacaatgcacaacgaattcgtatttccggacgcgtggcggtcctaaacagaagccaataccactatcgttggagattcaggtcgtcacagtgccactacccctcacggcgcatgaacagccctgccagtcagctcagggcatacagcacaccacttcgccactgtacaagtcgacagccgaaatctgcagggtacatgcagagcaaaaattctcaatgtaaccccaggctcgtgattactgtcgcacgcgaagatgtgctgttcgttcatgttgacacaggaaaagcatgagcgtcaattaatgtacaccgccatggatgtgaagaaatgcaatagaatgctgttctgttttacagtctttcagtcttcagtgtcgaaaaatggcccagcaaactcccgctcgcaaatattgtgttggtgtggccctcttcgtgactctcagccaggggcagagtaaaccctgaagagaccaccttttcgtttccgcatctcaaactttgttcttgttctcgtcccctgggtcaatgattatgtgtgtgtcccatgtcattgcaaagactcaaggaaaatgccatgtcctcctttattttctctttcgttccgcggcatccatcttctcctctaagctcgtgacatatgcgttcaatcgttggcaagccgcctgcagcgcctgtttcgtcacatccccattagcaaggcgttcccccgatcgcaagggccgttgcgtgtgattgtgcagtgtcgtaaaaaagtgtatgtagtctatggtgtaatgctgtgtatcgcaaggggaaagggcaggtcttgtgtgaatgcgtgtctatgcaaggaatgatgcttcgctcaaagaagatctcgtaaagggattggagatctcgtcagttgatgacagggtctccgtcgctttcccctcctcctcattgaagaggcaaggcacgatgaagcggaactagatgcaataacgcacatagatgtcttccgtcaacagctcgttcgaagccttgtattctctcctgtattgggcaacttgttagtctatgcgcattgtgtaggaagagattcgtgtatccaagtcgggtgctcgggagactaacagggtgtatccgtagacaccgccgccggcaagagtggtaccgaggaggaagccgaagaggctattcacagacgtcaagttagttgagtctcgtacaaggacgatggatggtggtaaagggcgactcacccgccacggaaggcgccaacgggcttgcggacgggcagcggtgcagcagcagcagcgtcagagagggatcgagcagtcgcgtggaagttgcgcatggtggcgggagccgcgaagaggcttcgggctcccgtgaatgcaatccgcgcagccatcgtgtcaaggttgtgtgttgggtggtttaggggtgggaaagacgattgatgcgtcggtgattgagattttgacgagaaacggtgcaggagaaaagaagtaacagaaggggtccgggtgcgactggctgcagcgaagggaaaggtgcaggtggccaaaaaattcaatgtggcactgctgcactgccgactcacccatcaggtcacccgctgctgccatcaactgaagcggcctttccattgctgacgggtgcatgcgcatagtgctattcctttttcggacgaagacccctatgcccaagtctagatcaaccaggggggtcactcctacctggcaattcataatgttggcattgaattggac

SEQ ID NO: 27776 - DNA, 345 bp, Muscodor strobelii
  misc_feature: SGI cDNA ID NO. 569521
  misc_feature: Encodes the peptide sequence at SEQ ID NO 27777
atggctgcgcggattgcattcacgggagcccgaagcctcttcgcggctcccgccaccatgcgcaacttccacgcgactgctcgatccctctctgacgctgctgctgctgcaccgctgcccgtccgcaagcccgttggcgccttccgtggcggcctcttcggcttcctcctcggtaccactcttgccggcggcggtgtctacggatacaccctgagagaatacaaggcttcgaacgagctgttgacggaagacatctatgcgctgcaggcggcttgccaacgattgaacgcatatgtcacgagcttagaggagaagatggatgccgcggaacgaaagagaaaataa

SEQ ID NO: 27777 - protein, 114 aa, Muscodor strobelii
  misc_feature: SGI Peptide ID NO. 569521
  misc_feature (1)..(114): NCBI GI: 39941682 Blast Desc: MGG_05752 [Magnaporthe grisea 70-15] gi|145022460|gb|EDK06480.1| MGG_05752 [Magnaporthe grisea 70-15]
  misc_feature (11)..(113): NCBI GI: 226292237 Blast Desc: PADG_03741 [Paracoccidioides brasiliensis Pb18]
  misc_feature (11)..(113): NCBI GI: 226282597 Blast Desc: PAAG_01084 [Paracoccidioides brasiliensis Pb01]
  misc_feature (1)..(114): NCBI GI: 154319486 Blast Desc: BC1G_02224 [Botryotinia fuckeliana B05.10] gi|150855882|gb|EDN31074.1| BC1G_02224 [Botryotinia fuckeliana B05.10]
  misc_feature (16)..(113): NCBI GI: 212528922 Blast Desc: conserved [Penicillium marneffei ATCC 18224] gi|210074016|gb|EEA28103.1| conserved [Penicillium marneffei ATCC 18224]
  misc_feature (16)..(113): NCBI GI: 242765111 Blast Desc: conserved [Talaromyces stipitatus ATCC 10500] gi|218724104|gb|EED23521.1| conserved [Talaromyces stipitatus ATCC 10500]
  misc_feature (2)..(112): NCBI GI: 238487568 Blast Desc: conserved [Aspergillus flavus NRRL3357] gi|220699901|gb|EED56240.1| conserved [Aspergillus flavus NRRL3357]
  misc_feature (1)..(107): NCBI GI: 169617788 Blast Desc: SNOG_12075 [Phaeosphaeria nodorum SN15] gi|111059367|gb|EAT80487.1| SNOG_12075 [Phaeosphaeria nodorum SN15]
  misc_feature (22)..(113): NCBI GI: 121710162 Blast Desc: [Aspergillus clavatus NRRL 1] gi|119400847|gb|EAW11271.1| [Aspergillus clavatus NRRL 1]
  misc_feature (21)..(111): NCBI GI: 189194691 Blast Desc: conserved [Pyrenophora tritici-repentis Pt-1C-BFP] gi|187979248|gb|EDU45874.1| conserved [Pyrenophora tritici-repentis Pt-1C-BFP]
MAARIAFTGARSLFAAPATMRNFHATARSLSDAAAAAPLPVRKPVGAFRGGLFGFLLGTTLAGGGVYGYTLREYKASNELLTEDIYALQAACQRLNAYVTSLEEKMDAAERKRK

SEQ ID NO: 27778 - DNA, 1986 bp, Muscodor strobelii
  misc_feature: SGI EST ID NO. CUFF.65736.5
  misc_feature: Variant of the nucleotide sequence at SEQ ID NO 27776
cccttcgctgcagccagtcgcacccggaccccttctgttacttcttttctcctgcaccgtttctcgtcaaaatctcaatcaccgacgcatcaatcgtctttcccacccctaaaccacccaacacacaaccttgacacgatggctgcgcggattgcattcacgggagcccgaagcctcttcgcggctcccgccaccatgcgcaacttccacgcgactgctcgatccctctctgacgctgctgctgctgcaccgctgcccgtccgcaagcccgttggcgccttccgtggcggcctcttcggcttcctcctcggtaccactcttgccggcggcggtgtctacggatacaccctgttagtctcccgagcacccgacttggatacacgaatctcttcctacacaatgcgcatagactaacaagttgcccaatacaggagagaatacaaggcttcgaacgagctgttgacggaagacatctatgtgcgttattgcatctagttccgcttcatcgtgccttgcctcttcaatgaggaggaggggaaagcgacggagaccctgtcatcaactgacgagatctccaatccctttacgagatcttctttgagcgaagcatcattccttgcatagacacgcattcacacaagacctgccctttccccttgcgatacacagcattacaccatagactacatacacttttttacgacactgcacaatcacacgcaacggcccttgcgatcgggggaacgccttgctaatggggatgtgacgaaacaggcgctgcaggcggcttgccaacgattgaacgcatatgtcacgagcttagaggagaagatggatgccgcggaacgaaagagaaaataaaggaggacatggcattttccttgagtctttgcaatgacatgggacacacacataatcattgacccaggggacgagaacaagaacaaagtttgagatgcggaaacgaaaaggtggtctcttcagggtttactctgcccctggctgagagtcacgaagagggccacaccaacacaatatttgcgagcgggagtttgctgggccatttttcgacactgaagactgaaagactgtaaaacagaacagcattctattgcatttcttcacatccatggcggtgtacattaattgacgctcatgcttttcctgtgtcaacatgaacgaacagcacatcttcgcgtgcgacagtaatcacgagcctggggttacattgagaatttttgctctgcatgtaccctgcagatttcggctgtcgacttgtacagtggcgaagtggtgtgctgtatgccctgagctgactggcagggctgttcatgcgccgtgaggggtagtggcactgtgacgacctgaatctccaacgatagtggtattggcttctgtttaggaccgccacgcgtccggaaatacgaattcgttgtgcattgtctttgctctggcactagatcggattaaattaaatcatgcgaagcttggcaacagagtgaacggtggccaacacgacaatcatgaagagttgtcatagatcataatgacttgtaacctcattcttcataaaactacactatccgatacattaaggctagtgaaaagtcatacagctctatcagtgaaagtccaatcttccttgtgttgaaaagggggtatcgttagaagaaaggttttctgtttcgtccattttttgtctctgtcatcatcggtaaacgtattaaatgcaaagccaggcctttcatgcaatgtcattgtcttgtttcttttttcgtaacggcatcaaaatcattacttctcccccccagctgcgttgccaacgaattcggcaatggcctcaaagtagcctgcttctaacacgctggagttgtggtcaccgccaggcaggggtttccaaatcttcgtgggcgctgtagtgagctcgaatagccgtcgcatgtgggagggtctataaaatagggcgtattgttagtgaaacttgta

SEQ ID NO: 27779 - DNA, 1257 bp, Muscodor strobelii
  misc_feature: SGI cDNA ID NO. 569522
  misc_feature: Encodes the peptide sequence at SEQ ID NO 27780
atgttgttgagacgtatcaaccgcgccgtgcgacggcttccactttggctcattctctctgtcgcaacagctttcgccctcgaagcctttttgcataattggcgatataatccaccacggcctcgagtcgaccttgaccaacctttcttcacatcatgccaagagcctaatgtcgatggcaagcgcgagaatgctgttctgattatgctggcgcggaacaaagaactgcagaaggccaagaaatcagttcgatccattgagttgcatttcaatcaatggttcaactacccgtatcttttcctcaacgatgagccctgggacgagaaattcatcactcagatgaataacacggccaatgggaaagccacttttgaggttattcctaaagatcagtggacctatccagattggatggatcaagaccgagctaagaagagtataaaagcgcagggcgaggcacacatacctcatgctggtgaagaagggtaccaccacatgtgtcggttctactcagggaagttttatcaactcgatgcattaaagcaatataaatggtactggcggttagagccagacgtagaattcacttgcgccatcacatacgatcccttcgtgcagatggctaagcaccgcaaggtatacggctataccattgccctgtgggaagtcgggcgatcctgcccgtccctatttcgtaccacagacgactataagaaaatgatgaggttgccagaacttggaggatggcgcgctatgttagaggcgtcgtgggcaccgtggccctttcgtcgctttctcggctggtttgcgcatcgcgacgcatctggtgatgtttggagcatgtgtcacttctggagtaatttcgaaattgccgatttggacttcttccgctcgtcacgatatcagacgtattttgagtacttggatgcgcagggcggtttttattctgaacgctggggtgatgcggccgtccattcattagcggtgggtatgctagcggatccagcgcagattcatcattttgaagacttcggttatcgacatgccaatttctggcagtgtcctggtaacgcgccgaatggacagcttccggagtcaactctacttaacgagaaaaagagaaagtactcagacgaaatggaaggtgggattggctgtcggtgcgaatgcaatgggaagagaaatcgcaatcattcgccctattgccttaataagctcaagcgaccggtcactgctaagaagggttggttttcgtaa

SEQ ID NO: 27780 - protein, 418 aa, Muscodor strobelii
  misc_feature: SGI Peptide ID NO. 569522
  misc_feature (2)..(351): Pfam Id: PF01793 Pfam Desc: Glycolipid 2-alpha-mannosyltransferase
  misc_feature (61)..(234): Pfam Id: PF01793 Pfam Desc: Glycolipid 2-alpha-mannosyltransferase
  misc_feature (280)..(351): Pfam Id: PF01793 Pfam Desc: Glycolipid 2-alpha-mannosyltransferase
  misc_feature (3)..(414): NCBI GI: 85086217 Blast Desc: NCU04037 [Neurospora crassa OR74A] gi|28918746|gb|EAA28416.1| conserved [Neurospora crassa OR74A] gi|39979228|emb|CAE85598.1| related to alpha-1, [Neurospora
  misc_feature (28)..(406): NCBI GI: 171682212 Blast Desc: protein product [Podospora anserina] gi|170941065|emb|CAP66715.1| protein product [Podospora anserina]
  misc_feature (21)..(418): NCBI GI: 145614612 Blast Desc: MGG_04514 [Magnaporthe grisea 70-15] gi|145021513|gb|EDK05642.1| MGG_04514 [Magnaporthe grisea 70-15]
  misc_feature (3)..(397): NCBI GI: 164425706 Blast Desc: NCU06166 [Neurospora crassa OR74A] gi|157071030|gb|EAA30792.2| conserved [Neurospora crassa OR74A]
  misc_feature (4)..(411): NCBI GI: 171689716 Blast Desc: protein product [Podospora anserina] gi|170944820|emb|CAP70932.1| protein product [Podospora anserina]
  misc_feature (62)..(416): NCBI GI: 116205273 Blast Desc: CHGG_10520 [Chaetomium globosum CBS 148.51] gi|88176648|gb|EAQ84116.1| CHGG_10520 [Chaetomium globosum CBS 148.51]
  misc_feature (46)..(391): NCBI GI: 116191317 Blast Desc: CHGG_05376 [Chaetomium globosum CBS 148.51] gi|88181289|gb|EAQ88757.1| CHGG_05376 [Chaetomium globosum CBS 148.51]
  misc_feature (46)..(391): NCBI GI: 171681088 Blast Desc: protein product [Podospora anserina] gi|170940502|emb|CAP65730.1| protein product [Podospora anserina]
  misc_feature (46)..(391): NCBI GI: 226284841 Blast Desc: alpha-1,2 mannosyltransferase KTR1 [Paracoccidioides brasiliensis Pb01]
  misc_feature (46)..(391): NCBI GI: 225684460 Blast Desc: alpha-1,2-mannosyltransferase (Kre5) [Paracoccidioides brasiliensis Pb03]
  misc_feature (39)..(415): SWISSPROT Homolog: EC 2.4.1.131 Glycolipid 2-alpha-mannosyltransferase
MLLRRINRAVRRLPLWLILSVATAFALEAFLHNWRYNPPRPRVDLDQPFFTSCQEPNVDGKRENAVLIMLARNKELQKAKKSVRSIELHFNQWFNYPYLFLNDEPWDEKFITQMNNTANGKATFEVIPKDQWTYPDWMDQDRAKKSIKAQGEAHIPHAGEEGYHHMCRFYSGKFYQLDALKQYKWYWRLEPDVEFTCAITYDPFVQMAKHRKVYGYTIALWEVGRSCPSLFRTTDDYKKMMRLPELGGWRAMLEASWAPWPFRRFLGWFAHRDASGDVWSMCHFWSNFEIADLDFFRSSRYQTYFEYLDAQGGFYSERWGDAAVHSLAVGMLADPAQIHHFEDFGYRHANFWQCPGNAPNGQLPESTLLNEKKRKYSDEMEGGIGCRCECNGKRNRNHSPYCLNKLKRPVTAKKGWFS

SEQ ID NO: 27781 - DNA, 3481 bp, Muscodor strobelii
  misc_feature: SGI EST ID NO. CUFF.65732.1
  misc_feature: Variant of the nucleotide sequence at SEQ ID NO 27779
caagacttcttttaacgttcagtctgcgatggttcttaggctgagaaatttggcttctaagttatcatcgtgtgtaaggtttccatgttcttttcggaaatagtaggcagtcacaagcgagactattcgtcgtggatagcactcttcatttctcataataatctaagtcgtgccaactataatacgtgaccaagaccaagtgccaaatgtcgaacatcagatcgtaaaaaacatattgcagctctcacaagacctctagttctttgctgcctcaagcttgcccacgacgaggtacttgccgtagaacctctcttcccagccttgcaaagcttccattgcctcgtcatctagcccctcgagcgtatccagaggaccatcgagatccttggtcaacatctcctcatcgaagctgtggcaggcaagaccacggctagcatcgcgaccagcgaagttctcgtaagggccgccgggcccgtagaagttgcggccacttgtgacatcaaacacacgaccacgcacggccatgtagacgggcatgccctccttgccgttgtatggcagaagcgagcgtgggttgaatgtgcggaagacgacggctggaggctcgcgagggagagtggctggcggagaaggcttgtagagggcgtaggtggtgtacagagtaatagcgagtaggatgatgttcaacggtgttacgaagccagtgctgtggatagcaagtcagtgtattatttccagcgcagtgacgacaggagcaattacctagctgcgtctttcatggcctcttgggcaacgcggtcctgaacatagtccatcctgagaagtaggttgatggatcaaatgatacggtacagttttcagaatccagcgtctgttaagggattgagttgaggttctgcaaactataagatatctcttgtcttcggtggtcttcgatagtgagattacaactatccctcttccgcggggcccggtcagttggacgtgggggcggtttggcgggcgactccatttcatggtctgagcaccggtcaccaaatcccaaccgtcaatccgccaagctgccaacggtatgccctgcgtcaaattacgtcaccctatgattcttgtgtatttagcctcatcagattatgtgtttagtcattcagagtttgtctaactatatctacagtggttcagtagttcgcataagatgaacagatatgaatgaagcagcaatgaagcagcagagtgttcccgagtcgctgcgcactctaaaagctgaaacaaattgtgaactcagacgactcaattgccgctagctttatggggtaaaatgctgcctgaaacgggcacactcaagatcgtctttgagagacggcgcgacaagatcaacgcttttcgcaatttcttatctcgagagtaacatcgtgaaccaatcaacggtttatttctgcgatatatattgtggtattgatacccatatcatcgcgtcgcgacccttacattacacgatgcttcaattttgattgattgcttccatgaagagccgtgtttgctttggcttcgtgaatacacacccgtcaccgtggaaccccaagtcgcaatcacgcaggtacatatttgttcctgaaactaggcgttctctggtgtaccacgaaactagcttggagttcgactttcgagatatcgagtatacttgtgcctgaaccatgatgaaccacagtcttggcacttcaataatcatcttccaaaaatgttgttgagacgtatcaaccgcgccgtgcgacggcttccactttggctcattctctctgtcgcaacagctttcgccctcgaagcctttttgcataattggcgatataatccaccacggcctcgagtcgaccttgaccaacctttcttcacatcatgccaagagcctaatgtcgatggcaagcgcgagaatgctgttctgattatgctggcgcggaacaaagaactgcagaaggccaagaaatcagttcgatccattgagttgcatttcaatcaatggttcaactacccgtatcttttcctcaacgatgagccctgggacgagaaattcatcactcagatgaataacacggccaatgggaaagccacttttgaggttattcctaaagatcagtggacctatccagattggatggatcaagaccgagctaagaagagtataaaagcgcagggcgaggcacacatacctcatgctggtgaagaagggtaccaccacatgtgtcggttctactcagggaagttttatcaactcgatgcattaaagcaatataaatggtactggcggttagagccagacgtagaattcacttgcgccatcacatacgatcccttcgtgcagatggctaagcaccgcaaggtatacggctataccattgccctgtgggaagtcgggcgatcctgcccgtccctatttcgtaccacagacgactataagaaaatgatgaggttgccagaacttggaggatggcgcgctatgttagaggcgtcgtgggcaccgtggccctttcgtcgctttctcggctggtttgcgcatcgcgacgcatctggtgatgtttggagcatgtgtcacttctggagtaatttcgaaattgccgatttggacttcttccgctcgtcacgatatcagacgtattttgagtacttggatgcgcagggcggtttttattctgaacgctggggtgatgcggccgtccattcattagcggtgggtatgctagcggatccagcgcagattcatcattttgaagacttcggttatcgacatgccaatttctggcagtgtcctggtaacgcgccgaatggacagcttccggagtcaactctacttaacgagaaaaagagaaagtactcagacgaaatggaaggtgggattggctgtcggtgcgaatgcaatgggaagagaaatcgcaatcattcgccctattgccttaataagctcaagcgaccggtcactgctaagaagggttggttttcgtaaagaggggatcaatcagcaaaaaatacatgggtttcataagacgaactcttcgtctaggctgcttcgagcaacggctttgaacctcaacaaaggcacctcacccactgcaggctcgtttacttcagcgatacggatacccaagcagaagataatctgttgatctctagagcaacaagcctttcatacaaattttgattgtataggacagtcaagagaagattcgattcagaggaatgtttcacatgcatcatagtacaaagacatattgtggaacagcatttgatatatgatggaaaggacaagcatgaaagatacccaataacaatgatgagaagaggcgtgaagggcattaagagcatcattttcaccgcacacttatcaagatcaattgaaagaatacctatcatgccctgtcgcagcaggattcagtctttgatgtgctagttgacgatatcagtagtggacaaatagaaaaagtaaatataatgc

SEQ ID NO: 27782 - DNA, 504 bp, Muscodor strobelii
  misc_feature: SGI cDNA ID NO. 569523
  misc_feature: Encodes the peptide sequence at SEQ ID NO 27783
atggactatgttcaggaccgcgttgcccaagaggccatgaaagacgcagctagcactggcttcgtaacaccgttgaacatcatcctactcgctattactctgtacaccacctacgccctctacaagccttctccgccagccactctccctcgcgagcctccagccgtcgtcttccgcacattcaacccacgctcgcttctgccatacaacggcaaggagggcatgcccgtctacatggccgtgcgtggtcgtgtgtttgatgtcacaagtggccgcaacttctacgggcccggcggcccttacgagaacttcgctggtcgcgatgctagccgtggtcttgcctgccacagcttcgatgaggagatgttgaccaaggatctcgatggtcctctggatacgctcgaggggctagatgacgaggcaatggaagctttgcaaggctgggaagagaggttctacggcaagtacctcgtcgtgggcaagcttgaggcagcaaagaactag

SEQ ID NO: 27783 - protein, 167 aa, Muscodor strobelii
  misc_feature: SGI Peptide ID NO. 569523
  misc_feature (60)..(163): Pfam Id: PF00173 Pfam Desc: Cytochrome b5-like Heme/Steroid binding domain
  misc_feature (1)..(164): NCBI GI: 261357704 Blast Desc: membrane-associated progesterone receptor component 1 [Verticillium albo-atrum VaMs.102]
  misc_feature (1)..(164): NCBI GI: 170940177 Blast Desc: protein product [Podospora anserina]
  misc_feature (1)..(164): NCBI GI: 85068249 Blast Desc: NCU07286 [Neurospora crassa OR74A] gi|28923737|gb|EAA32904.1| NCU07286 [Neurospora crassa OR74A]
  misc_feature (1)..(167): NCBI GI: 46111753 Blast Desc: FG02758.1 [Gibberella zeae PH-1]
  misc_feature (1)..(162): NCBI GI: 256721995 Blast Desc: NECHADRAFT_94182 [Nectria haematococca mpVI 77-13-4]
  misc_feature (16)..(162): NCBI GI: 189205332 Blast Desc: membrane-associated progesterone receptor component 1 [Pyrenophora tritici-repentis Pt-1C-BFP] gi|187986100|gb|EDU51588.1| membrane-associated progesterone 1
  misc_feature (23)..(164): NCBI GI: 242782518 Blast Desc: DNA damage response protein (Dap1), [Talaromyces stipitatus ATCC 10500] gi|218720163|gb|EED19582.1| DNA damage response protein (Dap1), [Talaromyces stipitatus ATCC 10500]
  misc_feature (1)..(165): NCBI GI: 116195698 Blast Desc: CHGG_04447 [Chaetomium globosum CBS 148.51] gi|88180360|gb|EAQ87828.1| CHGG_04447 [Chaetomium globosum CBS 148.51]
  misc_feature (21)..(164): NCBI GI: 145252482 Blast Desc: An16g04430 [Aspergillus niger] gi|134083305|emb|CAK46860.1| protein product [Aspergillus niger]
  misc_feature (23)..(164): NCBI GI: 212527078 Blast Desc: DNA damage response protein (Dap1), [Penicillium marneffei ATCC 18224] gi|210073094|gb|EEA27181.1| DNA damage response protein (Dap1), [Penicillium marneffei ATCC 18224]
MDYVQDRVAQEAMKDAASTGFVTPLNIILLAITLYTTYALYKPSPPATLPREPPAVVFRTFNPRSLLPYNGKEGMPVYMAVRGRVFDVTSGRNFYGPGGPYENFAGRDASRGLACHSFDEEMLTKDLDGPLDTLEGLDDEAMEALQGWEERFYGKYLVVGKLEAAKN

SEQ ID NO: 27784 - DNA, 961 bp, Muscodor strobelii
  misc_feature: SGI EST ID NO. CUFF.65731.2
  misc_feature: Variant of the nucleotide sequence at SEQ ID NO 27782
atgaaatggagtcgcccgccaaaccgcccccacgtccaactgaccgggccccgcggaagagggatagttgtaatctcactatcgaagaccaccgaagacaagagatatcttatagtttgcagaacctcaactcaatcccttaacagacgctggattctgaaaactgtaccgtatcatttgatccatcaacctacttctcaggatggactatgttcaggaccgcgttgcccaagaggccatgaaagacgcagctagcactggcttcgtaacaccgttgaacatcatcctactcgctattactctgtacaccacctacgccctctacaagccttctccgccagccactctccctcgcgagcctccagccgtcgtcttccgcacattcaacccacgctcgcttctgccatacaacggcaaggagggcatgcccgtctacatggccgtgcgtggtcgtgtgtttgatgtcacaagtggccgcaacttctacgggcccggcggcccttacgagaacttcgctggtcgcgatgctagccgtggtcttgcctgccacagcttcgatgaggagatgttgaccaaggatctcgatggtcctctggatacgctcgaggggctagatgacgaggcaatggaagctttgcaaggctgggaagagaggttctacggcaagtacctcgtcgtgggcaagcttgaggcagcaaagaactagaggtcttgtgagagctgcaatatgttttttacgatctgatgttcgacatttggcacttggtcttggtcacgtattatagttggcacgacttagattattatgagaaatgaagagtgctatccacgacgaatagtctcgcttgtgactgcctactatttccgaaaagaacatggaaaccttacacacgatgataacttagaagccaaatttctcagcctaagaaccatcgcagactgaacgttaaaagaagtcttg

SEQ ID NO: 27785 - DNA, 1074 bp, Muscodor strobelii
  misc_feature: SGI cDNA ID NO. 569524
  misc_feature: Encodes the peptide sequence at SEQ ID NO 27786
atgacgacctcgttctcttctttgcctattgtcgatctaagcgctctccgagatgagacacctctttcatctccggagcagcagcgcctgagcaagcaactctatgatgtcttcgccacgactggctttgcctatctcgttaatgcaccactcaattttagtcatgacgaagtatttgggctcgccaagcagttcttcagtcttccgctggaagaaaagatgaccctggccaagaagacattcgattctcagaacaagaacacttaccgaggatacttccctgcacagcccttagccgcttctgacaacctcaaagaagggtttgagattggtcaatctggaccctcatcagtcgtctcagaaggccctcggtcttccaagttcaacatgtcagaaccaaacgtatggccgcatggctcggaggtggaatccttccgccctcgcatggaacagctgtatggagagctccagtctcttgcttcccagctattaagactgctagccatttctctgggcaaagaggcagacttctttgcaccttatctcaaagacagtctctccactctccgtcttctgcactatcctccggcagctgaaatctccaacggttccatgacttcccttgattcaggtgtcttcacatcgcccgaagagaccatggtcaaattgagctgtacaccccacaccgatagcggtattctcacgcttctgcatcaggacagtaccggcggtctcgaagtgctgaacgctgctaagcagtgggttcccgctccgtacctcccaggatctatcgttgtcaacatcggcgatttgatggctcaagtaagcggaggtgttttctgcgcgactatgcacagagttcgtgcgcctccggagagcaggaccaaggacggagagggtactgggtttggaagattcagcgttcccttcttcttcgagccgggagagcacactattgtcagagcagttgacgagacggaggaagctgaaggcattgtctatggtgatcacgtgcgaagcaagatggctacttgggtggagttccaggatctcagtgattatgagagtgactga

SEQ ID NO: 27786 - protein, 357 aa, Muscodor strobelii
  misc_feature: SGI Peptide ID NO. 569524
  misc_feature (185)..(314): Pfam Id: PF03171 Pfam Desc: 2OG-Fe(II) oxygenase superfamily
  misc_feature (1)..(351): NCBI GI: 226292680 Blast Desc: 2OG-Fe(II) oxygenase [Paracoccidioides brasiliensis Pb18]
  misc_feature (1)..(351): NCBI GI: 226282160 Blast Desc: oxidoreductase [Paracoccidioides brasiliensis Pb01]
  misc_feature (1)..(349): NCBI GI: 242812159 Blast Desc: gibberellin 20-oxidase, [Talaromyces stipitatus ATCC 10500] gi|218714240|gb|EED13663.1| gibberellin 20-oxidase, [Talaromyces stipitatus ATCC 10500]
  misc_feature (1)..(349): NCBI GI: 212544330 Blast Desc: isopenicillin N synthetase, [Penicillium marneffei ATCC 18224] gi|210065288|gb|EEA19382.1| isopenicillin N synthetase, [Penicillium marneffei ATCC 18224]
  misc_feature (1)..(351): NCBI GI: 225562469 Blast Desc: 2OG-Fe(II) oxygenase [Ajellomyces capsulatus G186AR]
  misc_feature (1)..(351): NCBI GI: 225680969 Blast Desc: iron/ascorbate oxidoreductase family protein [Paracoccidioides brasiliensis Pb03]
  misc_feature (24)..(350): NCBI GI: 115433286 Blast Desc: conserved [Aspergillus terreus NIH2624] gi|114189632|gb|EAU31332.1| conserved [Aspergillus terreus NIH2624]
  misc_feature (1)..(351): NCBI GI: 261205050 Blast Desc: 2OG-Fe(II) oxygenase [Ajellomyces dermatitidis SLH14081] gi|239592321|gb|EEQ74902.1| 2OG-Fe(II) oxygenase [Ajellomyces dermatitidis SLH14081]
  misc_feature (1)..(351): NCBI GI: 239611525 Blast Desc: 2OG-Fe(II) oxygenase [Ajellomyces dermatitidis ER-3]
  misc_feature (183)..(351): NCBI GI: 154279332 Blast Desc: [Ajellomyces capsulatus NAm1] gi|150412422|gb|EDN07809.1| [Ajellomyces capsulatus NAm1]
  misc_feature (2)..(346): SWISSPROT Homolog: EC 1.21.3.1 Isopenicillin-N synthase
MTTSFSSLPIVDLSALRDETPLSSPEQQRLSKQLYDVFATTGFAYLVNAPLNFSHDEVFGLAKQFFSLPLEEKMTLAKKTFDSQNKNTYRGYFPAQPLAASDNLKEGFEIGQSGPSSVVSEGPRSSKFNMSEPNVWPHGSEVESFRPRMEQLYGELQSLASQLLRLLAISLGKEADFFAPYLKDSLSTLRLLHYPPAAEISNGSMTSLDSGVFTSPEETMVKLSCTPHTDSGILTLLHQDSTGGLEVLNAAKQWVPAPYLPGSIVVNIGDLMAQVSGGVFCATMHRVRAPPESRTKDGEGTGFGRFSVPFFFEPGEHTIVRAVDETEEAEGIVYGDHVRSKMATWVEFQDLSDYESD

SEQ ID NO: 27787 - DNA, 924 bp, Muscodor strobelii
  misc_feature: SGI cDNA ID NO. 569525
  misc_feature: Elevated expression when VOC is produced
  misc_feature: Encodes the peptide sequence at SEQ ID NO 27788
atggatttctctaagcttcctacgaacttcttctcctctatgtttcagtacacgaagcatgagcacagcgatcagtaccctgcaattgatccaacgcggaaggagttgagtctcgctggtaaagtagtgattatcacaggcgcgagtcggggccttggagctaaggcttttgccccggctttcgccaaagctggcgtacgaggactagcactgcttgcgaccaatgctgacggtctcgcaagcacccaggagctagtcaaaagcatcaactccgaggttgagatattgacagtccctaccgatgtatctgattcagcctctgtagcgtctgcgttcttgaagatcaaagatgctttcggtcaggctgacatattgattaacaacgctggcgttaattgtgatggcgaaggtgtgcgcctcggcgattctgatccagttctatattggaagaacttcgagatcaacgccaaaggcacatttctcatgacgcatgctttcattaaccagctactgtcagccgatacaccggcaacagtcatcaacctaacaactggagctgtctggaaaggaaacccaatgatgccgggctacagcgtctcaaagcttgtggctcaacagcaaatcacatcaatcgccgcggtgtacccgaatatcacagccgtggcattgcatcccggtcttcagttcacagatatgttgcctgaatggatgaagcggttcgacagagacactcctgagctggctggggggactgcggtctggttgtcgcatcctcatgctcgttttttgagtggaagggcaatctcttgtaattggtctgtggacgacttgctcgctcgggaggctgagatcaaggcctcaaacgacttgacgatggactttgtgggaagcttcggccctgcacagttcgcccaagcctcatag

SEQ ID NO: 27788 - protein, 307 aa, Muscodor strobelii
  misc_feature: SGI Peptide ID NO. 569525
  misc_feature (41)..(216): Pfam Id: PF00106 Pfam Desc: short chain dehydrogenase
  misc_feature (41)..(201): Pfam Id: PF00106 Pfam Desc: short chain dehydrogenase
  misc_feature (3)..(303): NCBI GI: 116192655 Blast Desc: CHGG_06045 [Chaetomium globosum CBS 148.51] gi|88181958|gb|EAQ89426.1| CHGG_06045 [Chaetomium globosum CBS 148.51]
  misc_feature (6)..(305): NCBI GI: 189209688 Blast Desc: conserved [Pyrenophora tritici-repentis Pt-1C-BFP] gi|187977269|gb|EDU43895.1| conserved [Pyrenophora tritici-repentis Pt-1C-BFP]
  misc_feature (3)..(303): NCBI GI: 212542753 Blast Desc: 3-oxoacyl-[acyl-carrier-protein] reductase, [Penicillium marneffei ATCC 18224] gi|210066438|gb|EEA20531.1| 3-oxoacyl-[acyl-carrier-protein] reductase, [Penicillium ATCC
  misc_feature (1)..(299): NCBI GI: 115492681 Blast Desc: [Aspergillus terreus NIH2624] gi|114197828|gb|EAU39528.1| [Aspergillus terreus NIH2624]
  misc_feature (1)..(299): NCBI GI: 238494914 Blast Desc: oxidoreductase, short chain dehydrogenase/reductase family, [Aspergillus flavus NRRL3357] gi|220695343|gb|EED51686.1| oxidoreductase, short chain dehydrogenase/reductase family,
  misc_feature (2)..(299): NCBI GI: 189205034 Blast Desc: conserved [Pyrenophora tritici-repentis Pt-1C-BFP] gi|187985951|gb|EDU51439.1| conserved [Pyrenophora tritici-repentis Pt-1C-BFP]
  misc_feature (1)..(292): NCBI GI: 238502247 Blast Desc: short-chain dehydrogenase, [Aspergillus flavus NRRL3357] gi|220691167|gb|EED47515.1| short-chain dehydrogenase, [Aspergillus flavus NRRL3357]
  misc_feature (1)..(298): NCBI GI: 170111681 Blast Desc: [Laccaria bicolor S238N-H82] gi|164638087|gb|EDR02367.1| [Laccaria bicolor S238N-H82]
  misc_feature (1)..(292): NCBI GI: 145235005 Blast Desc: An03g02550 [Aspergillus niger] gi|134057827|emb|CAK38222.1| protein product [Aspergillus niger]
  misc_feature (1)..(295): NCBI GI: 169614163 Blast Desc: SNOG_10217 [Phaeosphaeria nodorum SN15] gi|111061432|gb|EAT82552.1| SNOG_10217 [Phaeosphaeria nodorum SN15]
  misc_feature (41)..(271): SWISSPROT Homolog: EC 1.1.1.100 3-oxoacyl-[acyl-carrier-protein] reductase
  misc_feature: Useful for introducing or modulating the production of volatile compounds
MDFSKLPTNFFSSMFQYTKHEHSDQYPAIDPTRKELSLAGKVVIITGASRGLGAKAFAPAFAKAGVRGLALLATNADGLASTQELVKSINSEVEILTVPTDVSDSASVASAFLKIKDAFGQADILINNAGVNCDGEGVRLGDSDPVLYWKNFEINAKGTFLMTHAFINQLLSADTPATVINLTTGAVWKGNPMMPGYSVSKLVAQQQITSIAAVYPNITAVALHPGLQFTDMLPEWMKRFDRDTPELAGGTAVWLSHPHARFLSGRAISCNWSVDDLLAREAEIKASNDLTMDFVGSFGPAQFAQAS

SEQ ID NO: 27789 - DNA, 1546 bp, Muscodor strobelii
  misc_feature: SGI EST ID NO. CUFF.65532.0
  misc_feature: Variant of the nucleotide sequence at SEQ ID NO 27787
ggacaattccaagtgcgagatgtcagctctgtccgtgactaattctctctgcttccccttgttggccgagatatgtttgaaacgggcaaggatcacttttcttaggatgatggttcggacttgatgatcatcctttgcgattgatggcgtccgaatatcataatcataagcggtgtggaggggcggccttgaacctatataaatttgactgatgagctctctttgttttcaaacccaggagtgagaagcaggacgaccatcgacatctaccgtttgtttaagtaagataactgacgttgcgagattacacctaacattcatctgctctcttattgcacttaggctcaatggatttctctaagcttcctacgaacttcttctcctctatgtttcagtacacgaagcatgagcacagcgatcagtaccctgcaattgatccaacgcggaaggagttgagtctcgctggtaaagtagtgattatcacaggcgcgagtcggggccttggagctaaggcttttgccccggctttcgccaaagctggcgtacgaggactagcactgcttgcgaccaatgctgacggtctcgcaagcacccaggagctagtcaaaagcatcaactccgaggttgagatattgacagtccctaccgatgtatctgattcagcctctgtagcgtctgcgttcttgaagatcaaagatgctttcggtcaggctgacatattgattaacaacgctggcgttaattgtgatggcgaaggtgtgcgcctcggcgattctgatccagttctatattggaagaacttcgagatcaacgccaaaggcacatttctcatgacgcatgctttcattaaccagctactgtcagccgatacaccggcaacagtcatcaacctaacaactggagctgtctggaaaggaaacccaatgatgccgggctacagcgtctcaaagcttgtggctcaacagcaaatcacatcaatcgccgcggtgtacccgaatatcacagccgtggcattgcatcccggtcttcagttcacagatatgttgcctgaatggatgaagcggttcgacagagacactcctgagctggctggggggactgcggtctggttgtcgcatcctcatgctcgttttttgagtggaagggcaatctcttgtaattggtctgtggacgacttgctcgctcgggaggctgagatcaaggcctcaaacgacttgacgatggactttgtgggaagcttcggccctgcacagttcgcccaagcctcatagctctgaggcgagtataatggttgaaagggcatctgcatgaatccacggtcttagtatttcaagatagggctatggatggcaatgatacatatatgctcgaggagagatcagggctccaaatgtgcagcatgatgcatatcttctatgcgagtagcgcaattagacaccgaggcttatgaggttgagcatgtttattcaatcccctctaattgcccattccaaagatgaatctaggcttcaaaaattgaggatagtgttttacatcaggacacgac

SEQ ID NO: 27790 - DNA, 750 bp, Muscodor strobelii
  misc_feature: SGI cDNA ID NO. 569526
  misc_feature: Encodes the peptide sequence at SEQ ID NO 27791
atggacatgatagaagagcaaaagaaggccgatttctctgacgatcaagctgcgtatgccgttgcatcatggctagaagctggatctgatacaacaagctcgacattgtatgggtttgtatgtgcgatgctactcttccccgaggttcaagcaaaggcacagaaagagcttgacgaagtgattggatctggacgcatgccggacttagatgatgaattctctctgccctacattcgagcctgtgtcaaagaaagcttccgctggatgcctgtggcgtcactcggcgctgcaccacacgccacaaccagggaagatctctatatgggatatcgcatgggcgctggtattgtacagaacatctataccatgcatatggacccaaagagatatgagaacccgagacaatttaacccagatcgtttcgcgggagacttgcagtcggcagcggaagcgtctctgaatccggatccgagtctgcgcgaccattacggatttggggctggcagaaggatatgtctgggcatgttcatagctgaaaggtccctctttctcggaatttccaggcttctgtgggcgttcgacttcaaatgccccaaggatagccagggcaatgacattattcctgacggggaaacgttgattgagggcttagcagtccatccttatcctttcgatgccgatatcaagataagaagtccagacaaagcaaggatcatcgatgagcagtatgggaaacaagatccactgtga

SEQ ID NO: 27791 - protein, 249 aa, Muscodor strobelii
  misc_feature: SGI Peptide ID NO. 569526
  misc_feature (1)..(222): Pfam Id: PF00067 Pfam Desc: Cytochrome P450
  misc_feature (3)..(243): NCBI GI: 259484285 Blast Desc: TPA: cytochrome P450, (Eurofung) [Aspergillus nidulans FGSC A4]
  misc_feature (3)..(243): NCBI GI: 46139749 Blast Desc: FG11389.1 [Gibberella zeae PH-1]
  misc_feature (3)..(243): NCBI GI: 240111106 Blast Desc: Cytochrome P450 family protein [Coccidioides posadasii C735 delta SOWgp]
  misc_feature (3)..(243): NCBI GI: 119189783 Blast Desc: CIMG_04939 [Coccidioides immitis RS]
  misc_feature (2)..(245): NCBI GI: 171694638 Blast Desc: protein product [Podospora anserina] gi|170947561|emb|CAP59722.1| protein product [Podospora anserina]
  misc_feature (3)..(243): NCBI GI: 70983203 Blast Desc: cytochrome P450 [Aspergillus fumigatus Af293] gi|66844754|gb|EAL85091.1| cytochrome P450, [Aspergillus fumigatus Af293] gi|159124013|gb|EDP49132.1| cytochrome P450,
  misc_feature (3)..(243): NCBI GI: 255944711 Blast Desc: Pc20g05940 [Penicillium chrysogenum Wisconsin 54-1255] gi|211587858|emb|CAP85923.1| Pc20g05940 [Penicillium chrysogenum Wisconsin 54-1255]
  misc_feature (3)..(243): NCBI GI: 212530062 Blast Desc: cytochrome P450, [Penicillium marneffei ATCC 18224] gi|210074586|gb|EEA28673.1| cytochrome P450, [Penicillium marneffei ATCC 18224]
  misc_feature (3)..(243): NCBI GI: 119483586 Blast Desc: Cytochrome P450 oxidoreductase, [Neosartorya fischeri NRRL 181] gi|119409852|gb|EAW19799.1| Cytochrome P450 oxidoreductase, [Neosartorya fischeri NRRL 181]
  misc_feature (3)..(243): NCBI GI: 258565803 Blast Desc: conserved [Uncinocarpus reesii 1704] gi|237907347|gb|EEP81748.1| conserved [Uncinocarpus reesii 1704]
  misc_feature (4)..(231): SWISSPROT Homolog: EC 1.14.14.1 Unspecific monooxygenase
MDMIEEQKKADFSDDQAAYAVASWLEAGSDTTSSTLYGFVCAMLLFPEVQAKAQKELDEVIGSGRMPDLDDEFSLPYIRACVKESFRWMPVASLGAAPHATTREDLYMGYRMGAGIVQNIYTMHMDPKRYENPRQFNPDRFAGDLQSAAEASLNPDPSLRDHYGFGAGRRICLGMFIAERSLFLGISRLLWAFDFKCPKDSQGNDIIPDGETLIEGLAVHPYPFDADIKIRSPDKARIIDEQYGKQDPL

SEQ ID NO: 27792 - DNA, 1971 bp, Muscodor strobelii
  misc_feature: SGI cDNA ID NO. 569527
  misc_feature: Encodes the peptide sequence at SEQ ID NO 27793
atggctgtaggctttgtacaagccatcccgtctaatccggacattagttctttgcctccggggcccctgttggagaagaaagacgctctcgccgtcactgtgaccagtttcgacgtcgacgttgaactgagacagacggacagttccccccaacatatcgaagatatggcaacagtcgagaacgactcggccccccagaatgaaggaccttctgcgcccatagaagaaaggagcccatttggtcttcaatcccgagatgaggctatctgcaaatcttccacgtcgaactgtccaccaccgaagactattgcagaacgcgcacaagccgcttccgctgttctgaacagataccgtattgagtacagaaatgagcatgagcgacctcagtctattgagaatgctcagatacaaatacaaacagctctgcagcaaaatcagcctatccagcttgtgattccggcctttccattcaaatctccgaatcgaacagagaaagtcctcggagcgttacctgatgaggcagaacgcttgtctctcttacacttacaggggctgtgccttgcaatccaagatgctgcagagtgcgaagcatacttgaccattatttctgatggcattacatacaatgacattctcggagtatcggatcaggaggtttggcggtacggccagtccctcagacaaatggcgatcgaaaatgattgcataaacatcagattttcacgaattgccgacttggtcggcacggagcatgcatcagaaattttagatgaagagacttaccttcaaaacgtctcgacctttcggtcactgcttgaagccaacgcgccagccgatttcgacgtcgtagatgctattgcaaatgaccccgatattttgcgcacctacaggggctatcgtaagttcctggagagtgacttgaagttctctgacggccgatctggttctccttcagggtcgccggtaagaggaaaaagatctaagtctcagatggagagatacatcggcgaagttgctaaggcaatgttgacacgaggcaaggcttttgctattactgtcgccactaagtttccaaacgctgtgagactctctatccacccatcgaatgacaccaacaaaatatctatcaccattgtcccccaagaaaacggagcggtggtcacgccatggcacggcgcacttgttagaggtgctgatggcagtgttaccatctcgcatgccatcaaagtgccagcacttactcatgacattgtctacgtagacggtcgcccaagctattttagggagagggcggatgtttttaactggccaaacatggatgtcacgttcgagtatctatatccttgtggcatcatcattagaccggccaactcatcttccaactaccccttgagcatggtcgatatgcagaaggtcaagacactgtcactgaccagctcgccggtcgtccttcgtgggttttccaacaccaaggaccagcgagcattcactgctaaagcttgggatctcggggcaatcgcaccgttcttcgggcatgatattgaggtcgtgaagaacgaagccaacaacgatcccaacagcaataacgtcagctctgcggagagtatgccaatgcactacgatggaatattcaaggtcaaatatgtcaaagatgaagcgacaggcgaagaaaagaggataatagacgctccacatttccagtattttgtttcgcaatccgcggctcaaaaaggagatggttacacgctgtttgcgtcatccgacctgtttgcacgatatctcccccggaagtacccaatcgagaagcttgagaaatataagtggacttgtgacacgttcggatacttccgaaaaacattagaagatatcgagctcatagtcagacatccagaaagagggacgtcttgcttaagatggcgtaagtactcttcgtttcggctgaaacccgtggcacggcccggaaacgtctag

SEQ ID NO: 27793 - protein, 656 aa, Muscodor strobelii
  misc_feature: SGI Peptide ID NO. 569527
  misc_feature (137)..(422): Pfam Id: PF05141 Pfam Desc: Pyoverdine/dityrosine biosynthesis protein
  misc_feature (137)..(229): Pfam Id: PF05141 Pfam Desc: Pyoverdine/dityrosine biosynthesis protein
  misc_feature (285)..(422): Pfam Id: PF05141 Pfam Desc: Pyoverdine/dityrosine biosynthesis protein
  misc_feature (105)..(641): NCBI GI: 67524297 Blast Desc: AN2606.2 [Aspergillus nidulans FGSC A4] gi|40745555|gb|EAA64711.1| AN2606.2 [Aspergillus nidulans FGSC A4] gi|259488043|tpe|CBF87187.1| TPA: pyoverdine/dityrosine FGSC
  misc_feature (113)..(641): NCBI GI: 255955579 Blast Desc: Pc21g15320 [Penicillium chrysogenum Wisconsin 54-1255] gi|211590253|emb|CAP96429.1| Pc21g15320 [Penicillium chrysogenum Wisconsin 54-1255]
  misc_feature (94)..(641): NCBI GI: 119499011 Blast Desc: pyoverdine/dityrosine biosynthesis protein, [Neosartorya fischeri NRRL 181] gi|119414427|gb|EAW24366.1| pyoverdine/dityrosine biosynthesis protein, [Neosartorya fischeri
  misc_feature (22)..(641): NCBI GI: 146323994 Blast Desc: pyoverdine/dityrosine biosynthesis protein [Aspergillus fumigatus Af293] gi|129556376|gb|EAL86038.2| pyoverdine/dityrosine biosynthesis protein, [Aspergillus Af293]
  misc_feature (22)..(641): NCBI GI: 159126002 Blast Desc: pyoverdine/dityrosine biosynthesis protein, [Aspergillus fumigatus A1163]
  misc_feature (107)..(641): NCBI GI: 121719017 Blast Desc: pyoverdine/dityrosine biosynthesis protein, [Aspergillus clavatus NRRL 1] gi|119404462|gb|EAW14838.1| pyoverdine/dityrosine biosynthesis protein, [Aspergillus clavatus
  misc_feature (137)..(641): NCBI GI: 119191566 Blast Desc: CIMG_00160 [Coccidioides immitis RS]
  misc_feature (137)..(641): NCBI GI: 240106421 Blast Desc: CPC735_059840 [Coccidioides posadasii C735 delta SOWgp]
  misc_feature (137)..(641): NCBI GI: 258578329 Blast Desc: conserved [Uncinocarpus reesii 1704] gi|237903612|gb|EEP78013.1| conserved [Uncinocarpus reesii 1704]
  misc_feature (104)..(641): NCBI GI: 238505850 Blast Desc: pyoverdine/dityrosine biosynthesis protein, [Aspergillus flavus NRRL3357] gi|220690241|gb|EED46591.1| pyoverdine/dityrosine biosynthesis protein, [Aspergillus flavus
MAVGFVQAIPSNPDISSLPPGPLLEKKDALAVTVTSFDVDVELRQTDSSPQHIEDMATVENDSAPQNEGPSAPIEERSPFGLQSRDEAICKSSTSNCPPPKTIAERAQAASAVLNRYRIEYRNEHERPQSIENAQIQIQTALQQNQPIQLVIPAFPFKSPNRTEKVLGALPDEAERLSLLHLQGLCLAIQDAAECEAYLTIISDGITYNDILGVSDQEVWRYGQSLRQMAIENDCINIRFSRIADLVGTEHASEILDEETYLQNVSTFRSLLEANAPADFDVVDAIANDPDILRTYRGYRKFLESDLKFSDGRSGSPSGSPVRGKRSKSQMERYIGEVAKAMLTRGKAFAITVATKFPNAVRLSIHPSNDTNKISITIVPQENGAVVTPWHGALVRGADGSVTISHAIKVPALTHDIVYVDGRPSYFRERADVFNWPNMDVTFEYLYPCGIIIRPANSSSNYPLSMVDMQKVKTLSLTSSPVVLRGFSNTKDQRAFTAKAWDLGAIAPFFGHDIEVVKNEANNDPNSNNVSSAESMPMHYDGIFKVKYVKDEATGEEKRIIDAPHFQYFVSQSAAQKGDGYTLFASSDLFARYLPRKYPIEKLEKYKWTCDTFGYFRKTLEDIELIVRHPERGTSCLRWRKYSSFRLKPVARPGNV

SEQ ID NO: 27794 - DNA, 1101 bp, Muscodor strobelii
  misc_feature: SGI cDNA ID NO. 569528
  misc_feature: Elevated expression when VOC is produced
  misc_feature: Encodes the peptide sequence at SEQ ID NO 27795
atgacaagcctacaattaagcttaatgtctggtaacggtcctgttactagacaagttctcctcagccctcttcgtgatgccagggaatcggagatacccataatcgatgtctccggtatcttcagcgagtacaaggaggatcgtatgaacgtcgctcgccaggttcgcgatgctgctacgaacaacggattcttctatattaaaaatcatggtatcgcctcggaaataccagaggctgcctgtgagaacctcttgacctttttccgccagccatcagaagtcaaagaaaaagctcatgtttctcaatctaaatacttcaacggatacaagccacctaagtcgcagcgtatcaacccatttgagtccgttgatgttagggaaacgttcagttggacgtacgatccgaaattcgaccctactatttccgatccaagcgttattccagagaatatcgcaaaatatctgaggtgcgaagactttcactgggatgctacctccaacctcccagacttcaaagaatctatagtacgatattggcgttcctgtttaggggtagctagggcattggtgcggtgtttcgcactgtcgcttgatttacctgagaacttcttcgacgaaaagttcacttacccagacgcggcgcttgcgctcaactactatccgcctcttcttcatcaacaacaacaacaaccgtcagcgtctcaagaagacacagaagtctcgattggctcccacacagacttccagctattcacgatactatggcaagataacaacggtggtctccaagtcctaaactctgagggccaatggctcaacgcgaagccgatccctggcactttcgttgtgaatattgccgactatcttcagcgtatcaccaacgatctatatgtcagcacagttcatcgtgcacaaaattttagtggcaaagagagaataagtatgcccttcttcttcggcttcaatcttaacgagtcttgtggcgttctcgacagctgtgtgaaagatggcgaggagaagaaatatgaggagataagctgcgaagaatgggtacaacgaagagcaagagcaatgcaccgagagggcgaaactaagatataa

SEQ ID NO: 27795 - protein, 366 aa, Muscodor strobelii
  misc_feature: SGI Peptide ID NO. 569528
  misc_feature (211)..(321): Pfam Id: PF03171 Pfam Desc: 2OG-Fe(II) oxygenase superfamily
  misc_feature (6)..(364): NCBI GI: 256723681 Blast Desc: NECHADRAFT_86761 [Nectria haematococca mpVI 77-13-4]
  misc_feature (6)..(359): NCBI GI: 85079414 Blast Desc: NCU05038 [Neurospora crassa OR74A] gi|28917406|gb|EAA27110.1| [Neurospora crassa OR74A]
  misc_feature (2)..(365): NCBI GI: 154302901 Blast Desc: BC1G_09194 [Botryotinia fuckeliana B05.10] gi|150855118|gb|EDN30310.1| BC1G_09194 [Botryotinia fuckeliana B05.10]
  misc_feature (5)..(365): NCBI GI: 156048226 Blast Desc: SS1G_08844 [Sclerotinia sclerotiorum 1980] gi|154693241|gb|EDN92979.1| SS1G_08844 [Sclerotinia sclerotiorum 1980]
  misc_feature (3)..(347): NCBI GI: 261357642 Blast Desc: flavonol synthase/flavanone 3-hydroxylase [Verticillium albo-atrum VaMs.102]
  misc_feature (3)..(349): NCBI GI: 145604869 Blast Desc: MGG_07958 [Magnaporthe grisea 70-15] gi|145012776|gb|EDJ97430.1| MGG_07958 [Magnaporthe grisea 70-15]
  misc_feature (5)..(359): NCBI GI: 255936767 Blast Desc: Pc13g09880 [Penicillium chrysogenum Wisconsin 54-1255] gi|211584030|emb|CAP92057.1| Pc13g09880 [Penicillium chrysogenum Wisconsin 54-1255]
  misc_feature (65)..(358): NCBI GI: 171680612 Blast Desc: protein product [Podospora anserina] gi|170939933|emb|CAP65159.1| protein product [Podospora anserina]
  misc_feature (5)..(354): NCBI GI: 145248559 Blast Desc: An13g03980 [Aspergillus niger] gi|134081284|emb|CAK41789.1| protein product [Aspergillus niger]
  misc_feature (6)..(356): NCBI GI: 46139851 Blast Desc: FG11440.1 [Gibberella zeae PH-1]
  misc_feature (29)..(337): SWISSPROT Homolog: EC 1.21.3.1 Isopenicillin-N synthase
  misc_feature: Useful for introducing or modulating the production of volatile compounds
MTSLQLSLMSGNGPVTRQVLLSPLRDARESEIPIIDVSGIFSEYKEDRMNVARQVRDAATNNGFFYIKNHGIASEIPEAACENLLTFFRQPSEVKEKAHVSQSKYFNGYKPPKSQRINPFESVDVRETFSWTYDPKFDPTISDPSVIPENIAKYLRCEDFHWDATSNLPDFKESIVRYWRSCLGVARALVRCFALSLDLPENFFDEKFTYPDAALALNYYPPLLHQQQQQPSASQEDTEVSIGSHTDFQLFTILWQDNNGGLQVLNSEGQWLNAKPIPGTFVVNIADYLQRITNDLYVSTVHRAQNFSGKERISMPFFFGFNLNESCGVLDSCVKDGEEKKYEEISCEEWVQRRARAMHREGETKI

SEQ ID NO: 27796 - DNA, 990 bp, Muscodor strobelii
  misc_feature: SGI cDNA ID NO. 569529
  misc_feature: Elevated expression when VOC is produced
  misc_feature: Encodes the peptide sequence at SEQ ID NO 27797
atggggtcggatttctcgagtctgtggactcagttctttcctccaaaggcacagttcactgaaagcagtctgccaagtctcgcaggcaaagtttttatcgtgactggagcaaatacgggggtgggcaaggcagtagcaagtatactatactctaagcatgcagaagtatttatcgccggccgctcagaaagcaaatgcaatgatgcaatagaagacatcaaaaagagccaccctgcgtcgagcgggcagttgtcctacttacaccttgatctcaacgatctctcgtctgtgaaagcctcagcggagcagttcctgtctcaggaaaacaagttgcacgtacttttcaataatgcaggtgtgcaaaatgtcggctccttttctcgcaccgcacaaggctacgaacagcacataggtgttaacacgattgcgcctttcttgttcacaaagctcctcacaccaatcctcgctgcaaccgcaaaggcggagaactgcccgaccagagtcgtttgggctagctccgcaggggccgagacttctgggctgcgttccataggtctcgatatcgaaaacttggactatagcaagaaagatcctggcgggatcactagatatgctctttcgaaggtgggaaattggctacacgctgtggaatacgctaagcggtgcaaagatgatgacattatcagcgttcctctcaaccctggtaacctcaaatccgatctctaccgcgatgcgcctatcggcatcaagattctggagaaactcgtcatgtatcctcccgttctaggaggatacacggagatctatgcggctttgtctcctgatataacagtggaaaacacaggatgctgggtcattcccttcggccggatagctgagatccgcaaggacttacaggaagccgcacggtcgccagaagaaggaggaaatggaaatgctgccaagttttgggactggacggaggaacaagttaagaaatacgcatcatga

SEQ ID NO: 27797 - protein, 329 aa, Muscodor strobelii
  misc_feature: SGI Peptide ID NO. 569529
  misc_feature (30)..(186): Pfam Id: PF00106 Pfam Desc: short chain dehydrogenase
  misc_feature (1)..(327): NCBI GI: 256730375 Blast Desc: NECHADRAFT_95027 [Nectria haematococca mpVI 77-13-4]
  misc_feature (1)..(327): NCBI GI: 239610907 Blast Desc: short-chain dehydrogenase [Ajellomyces dermatitidis ER-3]
  misc_feature (2)..(327): NCBI GI: 242801946 Blast Desc: estradiol 17 beta-dehydrogenase, [Talaromyces stipitatus ATCC 10500] gi|218717219|gb|EED16640.1| estradiol 17 beta-dehydrogenase, [Talaromyces stipitatus ATCC 10500]
  misc_feature (1)..(327): NCBI GI: 261206248 Blast Desc: short-chain dehydrogenase [Ajellomyces dermatitidis SLH14081] gi|239592920|gb|EEQ75501.1| short-chain dehydrogenase [Ajellomyces dermatitidis SLH14081]
  misc_feature (5)..(327): NCBI GI: 240280835 Blast Desc: short-chain dehydrogenase [Ajellomyces capsulatus H143]
  misc_feature (2)..(327): NCBI GI: 212545773 Blast Desc: short-chain dehydrogenase, [Penicillium marneffei ATCC 18224] gi|210064560|gb|EEA18655.1| short-chain dehydrogenase, [Penicillium marneffei ATCC 18224]
  misc_feature (5)..(327): NCBI GI: 225560611 Blast Desc: short-chain dehydrogenase [Ajellomyces capsulatus G186AR]
  misc_feature (10)..(329): NCBI GI: 46122791 Blast Desc: FG05773.1 [Gibberella zeae PH-1]
  misc_feature (1)..(325): NCBI GI: 226288088 Blast Desc: short-chain dehydrogenase [Paracoccidioides brasiliensis Pb18]
  misc_feature (10)..(327): NCBI GI: 256727198 Blast Desc: NECHADRAFT_32256 [Nectria haematococca mpVI 77-13-4]
  misc_feature: Useful for introducing or modulating the production of volatile compounds
MGSDFSSLWTQFFPPKAQFTESSLPSLAGKVFIVTGANTGVGKAVASILYSKHAEVFIAGRSESKCNDAIEDIKKSHPASSGQLSYLHLDLNDLSSVKASAEQFLSQENKLHVLFNNAGVQNVGSFSRTAQGYEQHIGVNTIAPFLFTKLLTPILAATAKAENCPTRVVWASSAGAETSGLRSIGLDIENLDYSKKDPGGITRYALSKVGNWLHAVEYAKRCKDDDIISVPLNPGNLKSDLYRDAPIGIKILEKLVMYPPVLGGYTEIYAALSPDITVENTGCWVIPFGRIAEIRKDLQEAARSPEEGGNGNAAKFWDWTEEQVKKYAS

SEQ ID NO: 27798 - DNA, 3536 bp, Muscodor strobelii
  misc_feature: SGI EST ID NO. CUFF.65562.0
  misc_feature: Variant of the nucleotide sequence at SEQ ID NO 27796
cgaacatcaggcgattttgtggtgactattgccatttacctaatagactaacttaggtagttgggttacaagcaacctagaacaggcaaaaagtacctagcccatgatctaatctacacagatagcataggtaccgagcatagttccctctccatttacaacgtcttcactcaacagcacttataacccaattccaagaaacaaagatgtctatacacatcattatatcttagtttcgccctctcggtgcattgctcttgctcttcgttgtacccattcttcgcagcttatctcctcatatttcttctcctcgccatctttcacacagctgtcgagaacgccacaagactcgttaagattgaagccgaagaagaagggcatacttattctctctttgccactaaaattttgtgcacgatgaactgtgctgacatatagatcgttggtgatacgctgaagatagtcggcaatattcacaacgaaagtgccagggatcggcttcgcgttgagccattggccctcagagtttaggacttggagaccaccgttgttatcttgccatagtatcgtgaatagctggaagtctgtgtgggagccaatcgagacttctgtgtcttcttgagacgctgacggttgttgttgttgttgatgaagaagaggcggatagtagttgagcgcaagcgccgcgtctgggtaagtgaacttttcgtcgaagaagttctcaggtaaatcaagcgacagtgcgaaacaccgcaccaatgccctagctacccctaaacaggaacgccaatatcgtactatagattctttgaagtctgggaggttggaggtagcatcccagtgaaagtcttcgcacctcagatattttgcgatattctctggaataacgcttggatcggaaatagtagggtcgaatttcggatcgtacgtccaactgaacgtttccctaacatcaacggactcaaatgggttgatacgctgcgacttaggtggcttgtatccgttgaagtatttagattgagaaacatgagctttttctttgacttctgatggctggcggaaaaaggtcaagaggttctcacaggcagcctctggtatttccgaggcgataccatgatttttaatatagaagaatccgttgttcgtagcagcatcgcgaacctggcgagcgacgttcatacgatcctccttgtactcgctgaagataccggagacatcgattatgggtatctccgattccctggcatcacgaagagggctgaggagaacttgtctagtaacaggaccgttaccagacattaagcttaattgtaggcttgtcatcctgcatgagagttgggaaacgagaacgcgatcgataggttctgatcaagtctacagtagatggcccatgtcatcacgatcattgaggagatggtgccctgtactgtacccgtcggcttctgcacatagcggccggccatttcgaacaaacaccgaggagtgggtcatgaacaaacgatagcattatgtcaagtaaaactccagcaaaatcgcttctggacgcttttcacctcgtgatatacacacagactttgacctttgacctttgtgatatacttaagatcaattaagttgctgatgaatctcttattggagagaagtgcagtaattgataggaattctagcagatgaagcagccaccctcgagcgtgagcccactagttaggccgggaatgatttgtcacatagcgaggctcaaaagtgcatcgtggctcatatagacttgtatccagagatttgaagagagataagctggaatgttaagagctaggctatgaggtgcagggtttacaggttctgcagtaaaattgaaagagagtctccttcgcaaatattctattgtaattggccagttcgcatccctcgcaaaatcatttgtctcctgtagatagcaagggatggcattagctcaaacgcattaccgtgggattctggtagctaaggcatcatcaaacccaattttgaatataacgacccagtgctatgaattcaacgcggatttcgcactcactgctgctgtacacatgttttgaggtgcccgaggctcccgatcccaaagtccgatggaattgaagataaaagcggctctcatgtcgctagcaatcctttcctttgctcagaccaaccgctacggctcttcaaaaatttgagctgcgttcctagtgacccaatttaacaagattcttgttgagtggaacctaccactgctcatacgaaatttgacagttatcgatggggtcggatttctcgagtctgtggactcagttctttcctccaaaggcacagttcactgaaagcagtctgccaagtctcgcaggcaaagtttttatcgtgactggagcaaatacgggggtgggcaaggcagtagcaagtatactatactctaagcatgcagaagtatttatcgccggccgctcagaaagcaaatgcaatgatgcaatagaagacatcaaaaagagccaccctgcgtcgagcgggcagttgtcctacttacaccttgatctcaacgatctctcgtctgtgaaagcctcagcggagcagttcctgtctcaggaaaacaagttgcacgtacttttcaataatgcaggtgtgcaaaatgtcggctccttttctcgcaccgcacaaggctacgaacagcacataggtgttaacacgattgcgcctttcttgttcacaaagctcctcacaccaatcctcgctgcaaccgcaaaggcggagaactgcccgaccagagtcgtttgggctagctccgcaggggccgagacttctgggctgcgttccataggtctcgatatcgaaaacttggactatagcaagaaagatcctggcgggatcactagatatgctctttcgaaggtgggaaattggctacacgctgtggaatacgctaagcggtgcaaagatgatgacattatcagcgttcctctcaaccctggtaacctcaaatccgatctctaccgcgatgcgcctatcggcatcaagattctggagaaactcgtcatgtatcctcccgttctaggaggatacacggagatctatgcggctttgtctcctgatataacagtggaaaacacaggatgctgggtcattcccttcggccggatagctgagatccgcaaggacttacaggaagccgcacggtcgccagaagaaggaggaaatggaaatgctgccaagttttgggactggacggaggaacaagttaagaaatacgcatcatgagggtgagcgtgttccacatacgatattctgcacatgttaggtgccatttacgtcagtcaagtagaactttctctcaaaaattccgcctcctgcaaccgttacagagtttagtgcacaaaaattatgcccaatatatgtcaatgcctatggtctggaaatgacttgttgaaaacctaaactggcagtttattgcatacaaatatggaagggttggtataaaagcctctagggcccaaggttttggcatccgaaattagagttctctatccata

SEQ ID NO: 27799 - DNA, 933 bp, Muscodor strobelii
  misc_feature: SGI cDNA ID NO. 569530
  misc_feature: Encodes the peptide sequence at SEQ ID NO 27800
atggccaataccatttggagctatgatcttccatcgatagacaataccgacaatatcggcattaccgtcctgggttttggggcggtaaacgatccggatgggacaattccattctctaactacctttctagtgctatgaacgatccagataactccactggtattggcggtcatgacacatatgctgtcacttgtgttgtcaatcctcggaactcattcgaataccgcagagtgacattgaatctacaagccctaggagagggcaaggcatctaattatgcccagtatctttccggtggcgaatcttgcacgcctgttgtccccacaatcagctctaaaatgttcgccgtggcaggaagtgctgcacatctactcgtcttggaaaatgtaggcacagatggcaatattgcaagcctgacaagactatcaggctaccggcgtgggccaccatatgcctttcctgacagtaggaacgctcttgaagacgtacttggccttgtttcagccttagctgtttcgcgaacgccaatgaatggggatggtgttccggctgccgaaatacaccaggaaaacgaacttgtcaatgccagcgctgttattcaggtgacgcgactcggaagtgaaagcaatgggacgtattggctgctcatcccgttgctagtgagcttcctgacgcttgttactctatctattgtggggttccagcgcgaatggacccccagaggaccatgggtctcagagatgaacaacaaacccccgaaacgatatataggggagagtgtctatcaccttgtaatgcttggaatgacagcttctaagaacgcggaatacaaaaagacgatgaccgatgattcggacgcgttcagccccttcacaagtcatgaatcagtacgcagtagtctgatagaccagggagtcagattggaagcttga

SEQ ID NO: 27800 - protein, 310 aa, Muscodor strobelii
  misc_feature: SGI Peptide ID NO. 569530
  misc_feature (1)..(265): NCBI GI: 46127391 Blast Desc: FG08073.1 [Gibberella zeae PH-1]
MANTIWSYDLPSIDNTDNIGITVLGFGAVNDPDGTIPFSNYLSSAMNDPDNSTGIGGHDTYAVTCVVNPRNSFEYRRVTLNLQALGEGKASNYAQYLSGGESCTPVVPTISSKMFAVAGSAAHLLVLENVGTDGNIASLTRLSGYRRGPPYAFPDSRNALEDVLGLVSALAVSRTPMNGDGVPAAEIHQENELVNASAVIQVTRLGSESNGTYWLLIPLLVSFLTLVTLSIVGFQREWTPRGPWVSEMNNKPPKRYIGESVYHLVMLGMTASKNAEYKKTMTDDSDAFSPFTSHESVRSSLIDQGVRLEA

SEQ ID NO: 27801 - DNA, 371 bp, Muscodor strobelii
  misc_feature: SGI EST ID NO. CUFF.65565.0
  misc_feature: Variant of the nucleotide sequence at SEQ ID NO 27799
gtgagcttcctgacgcttgttactctatctattgtggggttccagcgcgaatggacccccagaggaccatgggtctcagagatgaacaacaaacccccgaaacgatatataggggagagtgtctatcaccttgtaatgcttggaatgacagcttctaagaacgcggaatacaaaaagacgatgaccgatgattcggacgcgttcagccccttcacaagtcatgaatcagtacgcagtagtctgatagaccagggagtcagattggaagcttgaggtaaaacggcacacccttcagagcatgacacaggagttttgatgtgtctatataccagtgttaatcgccagtctatccgatagttgaaagtcatccc

SEQ ID NO: 27802 - DNA, 1362 bp, Muscodor strobelii
  misc_feature: SGI cDNA ID NO. 569531
  misc_feature: Encodes the peptide sequence at SEQ ID NO 27803
atgcaaagactaaaccaaagacagaatggtgtcaggatacaacctcagcccaccggactccccgcagtgaatagatacggttggagacagtatctggaagttcaaggtgagagtgatgacgttattgctttggaagtcatcgtcgtgacctggttcaggggatctggtggtggaatacctgacttcgtcacgatgttcgggccattcccaagaatacctttcatagcaggacatgatgccggtgccggtgctgatctgccgtgtaaatacccgtgtgtcttcaaatcactgaccgtgacttatgttggaagtggcgcccctgcaggctcatcacgcggaggcggtgatgatgatgacgacgggggagacgacgacaacgatgacgaagataacggcccttcgggagatggtccttctggtggtaactcttctggcggtggtccctctgctggcggcgaaggtggtgcctcacgctctattcccagatatgagtttcggcaatttcaacgtgaccctaacagaaaccccctcgccgataataattggagatccagaccagataacagcacaacaaaacagtctgctacgctttcaggcagcattatcaacaggactaacttacactcaggttctgccaggccagtggatgacgaggagagagatataaggagactgacagccactgtgtccctatgccagaattgcttgacccttcttgacaggcgaaatatttgcccatgccgcaacggaacttctggccttactcacgacgctggtgaagatgaaaacgatagcaagtacgtgacgtcttgggatcagatgccattcattccatctgcggaagaaatctctgacgaccgctccgatactgaaaatgtcgccgtttcaacggcgaaccagaaacgatcccagatatttctgttagattccaccatacaggtcttgctagatgagcgaaacgctgcgttacaagtcttgagagaggatggcggcgcgacgaacgaatttgtacctctcatcgggttatcacagtacacagatgcttcaactgaaactggaactgggactggaaccgaaacttcgccaaaacgaaagggcggagcattcacaaaaactgacagcggcatttttgatgtggaagacttggactcaagtccgtcaaagaaatcaagagcatcttcgtcaaatttcagttctcccggggccgaatcacgaatgcagcttagtccaataaagaagaagacagtcactttcctctcgaagataaatgaaggcgcatcacaagccgatctcgtaacgagcggctcggaagacgagggggttgagacagcatctccgcctaagccagaaaacattttctag

SEQ ID NO: 27803 - protein, 453 aa, Muscodor strobelii
  misc_feature: SGI Peptide ID NO. 569531
MQRLNQRQNGVRIQPQPTGLPAVNRYGWRQYLEVQGESDDVIALEVIVVTWFRGSGGGIPDFVTMFGPFPRIPFIAGHDAGAGADLPCKYPCVFKSLTVTYVGSGAPAGSSRGGGDDDDDGGDDDNDDEDNGPSGDGPSGGNSSGGGPSAGGEGGASRSIPRYEFRQFQRDPNRNPLADNNWRSRPDNSTTKQSATLSGSIINRTNLHSGSARPVDDEERDIRRLTATVSLCQNCLTLLDRRNICPCRNGTSGLTHDAGEDENDSKYVTSWDQMPFIPSAEEISDDRSDTENVAVSTANQKRSQIFLLDSTIQVLLDERNAALQVLREDGGATNEFVPLIGLSQYTDASTETGTGTGTETSPKRKGGAFTKTDSGIFDVEDLDSSPSKKSRASSSNFSSPGAESRMQLSPIKKKTVTFLSKINEGASQADLVTSGSEDEGVETASPPKPENIF

SEQ ID NO: 27804 - DNA, 1584 bp, Muscodor strobelii
  misc_feature: SGI cDNA ID NO. 569532
  misc_feature: Encodes the peptide sequence at SEQ ID NO 27805
atggcgactactacacaatacacagttcatacaggcctgtggataaattggtcctacggaaaggtccttggtgccactttgacactcaataaatcagacggcgtgttactaaccgcctttctggcgttaaccgttaccgtcattggcacgcaactgtggcgtattttttgcttcgttgcgcataatcttatctcttctgccgatatcccaaatgatgctctttatcaccaaattcaggctacgcttcgtaacgcctcagagccaggctcaggcttagtgcggttgctccagctcgcagtggcgtggagagcacacggagtacacgtaattcgtcgccttattcccgtcctagttgttacgatagctatcactgtcggtacagccttggggtcggggtactcgtctagagtggcagtgggtaatgaggtcctccttaaaggcgacgcttgttcttgggtgcagataaatggaaacacggatgctgttgccgaatacaccgtcgttagtccctacatggctaaaaacttacaaatcgatgcgacttacgcccaaaattgctactcggaagacttctcctctggcgagctaggctgtatcgtggacacaggactcatggacagccattttgacctggggcttaacctccctaccgaggagaggttccagtatagacgagtgatgtcttgtgctcctttgtcggtacaaggctattcacagtctcacaacctgtcgacaactcggtcaactatgcggtacttctacggaacccctgatagagaagcactaggccaatctagcgggtggccaaaatacagcatcaggcctttcacagccgtgtgggaaaatggcactctggggagctggggatcaacctttgagcccatccccgaactcacagtgcttgacgcggatctcaagctactctttctatccggcaacgggatctatttctctaatattacgaacgacccatggtataaggctaccactccaggttattccgcccatccactgctagccaacaagagcagttcaatcgaagtctatcttcaagataacccagcaacacccatgggatgtgttcaccgaagtcaatattgtcgcccaggacgcttaggtaacaccatgtgtacgagactcacaggggagctagatctttactactccgttttggaagtttttgacgacgaacatgccttcaatcgcgtatcttggttccaaacaaacgttgacgggagctggtggcccgaagatattgtagggagaggtgatgtgaacctcgccgctcaatatcgcgtgagatctggtgttcaagggcctttgcccgatgatcaatggcataccgaagtacagtactggttttccataatgttggcatcgatgcagcgaacgtttgtggattctgccatgggaccatctgatccaaacctaaagagctatcgcgtcccaccagctaatgctgacgagaaatacttgtgtgccaaccaggtaagaaattcgcttccatttggatgttttgcgcaagtggacactgctaactgcttgcactcagaaaattttgagcgcagatcacatatcctttag

SEQ ID NO: 27805 - protein, 527 aa, Muscodor strobelii
  misc_feature: SGI Peptide ID NO. 569532
  misc_feature (1)..(506): NCBI GI: 169615058 Blast Desc: SNOG_10683 [Phaeosphaeria nodorum SN15] gi|111060957|gb|EAT82077.1| SNOG_10683 [Phaeosphaeria nodorum SN15]
  misc_feature (8)..(506): NCBI GI: 189194015 Blast Desc: conserved [Pyrenophora tritici-repentis Pt-1C-BFP] gi|187978910|gb|EDU45536.1| conserved [Pyrenophora tritici-repentis Pt-1C-BFP]
  misc_feature (9)..(498): NCBI GI: 115399382 Blast Desc: [Aspergillus terreus NIH2624] gi|114192163|gb|EAU33863.1| [Aspergillus terreus NIH2624]
  misc_feature (9)..(498): NCBI GI: 119474227 Blast Desc: NFIA_004500 [Neosartorya fischeri NRRL 181] gi|119407142|gb|EAW17092.1| conserved [Neosartorya fischeri NRRL 181]
  misc_feature (8)..(500): NCBI GI: 169772941 Blast Desc: [Aspergillus oryzae RIB40] gi|83768800|dbj|BAE58937.1| protein product [Aspergillus oryzae]
  misc_feature (9)..(500): NCBI GI: 121699395 Blast Desc: ACLA_082720 [Aspergillus clavatus NRRL 1] gi|119396149|gb|EAW06581.1| ACLA_082720 [Aspergillus clavatus NRRL 1]
  misc_feature (9)..(498): NCBI GI: 159128250 Blast Desc: conserved [Aspergillus fumigatus A1163]
  misc_feature (9)..(498): NCBI GI: 70986226 Blast Desc: conserved [Aspergillus fumigatus Af293] gi|66846236|gb|EAL86569.1| conserved [Aspergillus fumigatus Af293]
  misc_feature (9)..(503): NCBI GI: 256723662 Blast Desc: NECHADRAFT_86728 [Nectria haematococca mpVI 77-13-4]
  misc_feature (8)..(497): NCBI GI: 169618215 Blast Desc: SNOG_12297 [Phaeosphaeria nodorum SN15] gi|160703576|gb|EAT80110.2| SNOG_12297 [Phaeosphaeria nodorum SN15]
MATTTQYTVHTGLWINWSYGKVLGATLTLNKSDGVLLTAFLALTVTVIGTQLWRIFCFVAHNLISSADIPNDALYHQIQATLRNASEPGSGLVRLLQLAVAWRAHGVHVIRRLIPVLVVTIAITVGTALGSGYSSRVAVGNEVLLKGDACSWVQINGNTDAVAEYTVVSPYMAKNLQIDATYAQNCYSEDFSSGELGCIVDTGLMDSHFDLGLNLPTEERFQYRRVMSCAPLSVQGYSQSHNLSTTRSTMRYFYGTPDREALGQSSGWPKYSIRPFTAVWENGTLGSWGSTFEPIPELTVLDADLKLLFLSGNGIYFSNITNDPWYKATTPGYSAHPLLANKSSSIEVYLQDNPATPMGCVHRSQYCRPGRLGNTMCTRLTGELDLYYSVLEVFDDEHAFNRVSWFQTNVDGSWWPEDIVGRGDVNLAAQYRVRSGVQGPLPDDQWHTEVQYWFSIMLASMQRTFVDSAMGPSDPNLKSYRVPPANADEKYLCANQVRNSLPFGCFAQVDTANCLHSENFERRSHIL

SEQ ID NO: 27806 - DNA, 587 bp, Muscodor strobelii
  misc_feature: SGI EST ID NO. CUFF.65578.0
  misc_feature: Variant of the nucleotide sequence at SEQ ID NO 27804
acagcatcaggcctttcacagccgtgtgggaaaatggcactctggggagctggggatcaacctttgagcccatccccgaactcacagtgcttgacgcggatctcaagctactctttctatccggcaacgggatctatttctctaatattacgaacgacccatggtataaggctaccactccaggttattccgcccatccactgctagccaacaagagcagttcaatcgaagtctatcttcaagataacccagcaacacccatgggatgtgttcaccgaagtcaatattgtcgcccaggacgcttaggtaacaccatgtgtacgagactcacaggggagctagatctttactactccgttttggaagtttttgacgacgaacatgccttcaatcgcgtatcttggttccaaacaaacgttgacgggagctggtggcccgaagatattgtagggagaggtgatgtgaacctcgccgctcaatatcgcgtgagatctggtgttcaagggcctttgcccgatgatcaatggcataccgaagtacagtactggttttccataatgttggcatcgatgcagcgaacgtttgtg

SEQ ID NO: 27807 - DNA, 222 bp, Muscodor strobelii
  misc_feature: SGI cDNA ID NO. 569533
  misc_feature: Elevated expression when VOC is produced
  misc_feature: Encodes the peptide sequence at SEQ ID NO 27808
atggatagctctaagaaccccatcaatgcccagcaagactccagccagcgtcgtcgaagaagctctggcccttcgttcgatagcttgatgaatcacaaacgatcctcggatcccagcgccacggcgagacgtaatagtctgaatgaacagaaaccggccgctggtttctttggatctatgtggcagaactttactcgcggtccttcgagccctacgaaatga

SEQ ID NO: 27808 - protein, 73 aa, Muscodor strobelii
  misc_feature: SGI Peptide ID NO. 569533
  misc_feature (19)..(67): NCBI GI: 171687617 Blast Desc: protein product [Podospora anserina] gi|170943770|emb|CAP69422.1| protein product [Podospora anserina]
  misc_feature (19)..(67): NCBI GI: 59803116 Blast Desc: conidiation-specific protein-like protein [Magnaporthe grisea]
  misc_feature (26)..(67): NCBI GI: 164423042 Blast Desc: conidiation-specific protein-8 [Neurospora crassa OR74A] gi|116910|sp|P10169.1|CON8_NEUCR RecName: Full=Conidiation-specific protein 8 gi|2989|emb|CAA30092.1| con-8
  misc_feature (19)..(68): NCBI GI: 145611284 Blast Desc: conserved [Magnaporthe grisea 70-15] gi|145018587|gb|EDK02866.1| conserved [Magnaporthe grisea 70-15]
  misc_feature (19)..(61): NCBI GI: 116180586 Blast Desc: CHGG_00921 [Chaetomium globosum CBS 148.51] gi|88185218|gb|EAQ92686.1| CHGG_00921 [Chaetomium globosum CBS 148.51]
  misc_feature (17)..(67): NCBI GI: 169773671 Blast Desc: [Aspergillus oryzae RIB40] gi|238491684|ref|XP_002377079.1| conserved [Aspergillus flavus NRRL3357] gi|83769165|dbj|BAE59302.1| protein product oryzae]
  misc_feature (17)..(67): NCBI GI: 156036376 Blast Desc: [Sclerotinia sclerotiorum 1980] gi|154698282|gb|EDN98020.1| [Sclerotinia sclerotiorum 1980]
  misc_feature: Useful for introducing or modulating the production of volatile compounds
MDSSKNPINAQQDSSQRRRRSSGPSFDSLMNHKRSSDPSATARRNSLNEQKPAAGFFGSMWQNFTRGPSSPTK

SEQ ID NO: 27809 - DNA, 1005 bp, Muscodor strobelii
  misc_feature: SGI EST ID NO. CUFF.65599.0
  misc_feature: Variant of the nucleotide sequence at SEQ ID NO 27807
ggtttgagttcgacgatgtgggcgcactttggcgcctctctgaccactgacgtgctcgtcattgagctccttcgctgcatgctgtcagctgtatcaccatagctatttttcgtgttaagggagtagcgttcggcaagtattgccatgataactgacactgtagaacaaaggataaaccaatgacatatgcagttgtttcgatattctcagtcttgatactgtgtcgtcggatgtcatcactcattagatataagagctcgcttcccccgcttcctatcgtttgtgtcgtacgattccatcttatctcttcacctcataccatcgaaaccctacctgagagctgaaatacaagcacaatacaaataattacaacgacttgtaatcgctactgccaaacaatcaatatggatagctctaagaaccccatcaatgcccagcaagactccagccagcgtcgtcgaagaagctctggcccttcgttcgatagcttgatgaatcacaaacgatcctcggatcccagcgccacggcgagacgtaatagtctgaatgaacagaaaccggccgctggtttctttggatctatgtggcagaagtatgtctgagttgctcggtcgggtagtctatggtgctaatgctaggattgttagctttactcgcggtccttcgagccctacgaaatgatatgatacgtgtggagggtggggagaacaagaagcggagagggcgaatcggggagttgattaggattagtgtatgttttaattgtctatctgaatttgcttaggatggtgggatgcggttgtatcattaggactggggggatggtgggaatgtatcattatgctttctgattagtgagactactatgataaacgacgcaatatcttcaggcctatttcggcgacgtttcatactagcttcgccttctcaataccaaccaaagtacataagtctcatgatgcgcagcgttctcataatcaatgcctccgaactggatagccgcag

SEQ ID NO: 27810 - DNA, 1335 bp, Muscodor strobelii
  misc_feature: SGI cDNA ID NO. 569534
  misc_feature: Reduced expression when VOC is produced
  misc_feature: Encodes the peptide sequence at SEQ ID NO 27811
atggccgcctatataggtgggatatgggcaccgctggccctgcggcttgcccgtaactccgcctatagggtgacgaaagtcatacggaccaagctgctccaggcctccaagcccgcgaacgcagtcgtcgaaccagcatttgcccgcgcgaacccgcggcatcccatccacccgaccgccttcctccgccagcagaagagccgaagatggcattcgaccaagtcgacttacaagaacatcgacgccaccatccgtcgtttcatgagcactggtcgactcgacagcctcccgcgattcgaccgtgccaagttcctcaacacccagaccggccgagccgtgtcgtccttcactggacgcgcaccctttgccagcacacttcgccccaacttgactggcggcgtccttcctcgcactgcaggtggctatggccttggatcagggcgcattgggggagcgcgatacttctcccacgcacccgcgacacaggcacaggtcttccagaacgtatctgccgccgtgcgagcattctggatctctggccagagagtccaacccgatggggtgactagtcgaggcgagactaaattccgcgccgtcaccgccctccaggaagaggcaaaccgcaagatggctgccgtaccccgccatgccgccggctcttacgttgacttccgtctcaacccgaccatcacctcgctcagccccctcactgctggcttcccattcccatcggccgcctttgccgatatcaagcccatcgacaccactactttgaataccgagggcttccttgatgttctgtccgtcgacttcgctcgcgcgctacaggatctcactacaacgctttccgatattaagaaactggctgcgctaggtgatctcccgatacatctcgagagggattataccctacgaatacgcttcccaggcgttgacgccgatacagtcgaatctctactagacgatctaggtctcaccaaaggcaccgtcagagaggacccaaactttgatcgtgaagttggtgctccaatcgcactcaaattcccttatgcgcccgaagccccagtttcgggcaacccgtacgaattgacgtcaccaggtggatccctccgatccgaagacagctttccagcagaacacgaactcttcgaaggattcagcgagatcgagggaaacccttggctttcatcgccagatctagagggttatgagacgatgtctccgtccgtcacttcgggtgagcactgttcggacgaattcgagggactcgagggtgtgtatcgattcctggaggaatgtgatcgagccaaagggcgatttggcgtggctgcttga

SEQ ID NO: 27811 - protein, 444 aa, Muscodor strobelii
  misc_feature: SGI Peptide ID NO. 569534
  misc_feature (6)..(440): NCBI GI: 261357574 Blast Desc: conserved [Verticillium albo-atrum VaMs.102]
  misc_feature (7)..(440): NCBI GI: 116182356 Blast Desc: CHGG_01806 [Chaetomium globosum CBS 148.51] gi|88186103|gb|EAQ93571.1| CHGG_01806 [Chaetomium globosum CBS 148.51]
  misc_feature (6)..(434): NCBI GI: 154318301 Blast Desc: BC1G_03318 [Botryotinia fuckeliana B05.10] gi|150842841|gb|EDN18034.1| BC1G_03318 [Botryotinia fuckeliana B05.10]
  misc_feature (6)..(434): NCBI GI: 156053105 Blast Desc: SS1G_06720 [Sclerotinia sclerotiorum 1980] gi|154704498|gb|EDO04237.1| SS1G_06720 [Sclerotinia sclerotiorum 1980]
  misc_feature (3)..(441): NCBI GI: 256735288 Blast Desc: NECHADRAFT_98843 [Nectria haematococca mpVI 77-13-4]
  misc_feature (1)..(438): NCBI GI: 85091451 Blast Desc: NCU09136 [Neurospora crassa OR74A] gi|28920299|gb|EAA29672.1| conserved [Neurospora crassa OR74A]
  misc_feature (1)..(438): NCBI GI: 171695260 Blast Desc: protein product [Podospora anserina] gi|170947872|emb|CAP60036.1| protein product [Podospora anserina]
  misc_feature (3)..(441): NCBI GI: 46106457 Blast Desc: FG00424.1 [Gibberella zeae PH-1]
  misc_feature (26)..(434): NCBI GI: 189189902 Blast Desc: conserved [Pyrenophora tritici-repentis Pt-1C-BFP] gi|187972896|gb|EDU40395.1| conserved [Pyrenophora tritici-repentis Pt-1C-BFP]
  misc_feature (1)..(437): NCBI GI: 261194725 Blast Desc: conserved [Ajellomyces dermatitidis SLH14081] gi|239588305|gb|EEQ70948.1| conserved [Ajellomyces dermatitidis SLH14081]
  misc_feature: Useful for introducing or modulating the production of volatile compounds
MAAYIGGIWAPLALRLARNSAYRVTKVIRTKLLQASKPANAVVEPAFARANPRHPIHPTAFLRQQKSRRWHSTKSTYKNIDATIRRFMSTGRLDSLPRFDRAKFLNTQTGRAVSSFTGRAPFASTLRPNLTGGVLPRTAGGYGLGSGRIGGARYFSHAPATQAQVFQNVSAAVRAFWISGQRVQPDGVTSRGETKFRAVTALQEEANRKMAAVPRHAAGSYVDFRLNPTITSLSPLTAGFPFPSAAFADIKPIDTTTLNTEGFLDVLSVDFARALQDLTTTLSDIKKLAALGDLPIHLERDYTLRIRFPGVDADTVESLLDDLGLTKGTVREDPNFDREVGAPIALKFPYAPEAPVSGNPYELTSPGGSLRSEDSFPAEHELFEGFSEIEGNPWLSSPDLEGYETMSPSVTSGEHCSDEFEGLEGVYRFLEECDRAKGRFGVAA

SEQ ID NO: 27812 - DNA, 2294 bp, Muscodor strobelii
  misc_feature: SGI EST ID NO. CUFF.65601.0
  misc_feature: Variant of the nucleotide sequence at SEQ ID NO 27810
catactcgctctaaacctagaatatttccaacttctcaaccatcaacctgcagattggctgcatcacaacatacacaatggccgcctatataggtgggatatgggcaccgctggccctgcggcttgcccgtaactccgcctatagggtgacgaaagtcatacggaccaagctgctccaggcctccaagcccgcgaacgcagtcgtcgaaccagcatttgcccgcgcgaacccgcggcatcccatccacccgaccgccttcctccgccagcagaagagccgaagatggcattcgaccaagtcgacttacaagaacatcgacgccaccatccgtcgtttcatgagcactggtcgactcgacagcctcccgcgattcgaccgtgccaagttcctcaacacccagaccggccgagccgtgtcgtccttcactggacgcgcaccctttgccagcacacttcgccccaacttgactggcggcgtccttcctcgcactgcaggtggctatggccttggatcagggcgcattgggggagcgcgatacttctcccacgcacccgcgacacaggcacaggtcttccagaacgtatctgccgccgtgcgagcattctggatctctggccagagagtccaacccgatggggtgactagtcgaggcgagactaaattccgcgccgtcaccgccctccaggaagaggcaaaccgcaagatggctgccgtaccccgccatgccgccggctcttacgttgacttccgtctcaacccgaccatcacctcgctcagccccctcactgctggcttcccattcccatcggccgcctttgccgatatcaagcccatcgacaccactactttgaataccgagggcttccttgatgttctgtccgtcgacttcgctcgcgcgctacaggatctcactacaacgctttccgatattaagaaactggctgcgctaggtgatctcccgatacatctcgagagggattataccctacgaatacgcttcccaggcgttgacgccgatacagtcgaatctctactagacgatctaggtctcaccaaaggcaccgtcagagaggacccaaactttgatcgtgaagttggtgctccaatcgcactcaaattcccttatgcgcccgaagccccagtttcgggcaacccgtacgaattgacgtcaccaggtggatccctccgatccgaagacagctttccagcagaacacgaactcttcgaaggattcagcgagatcgagggaaacccttggctttcatcgccagatctagagggttatgagacgatgtctccgtccgtcacttcgggtgagcactgttcggacgaattcgagggactcgagggtgtgtatcgattcctggaggaatgtgatcgagccaaagggcgatttggcgtggctgcttgatgttgaatgatttagtttggcgttggggtgataagactgcgcaatgaagcagcagattctaacgaattgggaatatgacggaataccacactctttgtacctttagtatattattacgaccgatgagatatatctcggtctgtgggcagcaatttcatatgtcttacgcctatagtactgatcttgtatgatatcatggtctttgtataaacaacagcactacagtctcttgattaccctcacgtatcaaacctcgtcttcctcttccccgtactcgtccctccagtactcgccttctcaaactccaccggctgcccctgtttcctactcctcccattcgcgatctcactctgactagctctcagctgctccttataagcatacctcgggaactcgtaattcaatatatccttccccagcgtcgtctcatactgatcccgcaagtctaactcggcatacgcgaggagcttatcggcgagagccgggttcttcatcgatggattgctggctatccgggagttgaagtgtatgccttttcttttgagctcgaggaaattctcgaacttcttgttgagtggtgagggggaaccgggaggtgaggatggtatggacatgttgggcactaaggggagcgtgaggtcgcgcagcattgcgcgcgttgcggtgtagggtgagcctggggggaggggcgggagtgtgtcttcttcttcttctaagggggggtatgagggtgagacgcctgatgagggaccgatttgtggtccgtagactgatgggttttcatttgcacttggtttcggtgcttcatctttgtttgggtttgattgtgtgttggtggttgaggtgggatctagtgagaggttaggatgagatgagatgaga

SEQ ID NO: 27813 - DNA, 729 bp, Muscodor strobelii
  misc_feature: SGI cDNA ID NO. 569535
  misc_feature: Encodes the peptide sequence at SEQ ID NO 27814
atggctgggcttgtagcctacgagagtagtgacgaagaggaagaggtgaagccaacgcccgcgccagagccattaaaagaaacttcacaggccacggctgacacgagtagcaaaccaaatcccacctcaaccaccaacacacaatcaaacccaaacaaagatgaagcaccgaaaccaagtgcaaatgaaaacccatcagtctacggaccacaaatcggtccctcatcaggcgtctcaccctcatacccccccttagaagaagaagaagacacactcccgcccctccccccaggctcaccctacaccgcaacgcgcgcaatgctgcgcgacctcacgctccccttagtgcccaacatgtccataccatcctcacctcccggttccccctcaccactcaacaagaagttcgagaatttcctcgagctcaaaagaaaaggcatacacttcaactcccggatagccagcaatccatcgatgaagaacccggctctcgccgataagctcctcgcgtatgccgagttagacttgcgggatcagtatgagacgacgctggggaaggatatattgaattacgagttcccgaggtatgcttataaggagcagctgagagctagtcagagtgagatcgcgaatgggaggagtaggaaacaggggcagccggtggagtttgagaaggcgagtactggagggacgagtacggggaagaggaagacgaggtttgatacgtga

SEQ ID NO: 27814 - protein, 242 aa, Muscodor strobelii
  misc_feature: SGI Peptide ID NO. 569535
  misc_feature (121)..(217): Pfam Id: PF07818 Pfam Desc: HCNGP-like protein
  misc_feature (121)..(175): Pfam Id: PF07818 Pfam Desc: HCNGP-like protein
  misc_feature (1)..(219): NCBI GI: 156056675 Blast Desc: SS1G_04068 [Sclerotinia sclerotiorum 1980] gi|154701854|gb|EDO01593.1| SS1G_04068 [Sclerotinia sclerotiorum 1980]
  misc_feature (1)..(230): NCBI GI: 154323892 Blast Desc: BC1G_00345 [Botryotinia fuckeliana B05.10] gi|150842574|gb|EDN17767.1| BC1G_00345 [Botryotinia fuckeliana B05.10]
  misc_feature (1)..(240): NCBI GI: 256735167 Blast Desc: NECHADRAFT_74730 [Nectria haematococca mpVI 77-13-4]
  misc_feature (1)..(233): NCBI GI: 46108286 Blast Desc: FG01025.1 [Gibberella zeae PH-1]
  misc_feature (1)..(223): NCBI GI: 259484728 Blast Desc: TPA: conserved [Aspergillus nidulans FGSC A4]
  misc_feature (96)..(234): NCBI GI: 85089530 Blast Desc: NCU11351 [Neurospora crassa OR74A] gi|28919292|gb|EAA28756.1| [Neurospora crassa OR74A]
  misc_feature (1)..(227): NCBI GI: 39975043 Blast Desc: MGG_00332 [Magnaporthe grisea 70-15] gi|145018783|gb|EDK03062.1| MGG_00332 [Magnaporthe grisea 70-15]
  misc_feature (1)..(233): NCBI GI: 255938696 Blast Desc: Pc14g01240 [Penicillium chrysogenum Wisconsin 54-1255] gi|211584739|emb|CAP74265.1| Pc14g01240 [Penicillium chrysogenum Wisconsin 54-1255]
  misc_feature (58)..(237): NCBI GI: 189193571 Blast Desc: conserved [Pyrenophora tritici-repentis Pt-1C-BFP] gi|187978688|gb|EDU45314.1| conserved [Pyrenophora tritici-repentis Pt-1C-BFP]
  misc_feature (5)..(234): NCBI GI: 169601774 Blast Desc: SNOG_03761 [Phaeosphaeria nodorum SN15] gi|111067846|gb|EAT88966.1| SNOG_03761 [Phaeosphaeria nodorum SN15]
MAGLVAYESSDEEEEVKPTPAPEPLKETSQATADTSSKPNPTSTTNTQSNPNKDEAPKPSANENPSVYGPQIGPSSGVSPSYPPLEEEEDTLPPLPPGSPYTATRAMLRDLTLPLVPNMSIPSSPPGSPSPLNKKFENFLELKRKGIHFNSRIASNPSMKNPALADKLLAYAELDLRDQYETTLGKDILNYEFPRYAYKEQLRASQSEIANGRSRKQGQPVEFEKASTGGTSTGKRKTRFDT

SEQ ID NO: 27815 - DNA, 801 bp, Muscodor strobelii
  misc_feature: SGI cDNA ID NO. 569536
  misc_feature: Encodes the peptide sequence at SEQ ID NO 27816
atggatcatagaccgcaagcctggggccgtcccagagacgacatctacggcgcctacgatgcttcatatatgcagagcaacggtcccaaccagcacacccagtcgcccatcgtcacaggaacctcagtattaggcatgaagttcaaggacggcgttgtcatcgccgccgataacctagcatcctacggctccctagcccgcttcacagacgtcaagcgtctgcgcaccttcgccgagtcctccgtcgtcggttttggcggcgatgtgtccgacatgcaatacctcgaccggcacctaacggagctagccatcgacgaagcctacacgacctccacctccacgtcctcgtcacagcccacgctcaacgcccgcaacctgcacaagtacctctccaagctgatgtaccaccgccgctccaagttcgacccgctctggaactctctcctcgtcgcaggtctcgacgagcacggcgcccccttcctcgcagccgccgacctgctaggaacgaccttcacgtccccctccctcgcgaccggtttcggctccatgctcgcacagcccataatgcgccgtctcgtgcccgacgaggacgcagtccccaacatcacgcaggagcaggccgtagagtgcgtgaaggagtgcatgaaggtgctcttctaccgcgacgccagatccatggacacgtactccatcgccgtcgtgaccaaggatggcgtcgagctgaagcagagcgagaagctcgagaaacagagctgggcgttcgctgatcgtatcaaggggtacggtacgcagactgtgtag

SEQ ID NO: 27816 - protein, 266 aa, Muscodor strobelii
  misc_feature: SGI Peptide ID NO. 569536
  misc_feature (37)..(234): Pfam Id: PF00227 Pfam Desc: Proteasome A-type and B-type
  misc_feature (132)..(234): Pfam Id: PF00227 Pfam Desc: Proteasome A-type and B-type
  misc_feature (37)..(95): Pfam Id: PF00227 Pfam Desc: Proteasome A-type and B-type
  misc_feature (1)..(266): NCBI GI: 91694273 Blast Desc: 20S proteasome subunit [Hypocrea lixii]
  misc_feature (1)..(266): NCBI GI: 261356194 Blast Desc: proteasome component PRE4 [Verticillium albo-atrum VaMs.102]
  misc_feature (1)..(266): NCBI GI: 256734370 Blast Desc: [Nectria haematococca mpVI 77-13-4]
  misc_feature (1)..(265): NCBI GI: 156056673 Blast Desc: SS1G_04067 [Sclerotinia sclerotiorum 1980] gi|154701853|gb|EDO01592.1| SS1G_04067 [Sclerotinia sclerotiorum 1980]
  misc_feature (1)..(266): NCBI GI: 58257385 Blast Desc: proteasome subunit beta-like protein [Magnaporthe grisea]
  misc_feature (1)..(266): NCBI GI: 116192559 Blast Desc: CHGG_05997 [Chaetomium globosum CBS 148.51] gi|88181910|gb|EAQ89378.1| CHGG_05997 [Chaetomium globosum CBS 148.51]
  misc_feature (1)..(265): NCBI GI: 154323890 Blast Desc: BC1G_00344 [Botryotinia fuckeliana B05.10] gi|150842573|gb|EDN17766.1| BC1G_00344 [Botryotinia fuckeliana B05.10]
  misc_feature (1)..(266): NCBI GI: 46108636 Blast Desc: FG01200.1 [Gibberella zeae PH-1]
  misc_feature (1)..(266): NCBI GI: 85089532 Blast Desc: NCU07365 [Neurospora crassa OR74A] gi|28919293|gb|EAA28757.1| NCU07365 [Neurospora crassa OR74A]
  misc_feature (1)..(265): NCBI GI: 189193573 Blast Desc: proteasome component PRE4 [Pyrenophora tritici-repentis Pt-1C-BFP] gi|187978689|gb|EDU45315.1| proteasome component PRE4 [Pyrenophora tritici-repentis
  misc_feature (1)..(266): SWISSPROT Homolog: EC 3.4.25.1 Proteasome endopeptidase complex
MDHRPQAWGRPRDDIYGAYDASYMQSNGPNQHTQSPIVTGTSVLGMKFKDGVVIAADNLASYGSLARFTDVKRLRTFAESSVVGFGGDVSDMQYLDRHLTELAIDEAYTTSTSTSSSQPTLNARNLHKYLSKLMYHRRSKFDPLWNSLLVAGLDEHGAPFLAAADLLGTTFTSPSLATGFGSMLAQPIMRRLVPDEDAVPNITQEQAVECVKECMKVLFYRDARSMDTYSIAVVTKDGVELKQSEKLEKQSWAFADRIKGYGTQTV

SEQ ID NO: 27817 - DNA, 1195 bp, Muscodor strobelii
  misc_feature: SGI EST ID NO. CUFF.65799.0
  misc_feature: Variant of the nucleotide sequence at SEQ ID NO 27815
cagacgacctgacgcgcgcagctccgctacctggaccactgacggcaggagctcccaccactgacctcaggccggagcttcaacttgctgtcatttggtaacacctttaacatccattccgcacaccaatccaccgatcgcaccaccgacgacaactcgctctacactaatacatatacacaacaacaagacctcccacatctcacaatggatcatagaccgcaagcctggggccgtcccagagacgacatctacggcgcctacgatgcttcatatatgcagagcaacggtcccaaccagcacacccagtcgcccatcgtcacaggaacctcagtattaggcatgaagttcaaggacggcgttgtcatcgccgccgataacctagcatcctacggctccctagcccgcttcacagacgtcaagcgtctgcgcaccttcgccgagtcctccgtcgtcggttttggcggcgatgtgtccgacatgcaatacctcgaccggcacctaacggagctagccatcgacgaagcctacacgacctccacctccacgtcctcgtcacagcccacgctcaacgcccgcaacctgcacaagtacctctccaagctgatgtaccaccgccgctccaagttcgacccgctctggaactctctcctcgtcgcaggtctcgacgagcacggcgcccccttcctcgcagccgccgacctgctaggaacgaccttcacgtccccctccctcgcgaccggtttcggctccatgctcgcacagcccataatgcgccgtctcgtgcccgacgaggacgcagtccccaacatcacgcaggagcaggccgtagagtgcgtgaaggagtgcatgaaggtgctcttctaccgcgacgccagatccatggacacgtactccatcgccgtcgtgaccaaggatggcgtcgagctgaagcagagcgagaagctcgagaaacagagctgggcgttcgctgatcgtatcaaggggtacggtacgcagactgtgtagagatagtgggttttagagtaaaaacatatgagaaggcatgagacaaggactgagaatgactttgtaatgccaaagatccgccagtagactttgatatagcctcaaagtcgggcaatgaggactactagacacataaatatcgttctagacaagtacactgagccttcttttccagcctttaactcca

SEQ ID NO: 27818 - DNA, 2103 bp, Muscodor strobelii
  misc_feature: SGI cDNA ID NO. 569537
  misc_feature: Encodes the peptide sequence at SEQ ID NO 27819
atgtgtggaattttcggctacatcaactacctggtcgagaaggacaggaaattcatcctcgacaccttggtcaacggtctgtcccgtctcgagtaccgtggatatgactcggctggtctagctgtcgacggcgacaagaagaacgaggtcttcgccttcaaggaggtcggcaaggttgccaagctcaagaagctgatcgaggaggagaagcccgacctcaccaagattttcgactcccatgccggtatcgcacacactcgatgggcaactcacggccctccctctcggctgaactgccatccccaccgatcggacccaacgtgggaattctccgtcgtccataacggtatcatcacaaactacaaggagctgaagacgctattgggcgccaagggcttcaagttcgagaccgagaccgacacagaatgcattgcgaagctcgccaagtacctttacgaccagcacccgcgcatcggcttcgtcgacctggccaaggccgtcattaccgagctcgagggtgcttacggtctactgatcaagtctgtacactatccccatgaggttgttgctgcccgcaagggttctcccctcgtcatcggtgtcaagacccagagacgcatgaaggttgatttcgtcgacgttgagtactctgaggaaggtgctctccccgccgaggctgcctcgcagaacgttgccctcaagaagcagtcgaatctgctgacacccaatgctgctctacttggtgcccctgacaaatccctgcttcaccgctcgcagtcgcgggctttcatgaccgacgatggcatgcctatgcccgccgagttcttcctgtcttctgacccgtctgccattgtcgagcacaccaagaaggtcatgtacttggaggatgatgacattgctcacattcatgagggctccctcaacatccaccggctgaagaaggccgatggaagctccaatgtacgcaacatccagaccctggaactcgagctccaggagatcatgaagggcaagttcgaccacttcatgcagaaggagattttcgagcagcctgagtctgtcgtcaacaccatgagagggcgcctcgacgtcgagaacaagaccgtcactctcggtggcttgagatcctacattgccaccatcagaaggtgccgccgcatcatcttcatcgcctgtggtaccagttaccactcttgcatggccgtgcgaggtatctttgaggagctcgcagaaatcccaatcgctgtggagcttgcttccgatttccttgaccgagaggcgcccgttttccgcgacgatacttgtgtattcgtctctcagtctggtgagactgctgactcgctcatggcccttcgctactgcctggagcgtggagctctcacggttggtatcgtcaacgttgttggctcttctatttctctcctcactcactgtggtgtccacgtcaatgctggtcctgaaatcggtgtcgcttccaccaaggcctacacctcgcagttcatcgccatggtcatgttcgctttgtctcttagtgaggacagagcatccaagcaaaagagacgcgaggagatcatcgagggtttgggcaatgtgtcatcacagatcaagcagatcttggagcttgaccagcccatcaaggagatgtgtgctaagacgttcaagcaccagaagtccttgcttttgctcggtcgtggcagccaatactcaactgcgctcgagggcgcgttgaagatcaaggaaatctcgtatctccactgtgaggctgtcatgtctggtgagctcaagcacggtgtcttggctttggtagacgaggcacttcccatcatcatgattttgacacgtgatgatctgttcaagaagtctctcaatgcttaccagcaagtcgctgcgcgtggtggcaagcccattgtcatctgcaacccaggcgacgaggaattccaggccagccaggccgagaagatcgaggtacccaagaccgtcgactgtctacaaggattgttgaacgttgtccctcttcagctgatggcctactggttggccgtcatggagggattgaacgtcgacttccctcgcaacttggccaaatcggtcacagttgagtag

SEQ ID NO: 27819 - protein, 700 aa, Muscodor strobelii
  misc_feature: SGI Peptide ID NO. 569537
  misc_feature (2)..(219): Pfam Id: PF00310 Pfam Desc: Glutamine amidotransferases class-II
  misc_feature (380)..(509): Pfam Id: PF01380 Pfam Desc: SIS domain
  misc_feature (552)..(683): Pfam Id: PF01380 Pfam Desc: SIS domain
  misc_feature (77)..(201): Pfam Id: PF00310 Pfam Desc: Glutamine amidotransferases class-II
  misc_feature (2)..(47): Pfam Id: PF00310 Pfam Desc: Glutamine amidotransferases class-II
  misc_feature (1)..(700): NCBI GI: 154323896 Blast Desc: BC1G_00347 [Botryotinia fuckeliana B05.10] gi|150842576|gb|EDN17769.1| BC1G_00347 [Botryotinia fuckeliana B05.10]
  misc_feature (1)..(700): NCBI GI: 156056679 Blast Desc: SS1G_04070 [Sclerotinia sclerotiorum 1980] gi|154701856|gb|EDO01595.1| SS1G_04070 [Sclerotinia sclerotiorum 1980]
  misc_feature (1)..(700): NCBI GI: 171684679 Blast Desc: protein product [Podospora anserina] gi|170942300|emb|CAP67952.1| protein product [Podospora anserina]
  misc_feature (3)..(700): NCBI GI: 116192557 Blast Desc: CHGG_05996 [Chaetomium globosum CBS 148.51] gi|88181909|gb|EAQ89377.1| CHGG_05996 [Chaetomium globosum CBS 148.51]
  misc_feature (1)..(700): NCBI GI: 145611510 Blast Desc: MGG_11597 [Magnaporthe grisea 70-15] gi|145018785|gb|EDK03064.1| MGG_11597 [Magnaporthe grisea 70-15]
  misc_feature (1)..(700): NCBI GI: 53987051 Blast Desc: TPA: TPA_inf: glutamine:fructose-6-phosphate amidotransferase [Gibberella zeae]
  misc_feature (1)..(700): NCBI GI: 115400874 Blast Desc: glucosamine--fructose-6-phosphate aminotransferase [Aspergillus terreus NIH2624] gi|114189966|gb|EAU31666.1| glucosamine--fructose-6-phosphate aminotransferase [Aspergillus
  misc_feature (1)..(700): NCBI GI: 145255893 Blast Desc: An18g06820 [Aspergillus niger] gi|51440693|gb|AAU01572.1| glutamine:fructose-6-phosphate amidotransferase [Aspergillus niger] gi|134084732|emb|CAK43389.1|
  misc_feature (3)..(700): NCBI GI: 256735090 Blast Desc: NECHADRAFT_98707 [Nectria haematococca mpVI 77-13-4]
  misc_feature (1)..(700): NCBI GI: 169769551 Blast Desc: [Aspergillus oryzae RIB40] gi|238488132|ref|XP_002375304.1| glucosamine-fructose-6-phosphate aminotransferase [Aspergillus flavus NRRL3357] protein product
  misc_feature (1)..(700): SWISSPROT Homolog: EC 2.6.1.16 Glutamine--fructose-6-phosphate transaminase (isomerizing)
MCGIFGYINYLVEKDRKFILDTLVNGLSRLEYRGYDSAGLAVDGDKKNEVFAFKEVGKVAKLKKLIEEEKPDLTKIFDSHAGIAHTRWATHGPPSRLNCHPHRSDPTWEFSVVHNGIITNYKELKTLLGAKGFKFETETDTECIAKLAKYLYDQHPRIGFVDLAKAVITELEGAYGLLIKSVHYPHEVVAARKGSPLVIGVKTQRRMKVDFVDVEYSEEGALPAEAASQNVALKKQSNLLTPNAALLGAPDKSLLHRSQSRAFMTDDGMPMPAEFFLSSDPSAIVEHTKKVMYLEDDDIAHIHEGSLNIHRLKKADGSSNVRNIQTLELELQEIMKGKFDHFMQKEIFEQPESVVNTMRGRLDVENKTVTLGGLRSYIATIRRCRRIIFIACGTSYHSCMAVRGIFEELAEIPIAVELASDFLDREAPVFRDDTCVFVSQSGETADSLMALRYCLERGALTVGIVNVVGSSISLLTHCGVHVNAGPEIGVASTKAYTSQFIAMVMFALSLSEDRASKQKRREEIIEGLGNVSSQIKQILELDQPIKEMCAKTFKHQKSLLLLGRGSQYSTALEGALKIKEISYLHCEAVMSGELKHGVLALVDEALPIIMILTRDDLFKKSLNAYQQVAARGGKPIVICNPGDEEFQASQAEKIEVPKTVDCLQGLLNVVPLQLMAYWLAVMEGLNVDFPRNLAKSVTVE

SEQ ID NO: 27820 - DNA, 2927 bp, Muscodor strobelii
  misc_feature: SGI EST ID NO. CUFF.65803.0
  misc_feature: Variant of the nucleotide sequence at SEQ ID NO 27818
aaagacctaggttacggcaaagacctgctgtccattgtctttttagataaaaaggactgcatcagcacgcttcctgtcttcctcttcccatcttctgctctcctctcgtctcccatttatcccatctccctcccatatcccactctcacaagctcggctgcattgtcagtatactcggtcctctcttgacaacgctacgcctgaattgttttatagagacactgctttagagagaattgcagcaaaacagagagcacaatgtgtggaattttcggctacatcaactacctggtcgagaaggacaggaaattcatcctcgacaccttggtcaacggtctgtcccgtctcgagtaccgtggatatgactcggctggtctagctgtcgacggcgacaagaagaacgaggtcttcgccttcaaggaggtcggcaaggttgccaagctcaagaagctgatcgaggaggagaagcccgacctcaccaagattttcgactcccatgccggtatcgcacacactcgatgggcaactcacggccctccctctcggctgaactgccatccccaccgatcggacccaacgtgggaattctccgtcgtccataacggtatcatcacaaactacaaggagctgaagacgctattgggcgccaagggcttcaagttcgagaccgagaccgacacagaatgcattgcgaagctcgccaagtacctttacgaccagcacccgcgcatcggcttcgtcgacctggccaaggccgtcattaccgagctcgagggtgcttacggtctactgatcaagtctgtacactatccccatgaggttgttgctgcccgcaagggttctcccctcgtcatcggtgtcaagacccagagacgcatgaaggttgatttcgtcgacgttgagtactctgaggaaggtgctctccccgccgaggctgcctcgcagaacgttgccctcaagaagcagtcgaatctgctgacacccaatgctgctctacttggtgcccctgacaaatccctgcttcaccgctcgcagtcgcgggctttcatgaccgacgatggcatgcctatgcccgccgagttcttcctgtcttctgacccgtctgccattgtcgagcacaccaagaaggtcatgtacttggaggatgatgacattgctcacattcatgagggctccctcaacatccaccggctgaagaaggccgatggaagctccaatgtacgcaacatccagaccctggaactcgagctccaggagatcatgaagggcaagttcgaccacttcatgcagaaggagattttcgagcagcctgagtctgtcgtcaacaccatgagagggcgcctcgacgtcgagaacaagaccgtcactctcggtggcttgagatcctacattgccaccatcagaaggtgccgccgcatcatcttcatcgcctgtggtaccagttaccactcttgcatggccgtgcgaggtatctttgaggagctcgcagaaatcccaatcgctgtggagcttgcttccgatttccttgaccgagaggcgcccgttttccgcgacgatacttgtgtattcgtctctcagtctggtgagactgctgactcgctcatggcccttcgctactgcctggagcgtggagctctcacggttggtatcgtcaacgttgttggctcttctatttctctcctcactcactgtggtgtccacgtcaatgctggtcctgaaatcggtgtcgcttccaccaaggcctacacctcgcagttcatcgccatggtcatgttcgctttgtctcttagtgaggacagagcatccaagcaaaagagacgcgaggagatcatcgagggtttgggcaatgtgtcatcacagatcaagcagatcttggagcttgaccagcccatcaaggagatgtgtgctaagacgttcaagcaccagaagtccttgcttttgctcggtcgtggcagccaatactcaactgcgctcgagggcgcgttgaagatcaaggaaatctcgtatctccactgtgaggctgtcatgtctggtgagctcaagcacggtgtcttggctttggtagacgaggcacttcccatcatcatgattttgacacgtgatgatctgttcaagaagtctctcaatgcttaccagcaagtcgctgcgcgtggtggcaagcccattgtcatctgcaacccaggcgacgaggaattccaggccagccaggccgagaagatcgaggtacccaagaccgtcgactgtctacaaggattgttgaacgttgtccctcttcagctgatggcctactggttggccgtcatggagggattgaacgtcgacttccctcgcaacttggccaaatcggtcacagttgagtagattggtacgacttaaagatctgatgaataccttagacggcgtggtttgtgatgagttcacttcggcgttggcatcaaaacggaaatttgctacggttggtagttggatagggatttacatgagcgttcttgatgcttggctatgaggatgtcccgatgacagacgaggagcaatgccccatgaggctagatgtctattgagatgaggcaagacatgagatatgtgtaaagtcccacctgtcgtttgattttagcgcgcgccgcggtggacaagccgggacgattcgcgaaaacggttcagggcagcgtatgtgcggcagaaggatacgtcagcatggatccgtagatcacaatgcgagaagacttgtaatatgtcacatagacctcattagtgagctcaacgatcgtttgcaattgtgtgcaattgttaaaccatttctcgacgccaaactgcctacctgctccttcgtttcgcgtagacatttcaacgtccatcttgtttacatggatcttcccgaacggtcaggtcatattttgaaaagggacactaatattactgtcttggtt

SEQ ID NO: 27821 - DNA, 1176 bp, Muscodor strobelii
  misc_feature: SGI cDNA ID NO. 569538
  misc_feature: Encodes the peptide sequence at SEQ ID NO 27822
atggcttccgaccaggagagggagcatgccctggatgccctgcgcaccaaactgatcgagtctagagaatgggaggctaagctcaaggcgctgcgtctcgacattaagggtctagagaaggagtacaaccagacagaagagaacatcaaggcgctgcagagcgtcggtcagattattggtgaagtcctcaaacagctagatgacgagagattcatagtaaaggcctcgtctggcccgcgctacgtcgttggatgtagatcaaaggtagacaaggccaagatgaagcagggaacccgtgtggccctcgacatgaccacactcaccatcatgcgcatgctgccccgcgaagtcgaccccctcgtctacaacatgtcgctggaggaccccggtcaggtcagttttgccggtattggtggcttgaacgaccagatcagggagttgcgtgaggtcatcgagttaccgctcaagaaccccgagctgttcttgagagtcggcattaagccccccaagggtgtgctgctgtatggtcccccgggcacagggaagacgctgctggcgagagctgtcgccagtagcttggagaccaatttcctcaaagtcgtatcttccgccattgttgataagtatattggtgaatcagcacgtttgatccgcgaaatgttcggatacgccaaggaacacgaaccctgcatcatcttcatggacgaaattgatgccatcggtggacgacgattctcagaaggtactagtgctgatcgtgagattcagcgaacactcatggagcttctgaatcagcttgatggtttcgactacctgggcaagactaagatcatcatggccaccaaccggcccgacaccctcgacccggccttgcttcgtgccggtcgtctcgaccgcaagatcgagatccccctgccgaatgaggtcggtcgtcttgagattctcaagatccacgcacagaacgtcgtcaccgagggtgacatagattttgagagcgtggtcaagatgagtgatggtctgaacggtgccgatttacggaatgtggtcacagaggcgggtctcttcgccatcaaggcatacagagatgccgtcaaccaagacgacttcaacaaggccgtaaggaaactggccgaggccaagaagctcgagagtaccatggattacaagaaaccgtaa

SEQ ID NO: 27822 - protein, 391 aa, Muscodor strobelii
  misc_feature: SGI Peptide ID NO. 569538
  misc_feature (171)..(358): Pfam Id: PF00004 Pfam Desc: ATPase family associated with various cellular activities (AAA)
  misc_feature (172)..(200): Pfam Id: PF07726 Pfam Desc: ATPase family associated with various cellular activities (AAA)
  misc_feature (3)..(390): NCBI GI: 164424303 Blast Desc: NCU07367 [Neurospora crassa OR74A] gi|157070458|gb|EAA29624.2| NCU07367 [Neurospora crassa OR74A]
  misc_feature (1)..(390): NCBI GI: 145611512 Blast Desc: proteasome regulatory particle subunit Rpt4 [Magnaporthe grisea 70-15] gi|145018786|gb|EDK03065.1| proteasome regulatory particle subunit Rpt4 [Magnaporthe grisea 70-15]
  misc_feature (2)..(390): NCBI GI: 189193421 Blast Desc: 26S protease regulatory subunit S10B [Pyrenophora tritici-repentis Pt-1C-BFP] gi|187978613|gb|EDU45239.1| 26S protease regulatory subunit S10B [Pyrenophora tritici-repentis
  misc_feature (1)..(390): NCBI GI: 46108632 Blast Desc: FG01198.1 [Gibberella zeae PH-1]
  misc_feature (1)..(390): NCBI GI: 116192555 Blast Desc: CHGG_05995 [Chaetomium globosum CBS 148.51] gi|88181908|gb|EAQ89376.1| CHGG_05995 [Chaetomium globosum CBS 148.51]
  misc_feature (1)..(390): NCBI GI: 256735091 Blast Desc: 26S proteasome regulatory complex, ATPase RPT4 [Nectria haematococca mpVI 77-13-4]
  misc_feature (1)..(390): NCBI GI: 154323898 Blast Desc: BC1G_00348 [Botryotinia fuckeliana B05.10] gi|150842577|gb|EDN17770.1| BC1G_00348 [Botryotinia fuckeliana B05.10]
  misc_feature (3)..(390): NCBI GI: 171684681 Blast Desc: protein product [Podospora anserina] gi|170942301|emb|CAP67953.1| protein product [Podospora anserina]
  misc_feature (6)..(390): NCBI GI: 156056681 Blast Desc: SS1G_04071 [Sclerotinia sclerotiorum 1980] gi|154701857|gb|EDO01596.1| SS1G_04071 [Sclerotinia sclerotiorum 1980]
  misc_feature (2)..(390): NCBI GI: 119185236 Blast Desc: CIMG_07324 [Coccidioides immitis RS]
  misc_feature (116)..(358): SWISSPROT Homolog: EC 3.6.1.3 Adenosinetriphosphatase
MASDQEREHALDALRTKLIESREWEAKLKALRLDIKGLEKEYNQTEENIKALQSVGQIIGEVLKQLDDERFIVKASSGPRYVVGCRSKVDKAKMKQGTRVALDMTTLTIMRMLPREVDPLVYNMSLEDPGQVSFAGIGGLNDQIRELREVIELPLKNPELFLRVGIKPPKGVLLYGPPGTGKTLLARAVASSLETNFLKVVSSAIVDKYIGESARLIREMFGYAKEHEPCIIFMDEIDAIGGRRFSEGTSADREIQRTLMELLNQLDGFDYLGKTKIIMATNRPDTLDPALLRAGRLDRKIEIPLPNEVGRLEILKIHAQNVVTEGDIDFESVVKMSDGLNGADLRNVVTEAGLFAIKAYRDAVNQDDFNKAVRKLAEAKKLESTMDYKKP

SEQ ID NO: 27823 - DNA, 1839 bp, Muscodor strobelii
  misc_feature: SGI EST ID NO. CUFF.65655.0
  misc_feature: Variant of the nucleotide sequence at SEQ ID NO 27821
ccggggtccagtaacatgggtcgtggtttcccatgcaggcagcgcaagctgttcgtcaccagccgccagcgcagctccgaacctcatcagctaggaagcctcaacaccctcaacaccatcaccatccgacaatccgcattttctcattcccgactccaaaccacgtcccggaactctaagttgcgaaaattacacacgccgaacaccccaacactacgtatccgagctttgactccgcctccggtgcattcctccatcaccgatcaccgattactagggagcacgcagtcaccccactaagcaacggccatggcttccgaccaggagagggagcatgccctggatgccctgcgcaccaaactgatcgagtctagagaatgggaggctaagctcaaggcgctgcgtctcgacattaagggtctagagaaggagtacaaccagacagaagagaacatcaaggcgctgcagagcgtcggtcagattattggtgaagtcctcaaacagctagatgacgagagattcatagtaaaggcctcgtctggcccgcgctacgtcgttggatgtagatcaaaggtagacaaggccaagatgaagcagggaacccgtgtggccctcgacatgaccacactcaccatcatgcgcatgctgccccgcgaagtcgaccccctcgtctacaacatgtcgctggaggaccccggtcaggtcagttttgccggtattggtggcttgaacgaccagatcagggagttgcgtgaggtcatcgagttaccgctcaagaaccccgagctgttcttgagagtcggcattaagccccccaagggtgtgctgctgtatggtcccccgggcacagggaagacgctgctggcgagagctgtcgccagtagcttggagaccaatttcctcaaagtcgtatcttccgccattgttgataagtatattggtgaatcagcacgtttgatccgcgaaatgttcggatacgccaaggaacacgaaccctgcatcatcttcatggacgaaattgatgccatcggtggacgacgattctcagaaggtactagtgctgatcgtgagattcagcgaacactcatggagcttctgaatcagcttgatggtttcgactacctgggcaagactaagatcatcatggccaccaaccggcccgacaccctcgacccggccttgcttcgtgccggtcgtctcgaccgcaagatcgagatccccctgccgaatgaggtcggtcgtcttgagattctcaagatccacgcacagaacgtcgtcaccgagggtgacatagattttgagagcgtggtcaagatgagtgatggtctgaacggtgccgatttacggaatgtggtcacagaggcgggtctcttcgccatcaaggcatacagagatgccgtcaaccaagacgacttcaacaaggccgtaaggaaactggccgaggccaagaagctcgagagtaccatggattacaagaaaccgtaatcatcttcatcacgaacgagggaatgacaaagaagcatggatagacgggaaaagcgataccacatgacatacaacatgtcccacagcctgattgctagtatccttaattctgcgctcgctgagccgcgagtttgctctcgggctaggatctagagcaggaacagtgtaatactacgtgtatctaggtagatacctacacaaaccctcagctgtgatgagatatatgcgtgctttgagactgtgcgggtgaatagttgtgggttttgatacgtgcctatcgactctgtcccggccatgtcgtatatgtatctgtggtgagtctgcgctgtagtaatataatcttatgcatttcgt

SEQ ID NO: 27824 - DNA, 1209 bp, Muscodor strobelii
  misc_feature: SGI cDNA ID NO. 569539
  misc_feature: Encodes the peptide sequence at SEQ ID NO 27825
atggggctccctctgtataagagtgaatatggcacaatccgtagtttctgcagtttgcctaaggacattcttgagcaagtgttcgccttcctcactgtcgacgatattaagacgcttcgtgaagtttgttccgaattcgacgctatgatcttcaaggatgtctatcagcgcttcttcgcaaccatcaagaagcgcgatagcgagatcacagacgctgcatttttcgatcgcgaggcggccctcagtgatgatgatggcgaagagatgaagcgcatggtcactctcgcatacactccacgcgtcagcccttgcatcaagaacattgttcttgatgtagatgaggatgtcttcagccgacaatatattccgctgtacaatcttctttcacgtgtccgaaacttggagaccctggatctgcgctttctcaaagacctttggcaagggccagaacgtataaggggatatggtatacacctcatgatgatcatgaccagctcgtaccagttcatccactggctcggactcactgtgcgcaattcagtcgacaaccccatgccgtactatcctcctgtcgatttgcctgtccttaagcgtctctgtctttcgcgagcagttatgaacccattccacttggccaacgtgacccagaaactcgtcagtactctcgaacatttagaactagacgaggtccacttcattgatcctgacggtctcgatcgagagccccatgcacggtggtatctatttctgaagccgctgattgatcagcaacgagatggccatggaaaactccgcgaagtgtctttcagggaccgaaacactcacccaggcgactttgtgcttcatcatctcagagggtcttggtgttggcttgagccgcttgaccatctttcagactctgaaatgttttctcgcttctgttattcgggccttgacgcgacaggcgtgcttgagtggctcctgcacaaaatcgtgcacggttggtaccaggaagacgggtcactggaagggggtccagattttggcgttgacggcgttgaccacttttttcaccagtggccgatttggacgtctccgggaaggctcataactgacgataggggagaacaggagtgggacggttttgacaagttcgagatggaggacatcaccctttatgagatcatccaggccaggtacagcactacggatctaactgaggggtcctaa

SEQ ID NO: 27825 - protein, 402 aa, Muscodor strobelii
  misc_feature: SGI Peptide ID NO. 569539
  misc_feature (14)..(46): Pfam Id: PF00646 Pfam Desc: F-box domain
MGLPLYKSEYGTIRSFCSLPKDILEQVFAFLTVDDIKTLREVCSEFDAMIFKDVYQRFFATIKKRDSEITDAAFFDREAALSDDDGEEMKRMVTLAYTPRVSPCIKNIVLDVDEDVFSRQYIPLYNLLSRVRNLETLDLRFLKDLWQGPERIRGYGIHLMMIMTSSYQFIHWLGLTVRNSVDNPMPYYPPVDLPVLKRLCLSRAVMNPFHLANVTQKLVSTLEHLELDEVHFIDPDGLDREPHARWYLFLKPLIDQQRDGHGKLREVSFRDRNTHPGDFVLHHLRGSWCWLEPLDHLSDSEMFSRFCYSGLDATGVLEWLLHKIVHGWYQEDGSLEGGPDFGVDGVDHFFHQWPIWTSPGRLITDDRGEQEWDGFDKFEMEDITLYEIIQARYSTTDLTEGS

SEQ ID NO: 27826 - DNA, 1575 bp, Muscodor strobelii
  misc_feature: SGI cDNA ID NO. 569540
  misc_feature: Encodes the peptide sequence at SEQ ID NO 27827
atggcaaccagtcaagaaaacccgccaatactacgccgtgattcgccttcgcccgaatcaacaccggtccggccccgcgagcccaggtctgagatgcctcgctgcctatcaactggctcgactatgtcacggtcttccagcaccgatggctcgtaccgagactccttagggagctcgcgccagtcttctgcaagttacaggtcgaggatatccgacatcagcttcgcctcttcccggcaatcaaccataagcaacatggacaagccctcaaagcgtcgcggattctcaagacctcagggcacagacttcgccgcaagtgcaaagcatcgagacagtgttttaagtctgggcagcatatcacaccttcagtattacttcgctaggactgggttactggatggcaagggaggtcagctggctaggaaacggcatccccgagccacactggacctgtcgtcgttggagaactcgtctctccttagtccgaggctatcagcatctgatatggattcttcatatgcctcaatgagcagcagccctgatctaggatcgcagttgtttggcgaaggacatatggtagaatcacctacttacgaccacgaaggttttgattcagatgagttcgatgaaacagatccagatatattgccaccaaccacaagcacatacaatcaccgagaaaagcccgtacccaaaccgcccacaatcgaagagctcaaatcagacctgacccaagctctggacgctgcagccgaggtattgactaaggcagggcctacttcagggggatcggcatctccagcctcaacagactctcccaaatctggacctcaatggtaccagatccaaggcatgcaggtgctcgacgttatgacattagctattggcaaagccaaaatgtactacacagcacacgaacatccagaccgactagacaccatcaaatccgagaaggaaatccgctcagaactgctggctgtcatggaggtgctgaaacacacggcaactaggaattttgctggtggtttccgtgacgacgagcaccaggtgatgagctcatggatacacagcattcgcacgatgctgcgtgaggaggaagaaattgagaaagcagagaaggatgagagggcgagctggaattggttgaagggtgactggacaggtcgagaaatcgaacgggagttcgcttttctgtcgtctatcgatagtgaagccgagccccttcctccctatacacctatcgaagccgcaggagagttgccaacaacctttctggagagtatgcaaaacggcctccggctcgtcaaattgcacaatgccgccgtgaagaaatcccgacggcggttcggcgcgatcggctcgtttcatactgatacgcagaagccatatcgatgtgccgataacctgcggtactggatcaaagccgctgagctgcggtgggaggtcatgctcaaggtcgatgtgatgggtgttgtttacggcaagtctgaggcctggaaagactttgaggctgctatctggcagtggtgccgtaaggtgagggaggaaatcacggcagaatgggagaagaactga

SEQ ID NO: 27827 - protein, 524 aa, Muscodor strobelii
  misc_feature: SGI Peptide ID NO. 569540
  misc_feature (1)..(517): NCBI GI: 256735225 Blast Desc: NECHADRAFT_90104 [Nectria haematococca mpVI 77-13-4]
  misc_feature (1)..(522): NCBI GI: 46107340 Blast Desc: FG00553.1 [Gibberella zeae PH-1]
  misc_feature (2)..(520): NCBI GI: 261356191 Blast Desc: conserved [Verticillium albo-atrum VaMs.102]
  misc_feature (1)..(520): NCBI GI: 39941486 Blast Desc: MGG_05654 [Magnaporthe grisea 70-15] gi|145022342|gb|EDK06362.1| MGG_05654 [Magnaporthe grisea 70-15]
  misc_feature (1)..(524): NCBI GI: 116180608 Blast Desc: CHGG_00932 [Chaetomium globosum CBS 148.51] gi|88185229|gb|EAQ92697.1| CHGG_00932 [Chaetomium globosum CBS 148.51]
  misc_feature (1)..(523): NCBI GI: 154323922 Blast Desc: BC1G_00360 [Botryotinia fuckeliana B05.10] gi|150842589|gb|EDN17782.1| BC1G_00360 [Botryotinia fuckeliana B05.10]
  misc_feature (5)..(523): NCBI GI: 156035992 Blast Desc: SS1G_12682 [Sclerotinia sclerotiorum 1980] gi|154698090|gb|EDN97828.1| SS1G_12682 [Sclerotinia sclerotiorum 1980]
  misc_feature (1)..(524): NCBI GI: 164423363 Blast Desc: NCU08599 [Neurospora crassa OR74A] gi|157070059|gb|EAA34795.2| conserved [Neurospora crassa OR74A]
  misc_feature (68)..(521): NCBI GI: 242765085 Blast Desc: conserved [Talaromyces stipitatus ATCC 10500] gi|218724099|gb|EED23516.1| conserved [Talaromyces stipitatus ATCC 10500]
  misc_feature (95)..(523): NCBI GI: 240105749 Blast Desc: CPC735_053120 [Coccidioides posadasii C735 delta SOWgp]
MATSQENPPILRRDSPSPESTPVRPREPRSEMPRCLSTGSTMSRSSSTDGSYRDSLGSSRQSSASYRSRISDISFASSRQSTISNMDKPSKRRGFSRPQGTDFAASAKHRDSVLSLGSISHLQYYFARTGLLDGKGGQLARKRHPRATLDLSSLENSSLLSPRLSASDMDSSYASMSSSPDLGSQLFGEGHMVESPTYDHEGFDSDEFDETDPDILPPTTSTYNHREKPVPKPPTIEELKSDLTQALDAAAEVLTKAGPTSGGSASPASTDSPKSGPQWYQIQGMQVLDVMTLAIGKAKMYYTAHEHPDRLDTIKSEKEIRSELLAVMEVLKHTATRNFAGGFRDDEHQVMSSWIHSIRTMLREEEEIEKAEKDERASWNWLKGDWTGREIEREFAFLSSIDSEAEPLPPYTPIEAAGELPTTFLESMQNGLRLVKLHNAAVKKSRRRFGAIGSFHTDTQKPYRCADNLRYWIKAAELRWEVMLKVDVMGVVYGKSEAWKDFEAAIWQWCRKVREEITAEWEKN

SEQ ID NO: 27828 - DNA, 2256 bp, Muscodor strobelii
  misc_feature: SGI EST ID NO. CUFF.65633.0
  misc_feature: Variant of the nucleotide sequence at SEQ ID NO 27826
gcgacgacagatgggcaaccgcgagaaagagcaaggccaaactcaaagaggcaagcagcaccccctgacgccgtgtacaataataaattgccttcgtcaatgatcagccttgattacttgacacctcgtttcatcttgcacatcccatgccgcctgcataaaacagtcgtcgctgccttctgccctgcaccgttgcatcctgttaccacgttgtcaagctgtagaacgaacacggccggagtctttctttgtcttgcgatttggaacagctgcaagaacattcaagtattttgaatctttgtacctaaacagacttgcttcgacttgcacctatcgccgactgatccgaacaaccaacttgcgacttcacctagtctcaaccttagatcagctgctttacagcatccacacaaccgtcaatatggcaaccagtcaagaaaacccgccaatactacgccgtgattcgccttcgcccgaatcaacaccggtccggccccgcgagcccaggtctgagatgcctcgctgcctatcaactggctcgactatgtcacggtcttccagcaccgatggctcgtaccgagactccttagggagctcgcgccagtcttctgcaagttacaggtcgaggatatccgacatcagcttcgcctcttcccggcaatcaaccataagcaacatggacaagccctcaaagcgtcgcggattctcaagacctcagggcacagacttcgccgcaagtgcaaagcatcgagacagtgttttaagtctgggcagcatatcacaccttcagtattacttcgctaggactgggttactggatggcaagggaggtcagctggctaggaaacggcatccccgagccacactggacctgtcgtcgttggagaactcgtctctccttagtccgaggctatcagcatctgatatggattcttcatatgcctcaatgagcagcagccctgatctaggatcgcagttgtttggcgaaggacatatggtagaatcacctacttacgaccacgaaggttttgattcagatgagttcgatgaaacagatccagatatattgccaccaaccacaagcacatacaatcaccgagaaaagcccgtacccaaaccgcccacaatcgaagagctcaaatcagacctgacccaagctctggacgctgcagccgaggtattgactaaggcagggcctacttcagggggatcggcatctccagcctcaacagactctcccaaatctggacctcaatggtaccagatccaaggcatgcaggtgctcgacgttatgacattagctattggcaaagccaaaatgtactacacagcacacgaacatccagaccgactagacaccatcaaatccgagaaggaaatccgctcagaactgctggctgtcatggaggtgctgaaacacacggcaactaggaattttgctggtggtttccgtgacgacgagcaccaggtgatgagctcatggatacacagcattcgcacgatgctgcgtgaggaggaagaaattgagaaagcagagaaggatgagagggcgagctggaattggttgaagggtgactggacaggtcgagaaatcgaacgggagttcgcttttctgtcgtctatcgatagtgaagccgagccccttcctccctatacacctatcgaagccgcaggagagttgccaacaacctttctggagagtatgcaaaacggcctccggctcgtcaaattgcacaatgccgccgtgaagaaatcccgacggcggttcggcgcgatcggctcgtttcatactgatacgcagaagccatatcgatgtgccgataacctgcggtactggatcaaagccgctgagctgcggtgggaggtcatgctcaaggtcgatgtgatgggtgttgtttacggcaagtctgaggcctggaaagactttgaggctgctatctggcagtggtgccgtaaggtgagggaggaaatcacggcagaatgggagaagaactgaacaacggcatgttagcgttgttggcaactcgtatttttatgatcatgataatgatggaagtcaatgatagagtaaaggcctggcttcgtcttgtctgccctggcacctagagctggaacaaagagcttgaagaagcaagctcatagaagatcgacttgataatgttatgcgagcttgagatcgcgtaatacacaataataccccaaaggacctaatacagagacctaagtgttgccgtctgaatctgtatttaaaaacgt

SEQ ID NO: 27829 - DNA, 3141 bp, Muscodor strobelii
  misc_feature: SGI cDNA ID NO. 569541
  misc_feature: Encodes the peptide sequence at SEQ ID NO 27830
atgacaggtctatctccctcaccggctccttcgcctcaaatcaaccctcaccaaccatctccatctcttgcacccacggcctccgcttttctggatccagggtcgtcgcctgcatccaacttcgcgccagatcgacaagatgctgctgccgacccgccagccgaccataacaccgttctgaccttttcagacctctccccaaacctcacccatctcggcccctccgacccccagcaaacgccgtctcctaaatccatcaccaaacctagtatttacggccgcagtactagcaacagcccagcttcggcaacacttcctcccatcaagcctcaagctcgaaagcctagccccggtctggcagcgcgtctgaaagcattgggctttggcagcgcggcgaaggcatcgaccgaccaggcgcaaatcgatcacatcggtcgacttcccgaagaccaattgcggtcgctcgatctaaatcatcagatcaactcggccgggctcgttgtcgagcggcgcggtcgaccgtggaagggtgcaggcgcccctctgcatctgttgaggtccaagtcgagccgcgactcgttccgcgcactaggcggcgacgagaatagagtgccgcccaacgaccaaaccgagtccaagccacagcctgagcttctgcccgaaatcgcgcccgcaccgccgttggagatggacacaaacaagtacaggctgccggatcacaccaacggaaatggcactaaggcaacgccagagacacgccgcgaacatctcgaacgagacacccgtgctcccgagctcgagaaggagctcccgcctccgcctccgcccgccgacctcacaccaccagagcccaccaatgccgcagcagcaccggactcagcttcggatctcccttcctacttcaaccctctcgggctccaacgacctggctcgatttacacgatatcccgcgcctctttcgccaaccagcttgctcaattgactgccctccagctgcctgatgctgagcttttatctagcaaggttgccgctatccccacagcacaggccgccacgagagcactcatcggagccgccgaacagatcaggagctggatcgccaaggcctccgaagtcatcgacgggctcgacagtgaagacgatgtcgagtgggctgcagcaggagggagggagggctacgaggaggtcgaaaatgcgattacgaggttcgaggagctcatcaacgtctacgtcacggccatcgaagatctacaaaatcgcaaagatatcgccagcgtcacaaacgatgatcttcagaatgccgttactcagatggaggccatcatgacggagtggagcaagatacgtcgcaccctgaatggtgccaaaggtcaagtggaaaccgccatggaatgggaggagctctggaacatggtcctgggagacatacaaaatgaaatggatgatctgagccgacttgtcttcgagatggaggagcgtaggcacaagtctatcatggctgtctctggcggagatggtgttgacatcggcgatctcgaaacaatcgtcgaagagactcctccggccgttgcgcgtaacaaccgcttcagcttaccggcatttcctatgagccccagttcaccaggcacgccaacccttacgcaagacgactcgagtctgctcgcactgtttgcacggatgcagccgctacgcgcttccttggatttcttacccatgagactttccgtattcgaagctcgggcatctggagcatttcccaccgcgtgcgacgaactcgaaatgagaaggacgggtcttgaagccagcttcaaaaagcttgaaaaggacgccgattccctgagaagagagctcggcgaggacaagtgggttctagtcttccgaggtgccggaagacaggcacagaaaatgatcgagtcggtggatcgcagtatggctaagcttcgtgaaggcgtcgaccagggcctccagttctccaacccgcctgtcatgggcaagaagatcgagagttatgacgccaagaagatgcactacgggccggccattgagcgtgttctttctatcatcgacaagggtgtcaaggacaggctgaccgtcaatggggaaatattacgattgcacacggaaatgcagtcacggtgggaaggcctgaagcagcagatgcaggctatggacgccatgttagaagacattcaagcagaccaacgaagccagcaacttcgagattctatctcaagcatgctgtcaaacgacaggtcaactgttgccagtggtaatgagacacctggcagctcgccaccttcatcagttgtcatgtccagcctcggtttggaacccgtcacacctctgcctggcaaaaagagtcgctctgctagtggtagtggcattcctcagttctcttctacccgtaggctcagctcgacaccagctacttcttctgcgaggcggacgcccgggtcgaggttatctacgcttgctgggcaccaagtcagtttttcgacgccctctagaagcgggtccgcgacacctcttggtagccgtctgcaaaagtcaacatcaagtgtagccgacaaccgaccacgatggaacggatctacaagtacgcgagactcagacgtgggacataatttcaaacctctcaccctcaccacgcctagcccatacgcgaaaagatcaccaactccggtgcgctctgtgtcagcaatgaccccaggttctcgtgaatctaggttaccgctgcggagtccattatcaagagagacatccgcctccccagcccctggggattctcggttgaaaggaaatggcaacccaaggctttctttccgcgagcggctcgcagcagcttctcctggcccatatagtcagcaaacactatcagcaccgaagcctcgtcttaatacgaaagcctctgctagtgtccttgacaatcgcagggcatctctacaaccgccaagggcattgggtgctccagccgacgtccagcaaagatcagttagttccctggcttcaactagacgcacctccatgctccctcagccaaagtcacatccacatacagcgcctactggccgtataagtgcagctgggtcgcgaaagagcaataatgcgccggacgataacaagccgcggtggcgtttctaa

SEQ ID NO: 27830 - protein, 1046 aa, Muscodor strobelii
  misc_feature: SGI Peptide ID NO. 569541
  misc_feature (319)..(1037): Pfam Id: PF08580 Pfam Desc: Yeast cortical protein KAR9
  misc_feature (58)..(1029): NCBI GI: 116180610 Blast Desc: CHGG_00933 [Chaetomium globosum CBS 148.51] gi|88185230|gb|EAQ92698.1| CHGG_00933 [Chaetomium globosum CBS 148.51]
  misc_feature (60)..(1045): NCBI GI: 261356190 Blast Desc: conserved [Verticillium albo-atrum VaMs.102]
  misc_feature (113)..(1046): NCBI GI: 256734512 Blast Desc: NECHADRAFT_74850 [Nectria haematococca mpVI 77-13-4]
  misc_feature (16)..(1045): NCBI GI: 46107338 Blast Desc: FG00552.1 [Gibberella zeae PH-1]
  misc_feature (89)..(1045): NCBI GI: 171687589 Blast Desc: protein product [Podospora anserina] gi|170943756|emb|CAP69408.1| protein product [Podospora anserina]
  misc_feature (230)..(1045): NCBI GI: 119507936 Blast Desc: [Glomerella acutata]
  misc_feature (109)..(1041): NCBI GI: 156058065 Blast Desc: SS1G_04764 [Sclerotinia sclerotiorum 1980] gi|154702549|gb|EDO02288.1| SS1G_04764 [Sclerotinia sclerotiorum 1980]
  misc_feature (107)..(1046): NCBI GI: 145615524 Blast Desc: MGG_05652 [Magnaporthe grisea 70-15] gi|145022340|gb|EDK06360.1| MGG_05652 [Magnaporthe grisea 70-15]
  misc_feature (106)..(1015): NCBI GI: 85111638 Blast Desc: NCU08600 [Neurospora crassa OR74A] gi|28925792|gb|EAA34796.1| [Neurospora crassa OR74A]
  misc_feature (113)..(1046): NCBI GI: 119193342 Blast Desc: CIMG_01048 [Coccidioides immitis RS]
MTGLSPSPAPSPQINPHQPSPSLAPTASAFLDPGSSPASNFAPDRQDAAADPPADHNTVLTFSDLSPNLTHLGPSDPQQTPSPKSITKPSIYGRSTSNSPASATLPPIKPQARKPSPGLAARLKALGFGSAAKASTDQAQIDHIGRLPEDQLRSLDLNHQINSAGLVVERRGRPWKGAGAPLHLLRSKSSRDSFRALGGDENRVPPNDQTESKPQPELLPEIAPAPPLEMDTNKYRLPDHTNGNGTKATPETRREHLERDTRAPELEKELPPPPPPADLTPPEPTNAAAAPDSASDLPSYFNPLGLQRPGSIYTISRASFANQLAQLTALQLPDAELLSSKVAAIPTAQAATRALIGAAEQIRSWIAKASEVIDGLDSEDDVEWAAAGGREGYEEVENAITRFEELINVYVTAIEDLQNRKDIASVTNDDLQNAVTQMEAIMTEWSKIRRTLNGAKGQVETAMEWEELWNMVLGDIQNEMDDLSRLVFEMEERRHKSIMAVSGGDGVDIGDLETIVEETPPAVARNNRFSLPAFPMSPSSPGTPTLTQDDSSLLALFARMQPLRASLDFLPMRLSVFEARASGAFPTACDELEMRRTGLEASFKKLEKDADSLRRELGEDKWVLVFRGAGRQAQKMIESVDRSMAKLREGVDQGLQFSNPPVMGKKIESYDAKKMHYGPAIERVLSIIDKGVKDRLTVNGEILRLHTEMQSRWEGLKQQMQAMDAMLEDIQADQRSQQLRDSISSMLSNDRSTVASGNETPGSSPPSSVVMSSLGLEPVTPLPGKKSRSASGSGIPQFSSTRRLSSTPATSSARRTPGSRLSTLAGHQVSFSTPSRSGSATPLGSRLQKSTSSVADNRPRWNGSTSTRDSDVGHNFKPLTLTTPSPYAKRSPTPVRSVSAMTPGSRESRLPLRSPLSRETSASPAPGDSRLKGNGNPRLSFRERLAAASPGPYSQQTLSAPKPRLNTKASASVLDNRRASLQPPRALGAPADVQQRSVSSLASTRRTSMLPQPKSHPHTAPTGRISAAGSRKSNNAPDDNKPRWRF

SEQ ID NO: 27831 - DNA, 4993 bp, Muscodor strobelii
  misc_feature: SGI EST ID NO. CUFF.65642.0
  misc_feature: Variant of the nucleotide sequence at SEQ ID NO 27829
cgtacatagatatggtgattctattactttgttatcttgctatcttgcctcctctttagttctgatttctgaaacgactctcttgactttcttctcctaccaagtaaccatacctataatacttcacacttttacctcgtgcatccttccactccctgacgccgtctttaagcacttagccggctttctcaaacaacccaattgaaacatcagtaacgctcccgctctttgcgacacacagaacacagaagactagggcagaaaggaagaagcaaaggacaaaattgactttaaagcaaaagggattctggagatggtattagactgctgatgcatatctaaattaaaggacggcttcgacaatcgacctgcataacgctacgagctaccaaatcatccacctgctagaaacaacaccggctccgagtttacttacagcaaagtaacccctgatttcatcccctgatcctaaccgtggagcgcttggcttccaactcgtgctgtcccgcattccattcgattttgggcacctttgcgcccccgtcttgagattccagctgtcccggagccaatcactattctcttgcattcctgtccgcacctccgtctgacaggcgacttagtagcgagggacagcaccagcaggagtaggtaatacaatacacgcagcagctcaacgcgtcgccagacgtggcaaacgtgttctactctgccgtctcacatgttatttcaaccattgcgacaagtttcccaaccaccgctaggaccaccctcattgctcaacgtggtgggatattaagtttcgatagaagtgcaatccgtctaagacactgtgcgccggctcaattggctccctctgcaccgattgtgggtgactggcaagggatatctacaatagaaaatcatggtctgcagtgttccggctgactggacactccaactctacgacacacggcccgcacgcaggccaacgcagcgcatgggccgagcgaagcagttgattgcttgattaatccgttcactcacccacgacaccacataatagtagacgaggtaatagaggtgtaaatgacaggtctatctccctcaccggctccttcgcctcaaatcaaccctcaccaaccatctccatctcttgcacccacggcctccgcttttctggatccagggtcgtcgcctgcatccaacttcgcgccagatcgacaagatgctgctgccgacccgccagccgaccataacaccgttctgaccttttcagacctctccccaaacctcacccatctcggcccctccgacccccagcaaacgccgtctcctaaatccatcaccaaacctagtatttacggccgcagtactagcaacagcccagcttcggcaacacttcctcccatcaagcctcaagctcgaaagcctagccccggtctggcagcgcgtctgaaagcattgggctttggcagcgcggcgaaggcatcgaccgaccaggcgcaaatcgatcacatcggtcgacttcccgaagaccaattgcggtcgctcgatctaaatcatcagatcaactcggccgggctcgttgtcgagcggcgcggtcgaccgtggaagggtgcaggcgcccctctgcatctgttgaggtccaagtcgagccgcgactcgttccgcgcactaggcggcgacgagaatagagtgccgcccaacgaccaaaccgagtccaagccacagcctgagcttctgcccgaaatcgcgcccgcaccgccgttggagatggacacaaacaagtacaggctgccggatcacaccaacggaaatggcactaaggcaacgccagagacacgccgcgaacatctcgaacgagacacccgtgctcccgagctcgagaaggagctcccgcctccgcctccgcccgccgacctcacaccaccagagcccaccaatgccgcagcagcaccggactcagcttcggatctcccttcctacttcaaccctctcgggctccaacgacctggctcgatttacacgatatcccgcgcctctttcgccaaccagcttgctcaattgactgccctccagctgcctgatgctgagcttttatctagcaaggttgccgctatccccacagcacaggccgccacgagagcactcatcggagccgccgaacagatcaggagctggatcgccaaggcctccgaagtcatcgacgggctcgacagtgaagacgatgtcgagtgggctgcagcaggagggagggagggctacgaggaggtcgaaaatgcgattacgaggttcgaggagctcatcaacgtctacgtcacggccatcgaagatctacaaaatcgcaaagatatcgccagcgtcacaaacgatgatcttcagaatgccgttactcagatggaggccatcatgacggagtggagcaagatacgtcgcaccctgaatggtgccaaaggtcaagtggaaaccgccatggaatgggaggagctctggaacatggtcctgggagacatacaaaatgaaatggatgatctgagccgacttgtcttcgagatggaggagcgtaggcacaagtctatcatggctgtctctggcggagatggtgttgacatcggcgatctcgaaacaatcgtcgaagagactcctccggccgttgcgcgtaacaaccgcttcagcttaccggcatttcctatgagccccagttcaccaggcacgccaacccttacgcaagacgactcgagtctgctcgcactgtttgcacggatgcagccgctacgcgcttccttggatttcttacccatgagactttccgtattcgaagctcgggcatctggagcatttcccaccgcgtgcgacgaactcgaaatgagaaggacgggtcttgaagccagcttcaaaaagcttgaaaaggacgccgattccctgagaagagagctcggcgaggacaagtgggttctagtcttccgaggtgccggaagacaggcacagaaaatgatcgagtcggtggatcgcagtatggctaagcttcgtgaaggcgtcgaccagggcctccagttctccaacccgcctgtcatgggcaagaagatcgagagttatgacgccaagaagatgcactacgggccggccattgagcgtgttctttctatcatcgacaagggtgtcaaggacaggctgaccgtcaatggggaaatattacgattgcacacggaaatgcagtcacggtgggaaggcctgaagcagcagatgcaggctatggacgccatgttagaagacattcaagcagaccaacgaagccagcaacttcgagattctatctcaagcatgctgtcaaacgacaggtcaactgttgccagtggtaatgagacacctggcagctcgccaccttcatcagttgtcatgtccagcctcggtttggaacccgtcacacctctgcctggcaaaaagagtcgctctgctagtggtagtggcattcctcagttctcttctacccgtaggctcagctcgacaccagctacttcttctgcgaggcggacgcccgggtcgaggttatctacgcttgctgggcaccaagtcagtttttcgacgccctctagaagcgggtccgcgacacctcttggtagccgtctgcaaaagtcaacatcaagtgtagccgacaaccgaccacgatggaacggatctacaagtacgcgagactcagacgtgggacataatttcaaacctctcaccctcaccacgcctagcccatacgcgaaaagatcaccaactccggtgcgctctgtgtcagcaatgaccccaggttctcgtgaatctaggttaccgctgcggagtccattatcaagagagacatccgcctccccagcccctggggattctcggttgaaaggaaatggcaacccaaggctttctttccgcgagcggctcgcagcagcttctcctggcccatatagtcagcaaacactatcagcaccgaagcctcgtcttaatacgaaagcctctgctagtgtccttgacaatcgcagggcatctctacaaccgccaagggcattgggtgctccagccgacgtccagcaaagatcagttagttccctggcttcaactagacgcacctccatgctccctcagccaaagtcacatccacatacagcgcctactggccgtataagtgcagctgggtcgcgaaagagcaataatgcgccggacgataacaagccgcggtggcgtttctaaactcgcagtcaaaatacccaatttcaagctcattcggctcatacactcatccttcattcgccgtgccggttacacatatcacaaacagtcttccagctggccttcgccaacacgcatctcgtgcaggctgcactcgttcaagcctccccttgaatattatcatcctccgatctcacaccagcactatgctgcccaagcagcatgagcttacccgccacaatactccatcgtaataatttccgggcagtctgcccatttttcgttagtgaatcacacaagttgtatctgccgatgtacggacccccgcaagaactcttgagcatacagcattggcgcacgttgggttgagagctcaggcgtttttgagggacagaccgaccagtctttgttttttccaatgtgtttttattcattcgtcagtcatcaaagatacctccacggcaattgtattcagagggaattcggagaccgaaggctgtgattgtgttggaatttgttgcttcgcttgaaagaggctctcatgggaagagagcaagaagacagaaactactgtatcgtgtacgggtgctagtggtccgaccgaaggggacggggagtagtgtagaattttagtaggaatcaagattctacaacaaagatgactatgtccatgataaaattgcgttttgatctgaagtattgagtattgtcattggtaaattacgactatagacaacacaggtgatacacgattagttgagcaccgcacgcatgaccgttggtttgccaacccggcttagtgatt

SEQ ID NO: 27832 - DNA, 807 bp, Muscodor strobelii
  misc_feature: SGI cDNA ID NO. 569542
  misc_feature: Encodes the peptide sequence at SEQ ID NO 27833
atgtcttcgcatgacgacctaaacgcgactgccggctatctcggcgggggcagtgaaccgtccaccaagaaacgccgaaagcaatcagatattccacaacgtaagaaattagggctgaaagatttggatttcgaaacctccgttcccgatgccttgacctgcagagcctgcttcgaccacgcagcggcatcatacgatccgggcctcggaaaacctttggttatagcatgtataatggattcaatcacctcttcggcttgccatagatgtcgcaacaagggagcctgcgagccgtcccgggacctcttcctcgtcgcgagtgatatcgaccggagcgagatcgacgcctacggcactgttacatgctatgcgcctctgcaagtccgcaagggtgtcgcacatgctcagtatcgtcttctaatggcttttatcaccctagtaacgacgcaccgcagacagtggcgtctgatggaaagcaatgaccagaccgagcacagtggcgcttacgctaccgccgtcgttgagcgggagaatcagacctcgcgccaaatagacaagttgccattggacgctgacatcgacgaactcactattcatcaacgcttgtctctattgcgcctgggctataaggatcatggatacggagcttgggtcgtagcgctgaggcgtttcatgagcgaggctcgtactatcgcgcgacagctttggccccagggtcctgatgaacattctggtgtcttagttgacaatgaactgtttacggaatggaacgaagagattgccattgagattgcccctatttactag

SEQ ID NO: 27833 - protein, 268 aa, Muscodor strobelii
  misc_feature: SGI Peptide ID NO. 569542
MSSHDDLNATAGYLGGGSEPSTKKRRKQSDIPQRKKLGLKDLDFETSVPDALTCRACFDHAAASYDPGLGKPLVIACIMDSITSSACHRCRNKGACEPSRDLFLVASDIDRSEIDAYGTVTCYAPLQVRKGVAHAQYRLLMAFITLVTTHRRQWRLMESNDQTEHSGAYATAVVERENQTSRQIDKLPLDADIDELTIHQRLSLLRLGYKDHGYGAWVVALRRFMSEARTIARQLWPQGPDEHSGVLVDNELFTEWNEEIAIEIAPIY

SEQ ID NO: 27834 - DNA, 5457 bp, Muscodor strobelii
  misc_feature: SGI cDNA ID NO. 569543
  misc_feature: Encodes the peptide sequence at SEQ ID NO 27835
atgactcgaaacaacctcagggaccatctttcttggctactggctcaaaagcatcggtccaacagcccgcacgcgccctcgctgccgcctgcgcccacgcgcgcccacacgtcctcgggagtctcgacttcctcgcccaacgacaacgacgacgatgacgacagcacacggttctacacacctactactgcgctttcaccagtcacgcgtaaagacgagcacgagacgcagctcgccacattgtatccaccgttacctgctgtgactagccgcccctccaccacctccaccacatccaatggggccatatcacaaagtgcgcggccgcaggacaaccgcactggcagcgaggtagcggaacaggaggacatggctagtcgtgtgcccaaatctgcgccgagaaggccgggcctggtgctggcccaggagcggcgccaggaacaactgctcacacccacctccaccactggccgctcgttgtcccgcaattatagcacctttcttgctagcaacaaggcggcccaggaaaggcctgcctctcgcaatggcacctcgggctctgtaacacagtcggagcgggcttttctcacacctggcgccaccctctccacggcccacacgtcggatatggttgatttgactgatgacaatggcacctctcctgtgcattcaacggccttcggaagtgatgttcggctatggcgcgaagactttgcttctcgacccgagcccctagatcctagcgagaattcggtggcatttggcagtgaaaaggtattgtgggacgaggagcatgccagccgtccagcccctgtctctccagatgagcattctgtcggcttcggcagcagcatagttctttgggaagaggaggctgcttcacgtcccgaacctctatctgctaagcgtgggaagaaacggaaaagtgatcacatgacccagcctccagcgtccaccactaccgacgactttcctgacatcctggatcttcttgctgacgacgaaagcattctactttctcacgcaaaacactcctcgcccacgaagtcacccgctaagagcaaacgaaagttcagccccagcgagacaccgtcgaaaaagggcattctggccaacccgagcgatcggattgcccccttggatggtacgccctccggtagagcaagcagccgtcggcgcactcccttcagaacgccccggaaagtacacaaatcggagacagaccgggccctcgcagtcaaaccagatccgatgctcgtggatactgattccgtattcggaagcgatgtagaacatgttcccaaagcccagacacagcaatcgaaatctatgaaatttgatgagcgtgtcattcaagactcagacgatgaacccatgacaccggtgcaattcgacgagtctgaaagccctatcgtacaatcctctaaagttgcaaaacgcctattccaagaaacctctcctgaagccaagccgtccatacgggatacacccctgaaatcccagactccgaatccaagccagtctcaagctcgacgtcgctcgcccaagaaaagcaacgaaccgcaactgtctgaagtcaacccgagccagcctcttaccggtgtcaaaaaggctgactctgaagagcctaacccgagtagtcaagttaccgtcatccacgatactgaagatcttgcaaatgttctccagctgcttcttcgcgacccatccatcattgagatgcaacgctcatttttggcagaagaattgcgtcaaaaccgcgaggacttcaaaagatcacttcaggaagggtcattgacgccaagggaacgtctgaggcgtgacaaggagcagttaacgaagaagcaagcatccttggatgccttatcgaacgagtatcggtcttatgaagaagtattggccagaagagatgctctaatcactcgcatatctgacgcctacgaacatgacatcaacaccgaggacgacgaagcgcatctacaggaactagacgatgtgctcaagacacgccaacaaccgctgaagattcttctatataatgctggaattgatagccctggccgatttgaagaagaaaaatcctcgaatgttcaacatgcccaagcacagtcttttgtgcaggccacacagcacgcccaagcaacgccatcaagaagccattctcgacacactacacacgttccggggacagcaagttcacaagtcattctacagacacaaatacctcctcggctcgatgccactcagtccacaatggaaccgcttttggaagatacgtgcagcccgaaaggcgcaagcaaccgcccctcaacttcgggaacgccgcgtcctacaccacggtataacagtcgaatcccgccagccaccacaaagaccatcgcaaggtcaacacctcacccaacatttgacatcattgaaggcgacgacgagaatctcttcgaagttgacgacccagtgcttgatatgaacacattccgcacttcacagccgcaacaccactctagtcacaagcagaaaggcaatccggcgaggaaagcatcgccccaaaaacaattctatgaaagcgattacagtgatggaatagacatttctgagctagctcaggaggttgaatatcagcagtcgtcagctgaaatgacgcttcctaagccttcgcgaccagctctctccgagacttcgggcaatattggcgcgcggaaagataaggtggcagagaagcgcaatcagagcgtagagggctcacatgttgcccccgaacagaagagatttccatggtacaaagatgtgaagcgagcactgaaagatcgtttcaggatgagccgttttcgacataatcagcttgaggccatcaatgccacgctttccggaaaggatgcattcattcttatgccgactgggggtggaaagtctctatgttatcagcttcctgctgtcattgctagtggcaagacaaaaggtgttaccgtcgttgtatcgcccctcatcagtttgatgcaagatcaagtcgaacatttgagtaatctcaacatacaggcgaagactttcaacggcgcaaccccgaaatccgagcgagctgaaatcatggagcacctgaggggaaacttccccgagaactggttgcagcttctctacgtcacgccggagatgataaatcaaagtcaggccttcatcagtggactgacctccctctacaagaacaagaagcttgctcggcttgtcattgatgaggcacattgcgttagccagtggggacatgattttcgacccgattacaaagacttgggtagttttcgagaacgatttcctggcgtccctttgatggcccttactgctactgctacgcaaaacgttattatggatgtgaagcacaacttgaatatcgacgagtgcgaagaattctcccaaagtttcaacagacctaacttgtattacgaagttctcaggaaagagaaaaacaatatcgaaacgattgctggactgatcaattcaaaatatcctaaccagactgggattgtgtacgcgctctcgaggaattctaccgagaaaattgctcaacaactacgggatcatggcatcaaagctcatcattaccacgctcacattgaagcggctgccaaagcgcaaatccaaaaagattggcagagagggaaaatcaaagtcgtcgttgctactatcgctttcggaatgggaatcgacaaacctgatgtgcgatttgtcattcaccactcggtacctaagagtctcgagggctactaccaagaaactggccgtgcaggtcgtgacggaaagcagtctgaatgttatctctactttggatatgcggatgtcgtgacgcttcgaaaaatgatcaccgagagcgaagatgcgagtgcccagcaaaaggagagacagatgaagatgttgaatacagtagcagctttctgtgataaccaaagcgattgtcgtcgagtcgagatcctccgctacttcggcgaaacgttcgataaggcccaatgccacgcaacgtgtgataattgcatgtctactgatcagttcgagaagaaagatgtcaccaaatacgcgcttgctgttttgcagatcatcgattcggagaagatcgatgacaagtttcaggggaaggtgacgcttgcccagtgcacggactaccttatgggcaagaaaaagaagtccgattacaacgcagaagttggacaattccacggcatcgccaagagcatggcgaaacatgacatccatcgtattatcgaccggctgattgtcgagggtgcactgagagaggacaacataatgaacaggaggatgaaatttcctgttcaataccttcggacggaaacaaaagcaaaccagtatctactttatgggcgacggctctttctgactactcgcattaagagaggcgagagtcaagccggaccctctaatcctcagagacgcttacctcgaccagcagcacctgccactagagccgaggcagcgggaaatatcacgtctacctatgtctcatctcctgctcgcaaagccacccgcaagaagaaaggcaaggctgtggcaaccgttgatgtggacgacagcgatgatgacttgaatatgggtggcgatcaagatcctctagatgacagcgatgatgacttcgaagcgatgccgcctcctagaacgcgtcgaaggcaaacgacatcggtgggcccacctatatcgggcgatacgggaactgaaaatctgacagatcttcaaaaggacgtacttgaaaacttcctcggggaagctaaggtattggaagagagggtgcgggcttcgaaaggtcttaggcagccaatcttctcccatcttcagcttcgtgagatgggtttgcggtggacgactacgctagaagcaatgcagcgtatcccgggtatcgacgccaacaaggttcaacgctatggtggcaaggtccttcctctgattcagcaatatcataggcagtaccaagaaatgatgggcatatcctctaacgcggctggttcgtctcgcataccggggaacatcgttgacctggtgagctctgatgaggacgaggaagaatccttcattgatgacgacattgattatgacgatgctgtcgaggagtcttctggctactttcaatctcagaattcgactggtacgaggacattttttgacgaacttcaagagaacagccagaagcaaccatctcgaggtcgttcttctgtgggctcgacgggaacaaaggggagaggcaatgcccgacgtggcggcaagaaatcgaccacgcagcggcgatcttcaggagctaaatatgcgggtgttaagaagagaggtggcgcaagtggtggtggtgcaacagcgaggaagacgtcgagagcttcttcgacgacgacgtctcagcggggctcaaggggtaagagcgtcagtcgacccgcgggtgttggctttgatggaattggtctcatggaccactga

SEQ ID NO: 27835 - protein, 1818 aa, Muscodor strobelii
  misc_feature: SGI Peptide ID NO. 569543
  misc_feature (943)..(1121): Pfam Id: PF00270 Pfam Desc: DEAD/DEAH box helicase
  misc_feature (1186)..(1262): Pfam Id: PF00271 Pfam Desc: Helicase conserved C-terminal domain
  misc_feature (1349)..(1463): Pfam Id: PF09382 Pfam Desc: RQC domain
  misc_feature (1605)..(1649): Pfam Id: PF00570 Pfam Desc: HRDC domain
  misc_feature (1)..(1680): NCBI GI: 46107336 Blast Desc: FG00551.1 [Gibberella zeae PH-1]
  misc_feature (1)..(1771): NCBI GI: 256735226 Blast Desc: NECHADRAFT_30968 [Nectria haematococca mpVI 77-13-4]
  misc_feature (1)..(1656): NCBI GI: 261356227 Blast Desc: ATP-dependent helicase SGS1 [Verticillium albo-atrum VaMs.102]
  misc_feature (844)..(1658): NCBI GI: 39941578 Blast Desc: MGG_05700 [Magnaporthe grisea 70-15] gi|145022394|gb|EDK06414.1| MGG_05700 [Magnaporthe grisea 70-15]
  misc_feature (561)..(1684): NCBI GI: 6934278 Blast Desc: AF205407_1 QDE3 protein [Neurospora crassa]
  misc_feature (561)..(1684): NCBI GI: 164423365 Blast Desc: NCU08598 [Neurospora crassa OR74A] gi|157070060|gb|EAA34794.2| conserved [Neurospora crassa OR74A]
  misc_feature (866)..(1717): NCBI GI: 256721447 Blast Desc: NECHADRAFT_88354 [Nectria haematococca mpVI 77-13-4]
  misc_feature (436)..(1781): NCBI GI: 22651415 Blast Desc: QDE3-like protein [Blumeria graminis]
  misc_feature (885)..(1792): NCBI GI: 145243892 Blast Desc: An11g04670 [Aspergillus niger] gi|134079141|emb|CAK45953.1| protein product [Aspergillus niger]
  misc_feature (219)..(1704): NCBI GI: 171687593 Blast Desc: protein product [Podospora anserina] gi|170943758|emb|CAP69410.1| protein product [Podospora anserina]
MTRNNLRDHLSWLLAQKHRSNSPHAPSLPPAPTRAHTSSGVSTSSPNDNDDDDDSTRFYTPTTALSPVTRKDEHETQLATLYPPLPAVTSRPSTTSTTSNGAISQSARPQDNRTGSEVAEQEDMASRVPKSAPRRPGLVLAQERRQEQLLTPTSTTGRSLSRNYSTFLASNKAAQERPASRNGTSGSVTQSERAFLTPGATLSTAHTSDMVDLTDDNGTSPVHSTAFGSDVRLWREDFASRPEPLDPSENSVAFGSEKVLWDEEHASRPAPVSPDEHSVGFGSSIVLWEEEAASRPEPLSAKRGKKRKSDHMTQPPASTTTDDFPDILDLLADDESILLSHAKHSSPTKSPAKSKRKFSPSETPSKKGILANPSDRIAPLDGTPSGRASSRRRTPFRTPRKVHKSETDRALAVKPDPMLVDTDSVFGSDVEHVPKAQTQQSKSMKFDERVIQDSDDEPMTPVQFDESESPIVQSSKVAKRLFQETSPEAKPSIRDTPLKSQTPNPSQSQARRRSPKKSNEPQLSEVNPSQPLTGVKKADSEEPNPSSQVTVIHDTEDLANVLQLLLRDPSIIEMQRSFLAEELRQNREDFKRSLQEGSLTPRERLRRDKEQLTKKQASLDALSNEYRSYEEVLARRDALITRISDAYEHDINTEDDEAHLQELDDVLKTRQQPLKILLYNAGIDSPGRFEEEKSSNVQHAQAQSFVQATQHAQATPSRSHSRHTTHVPGTASSQVILQTQIPPRLDATQSTMEPLLEDTCSPKGASNRPSTSGTPRPTPRYNSRIPPATTKTIARSTPHPTFDIIEGDDENLFEVDDPVLDMNTFRTSQPQHHSSHKQKGNPARKASPQKQFYESDYSDGIDISELAQEVEYQQSSAEMTLPKPSRPALSETSGNIGARKDKVAEKRNQSVEGSHVAPEQKRFPWYKDVKRALKDRFRMSRFRHNQLEAINATLSGKDAFILMPTGGGKSLCYQLPAVIASGKTKGVTVVVSPLISLMQDQVEHLSNLNIQAKTFNGATPKSERAEIMEHLRGNFPENWLQLLYVTPEMINQSQAFISGLTSLYKNKKLARLVIDEAHCVSQWGHDFRPDYKDLGSFRERFPGVPLMALTATATQNVIMDVKHNLNIDECEEFSQSFNRPNLYYEVLRKEKNNIETIAGLINSKYPNQTGIVYALSRNSTEKIAQQLRDHGIKAHHYHAHIEAAAKAQIQKDWQRGKIKVVVATIAFGMGIDKPDVRFVIHHSVPKSLEGYYQETGRAGRDGKQSECYLYFGYADVVTLRKMITESEDASAQQKERQMKMLNTVAAFCDNQSDCRRVEILRYFGETFDKAQCHATCDNCMSTDQFEKKDVTKYALAVLQIIDSEKIDDKFQGKVTLAQCTDYLMGKKKKSDYNAEVGQFHGIAKSMAKHDIHRIIDRLIVEGALREDNIMNRRMKFPVQYLRTETKANQYLLYGRRLFLTTRIKRGESQAGPSNPQRRLPRPAAPATRAEAAGNITSTYVSSPARKATRKKKGKAVATVDVDDSDDDLNMGGDQDPLDDSDDDFEAMPPPRTRRRQTTSVGPPISGDTGTENLTDLQKDVLENFLGEAKVLEERVRASKGLRQPIFSHLQLREMGLRWTTTLEAMQRIPGIDANKVQRYGGKVLPLIQQYHRQYQEMMGISSNAAGSSRIPGNIVDLVSSDEDEEESFIDDDIDYDDAVEESSGYFQSQNSTGTRTFFDELQENSQKQPSRGRSSVGSTGTKGRGNARRGGKKSTTQRRSSGAKYAGVKKRGGASGGGATARKTSRASSTTTSQRGSRGKSVSRPAGVGFDGIGLMDH

SEQ ID NO: 27836 - DNA, 5963 bp, Muscodor strobelii
  misc_feature: SGI EST ID NO. CUFF.65684.0
  misc_feature: Variant of the nucleotide sequence at SEQ ID NO 27834
ctccagtcgaagcaccaccaaaccaccaacgccatatatcgaagctccaacgaccagtcaatgcgatccgtctctctattctcatggagataagctgggacatgtgctccctgacgtcttcatgactcgaaacaacctcagggaccatctttcttggctactggctcaaaagcatcggtccaacagcccgcacgcgccctcgctgccgcctgcgcccacgcgcgcccacacgtcctcgggagtctcgacttcctcgcccaacgacaacgacgacgatgacgacagcacacggttctacacacctactactgcgctttcaccagtcacgcgtaaagacgagcacgagacgcagctcgccacattgtatccaccgttacctgctgtgactagccgcccctccaccacctccaccacatccaatggggccatatcacaaagtgcgcggccgcaggacaaccgcactggcagcgaggtagcggaacaggaggacatggctagtcgtgtgcccaaatctgcgccgagaaggccgggcctggtgctggcccaggagcggcgccaggaacaactgctcacacccacctccaccactggccgctcgttgtcccgcaattatagcacctttcttgctagcaacaaggcggcccaggaaaggcctgcctctcgcaatggcacctcgggctctgtaacacagtcggagcgggcttttctcacacctggcgccaccctctccacggcccacacgtcggatatggttgatttgactgatgacaatggcacctctcctgtgcattcaacggccttcggaagtgatgttcggctatggcgcgaagactttgcttctcgacccgagcccctagatcctagcgagaattcggtggcatttggcagtgaaaaggtattgtgggacgaggagcatgccagccgtccagcccctgtctctccagatgagcattctgtcggcttcggcagcagcatagttctttgggaagaggaggctgcttcacgtcccgaacctctatctgctaagcgtgggaagaaacggaaaagtgatcacatgacccagcctccagcgtccaccactaccgacgactttcctgacatcctggatcttcttgctgacgacgaaagcattctactttctcacgcaaaacactcctcgcccacgaagtcacccgctaagagcaaacgaaagttcagccccagcgagacaccgtcgaaaaagggcattctggccaacccgagcgatcggattgcccccttggatggtacgccctccggtagagcaagcagccgtcggcgcactcccttcagaacgccccggaaagtacacaaatcggagacagaccgggccctcgcagtcaaaccagatccgatgctcgtggatactgattccgtattcggaagcgatgtagaacatgttcccaaagcccagacacagcaatcgaaatctatgaaatttgatgagcgtgtcattcaagactcagacgatgaacccatgacaccggtgcaattcgacgagtctgaaagccctatcgtacaatcctctaaagttgcaaaacgcctattccaagaaacctctcctgaagccaagccgtccatacgggatacacccctgaaatcccagactccgaatccaagccagtctcaagctcgacgtcgctcgcccaagaaaagcaacgaaccgcaactgtctgaagtcaacccgagccagcctcttaccggtgtcaaaaaggctgactctgaagagcctaacccgagtagtcaagttaccgtcatccacgatactgaagatcttgcaaatgttctccagctgcttcttcgcgacccatccatcattgagatgcaacgctcatttttggcagaagaattgcgtcaaaaccgcgaggacttcaaaagatcacttcaggaagggtcattgacgccaagggaacgtctgaggcgtgacaaggagcagttaacgaagaagcaagcatccttggatgccttatcgaacgagtatcggtcttatgaagaagtattggccagaagagatgctctaatcactcgcatatctgacgcctacgaacatgacatcaacaccgaggacgacgaagcgcatctacaggaactagacgatgtgctcaagacacgccaacaaccgctgaagattcttctatataatgctggaattgatagccctggccgatttgaagaagaaaaatcctcgaatgttcaacatgcccaagcacagtcttttgtgcaggccacacagcacgcccaagcaacgccatcaagaagccattctcgacacactacacacgttccggggacagcaagttcacaagtcattctacagacacaaatacctcctcggctcgatgccactcagtccacaatggaaccgcttttggaagatacgtgcagcccgaaaggcgcaagcaaccgcccctcaacttcgggaacgccgcgtcctacaccacggtataacagtcgaatcccgccagccaccacaaagaccatcgcaaggtcaacacctcacccaacatttgacatcattgaaggcgacgacgagaatctcttcgaagttgacgacccagtgcttgatatgaacacattccgcacttcacagccgcaacaccactctagtcacaagcagaaaggcaatccggcgaggaaagcatcgccccaaaaacaattctatgaaagcgattacagtgatggaatagacatttctgagctagctcaggaggttgaatatcagcagtcgtcagctgaaatgacgcttcctaagccttcgcgaccagctctctccgagacttcgggcaatattggcgcgcggaaagataaggtggcagagaagcgcaatcagagcgtagagggctcacatgttgcccccgaacagaagagatttccatggtacaaagatgtgaagcgagcactgaaagatcgtttcaggatgagccgttttcgacataatcagcttgaggccatcaatgccacgctttccggaaaggatgcattcattcttatgccgactgggggtggaaagtctctatgttatcagcttcctgctgtcattgctagtggcaagacaaaaggtgttaccgtcgttgtatcgcccctcatcagtttgatgcaagatcaagtcgaacatttgagtaatctcaacatacaggcgaagactttcaacggcgcaaccccgaaatccgagcgagctgaaatcatggagcacctgaggggaaacttccccgagaactggttgcagcttctctacgtcacgccggagatgataaatcaaagtcaggccttcatcagtggactgacctccctctacaagaacaagaagcttgctcggcttgtcattgatgaggcacattgcgttagccagtggggacatgattttcgacccgattacaaagacttgggtagttttcgagaacgatttcctggcgtccctttgatggcccttactgctactgctacgcaaaacgttattatggatgtgaagcacaacttgaatatcgacgagtgcgaagaattctcccaaagtttcaacagacctaacttgtattacgaagttctcaggaaagagaaaaacaatatcgaaacgattgctggactgatcaattcaaaatatcctaaccagactgggattgtgtacgcgctctcgaggaattctaccgagaaaattgctcaacaactacgggatcatggcatcaaagctcatcattaccacgctcacattgaagcggctgccaaagcgcaaatccaaaaagattggcagagagggaaaatcaaagtcgtcgttgctactatcgctttcggaatgggaatcgacaaacctgatgtgcgatttgtcattcaccactcggtacctaagagtctcgagggctactaccaagaaactggccgtgcaggtcgtgacggaaagcagtctgaatgttatctctactttggatatgcggatgtcgtgacgcttcgaaaaatgatcaccgagagcgaagatgcgagtgcccagcaaaaggagagacagatgaagatgttgaatacagtagcagctttctgtgataaccaaagcgattgtcgtcgagtcgagatcctccgctacttcggcgaaacgttcgataaggcccaatgccacgcaacgtgtgataattgcatgtctactgatcagttcgagaagaaagatgtcaccaaatacgcgcttgctgttttgcagatcatcgattcggagaagatcgatgacaagtttcaggggaaggtgacgcttgcccagtgcacggactaccttatgggcaagaaaaagaagtccgattacaacgcagaagttggacaattccacggcatcgccaagagcatggcgaaacatgacatccatcgtattatcgaccggctgattgtcgagggtgcactgagagaggacaacataatgaacaggaggatgaaatttcctgttcaataccttcggacggaaacaaaagcaaaccagtatctactttatgggcgacggctctttctgactactcgcattaagagaggcgagagtcaagccggaccctctaatcctcagagacgcttacctcgaccagcagcacctgccactagagccgaggcagcgggaaatatcacgtctacctatgtctcatctcctgctcgcaaagccacccgcaagaagaaaggcaaggctgtggcaaccgttgatgtggacgacagcgatgatgacttgaatatgggtggcgatcaagatcctctagatgacagcgatgatgacttcgaagcgatgccgcctcctagaacgcgtcgaaggcaaacgacatcggtgggcccacctatatcgggcgatacgggaactgaaaatctgacagatcttcaaaaggacgtacttgaaaacttcctcggggaagctaaggtattggaagagagggtgcgggcttcgaaaggtcttaggcagccaatcttctcccatcttcagcttcgtgagatgggtttgcggtggacgactacgctagaagcaatgcagcgtatcccgggtatcgacgccaacaaggttcaacgctatggtggcaaggtccttcctctgattcagcaatatcataggcagtaccaagaaatgatgggcatatcctctaacgcggctggttcgtctcgcataccggggaacatcgttgacctggtgagctctgatgaggacgaggaagaatccttcattgatgacgacattgattatgacgatgctgtcgaggagtcttctggctactttcaatctcagaattcgactggtacgaggacattttttgacgaacttcaagagaacagccagaagcaaccatctcgaggtcgttcttctgtgggctcgacgggaacaaaggggagaggcaatgcccgacgtggcggcaagaaatcgaccacgcagcggcgatcttcaggagctaaatatgcgggtgttaagaagagaggtggcgcaagtggtggtggtgcaacagcgaggaagacgtcgagagcttcttcgacgacgacgtctcagcggggctcaaggggtaagagcgtcagtcgacccgcgggtgttggctttgatggaattggtctcatggaccactgatggagtatcgtgcttatacatatatctcaaagatatagactctgagaaacagcttgtcatggttatgtatgggtggtggacaacctggctactacttttcaaaccttactgcttctgcatggcgtagcgtggtggtgggagcatatttatggcgttggcggtgcttttatatcgcgattgcgtttgcgaatgggagatgatgtgggatggtgtcttatgaatatgagaattttacgtcttcgctgtttgtctgttgttaacttcactagcgacatgttatccgaataagggaacgacgacatatattaaggaccgatcgcataatcatttaagccagagacagaataagtcatatgtaaataccgcactacagtttatagacgag

SEQ ID NO: 27837 - DNA, 846 bp, Muscodor strobelii
  misc_feature: SGI cDNA ID NO. 569544
  misc_feature: Encodes the peptide sequence at SEQ ID NO 27838
atggccaattctcagtgcgaatctactcccgacttgtcagatcatacgatgggcattactcaggagaaatcaaagaccataccaccaccatcggaagaccaaagcatcatatcgcgatcatgggcatacatgctggagcctgttcgctcatcgggcttcgtcgagtttgaattagtattccttaccttctgtaccggaatacaagacgccatctcgttccccgactaccattgtttcgcctcaaatcagaccggcaacacggtgttcctgttcctcgccttggtggtgccatggttcgacggcgagatgttcttcttagccaacatcggagcggctcttggattcttcctcctaggcggttgggtaacaggccagatcagccacttcgttggcccaagggttaggggttggctggtactatgtaacttcatacagacggtactggtgttcatagccgcaacaatacaatacatggcaggcacggcatccgaaggcaaagcagcagtgacagtggttgctctcctggccttcgcgtccggcagccaggtggtccagtcacgttctctgcaaatgacggagatcagcactgccatggcaacagccgcgtgggtggacttgatgatcgacccgaagctcctctcgctggagaacagacctcgaacacgacgtgtcatgttcttagtatcattggcagccggctcagtggttggtgcaggaatctatcggaccgttggctctgcggtagctatcttcgtttcggccgccggcaaactacttgttactatcatgtacttgttcaacagtgcagacaaaccaaggaagtctgatgatgttgaaagttgttag

SEQ ID NO: 27838 - protein, 281 aa, Muscodor strobelii
  misc_feature: SGI Peptide ID NO. 569544
  misc_feature (55)..(265): Pfam Id: PF06912 Pfam Desc: Domain of function (DUF1275)
  misc_feature (7)..(279): NCBI GI: 116180604 Blast Desc: CHGG_00930 [Chaetomium globosum CBS 148.51] gi|88185227|gb|EAQ92695.1| CHGG_00930 [Chaetomium globosum CBS 148.51]
  misc_feature (38)..(280): NCBI GI: 171687603 Blast Desc: protein product [Podospora anserina] gi|170943763|emb|CAP69415.1| protein product [Podospora anserina]
  misc_feature (39)..(279): NCBI GI: 38566978 Blast Desc: conserved [Neurospora crassa]
  misc_feature (22)..(277): NCBI GI: 212536907 Blast Desc: DUF1275 domain protein [Penicillium marneffei ATCC 18224] gi|210068351|gb|EEA22442.1| DUF1275 domain protein [Penicillium marneffei ATCC 18224]
  misc_feature (27)..(277): NCBI GI: 242788549 Blast Desc: DUF1275 domain protein [Talaromyces stipitatus ATCC 10500] gi|218721388|gb|EED20807.1| DUF1275 domain protein [Talaromyces stipitatus ATCC 10500]
  misc_feature (37)..(273): NCBI GI: 121712339 Blast Desc: DUF1275 domain protein [Aspergillus clavatus NRRL 1] gi|119401933|gb|EAW12355.1| DUF1275 domain protein [Aspergillus clavatus NRRL 1]
  misc_feature (57)..(254): NCBI GI: 164423037 Blast Desc: NCU09231 [Neurospora crassa OR74A] gi|157069922|gb|EAA34572.2| conserved [Neurospora crassa OR74A]
  misc_feature (37)..(275): NCBI GI: 119473601 Blast Desc: NFIA_001260 [Neosartorya fischeri NRRL 181] gi|119406829|gb|EAW16779.1| conserved [Neosartorya fischeri NRRL 181]
  misc_feature (37)..(268): NCBI GI: 159128477 Blast Desc: DUF1275 domain protein [Aspergillus fumigatus A1163]
  misc_feature (37)..(268): NCBI GI: 70985765 Blast Desc: DUF1275 domain protein [Aspergillus fumigatus Af293] gi|66846017|gb|EAL86350.1| DUF1275 domain protein [Aspergillus fumigatus Af293]
MANSQCESTPDLSDHTMGITQEKSKTIPPPSEDQSIISRSWAYMLEPVRSSGFVEFELVFLTFCTGIQDAISFPDYHCFASNQTGNTVFLFLALVVPWFDGEMFFLANIGAALGFFLLGGWVTGQISHFVGPRVRGWLVLCNFIQTVLVFIAATIQYMAGTASEGKAAVTVVALLAFASGSQVVQSRSLQMTEISTAMATAAWVDLMIDPKLLSLENRPRTRRVMFLVSLAAGSVVGAGIYRTVGSAVAIFVSAAGKLLVTIMYLFNSADKPRKSDDVESC

SEQ ID NO: 27839 - DNA, 2164 bp, Muscodor strobelii
  misc_feature: SGI EST ID NO. CUFF.65671.0
  misc_feature: Variant of the nucleotide sequence at SEQ ID NO 27837
aaaagatgttgctgcttgtccattcgtaggctaaaagaattgtgcataaacatgtcatacaagcagaggtcacggctcggttgcactcggctccagcaatgagaaaacggcttgtgacgtcgtaaaagacagagtatgacacttgccacagagaaatcgagattgaaaagaagttgcaggaagttcccggaacagcacgccgggcctgccaacggacatcgggaactccacttggtggttgaggttgtcggtatgacaagacttagaaataagctcgacgtgagattagcactacctgtgcccagctaggcaacaagaccatggaacagggttatcatagttctcaccagaatcataatgttaacgacgaatatttgttggacttgtaagtggacagtgaagagacgagtctctatgactaggcttctgttgatcatgcatgtcattagccatctcgattgctcgagttcgaacgtgcaaatcttgtcaatttcaagtataattgtcaacactcgatcgatggtcccgcttcgaaagtcagattgagacccaacagggtggctagaccgtttcaatatcgttgaatccgtgcggtgataggcaaaaggctgtcggtcttgcccttcggcacgcatccgccccccggctacccacttaaacactatggagccgcatcggactcactttgtcgggctggccaagatgtgttttaaaatttgactaccgtgttgttggctgttattgacggttctcggaacgctggccggtctaagttggccgttgtctctgggctttgtatgcgaatctgtggccattgcttgaaagaaattttcgatgatcaaacggttataatggccaactcccgcctcaactcgaatttagtcttctcgtgatgtaactcatatttacttgtgttctagtactaagttaatcactttgacaatatatgatatctattcatcacagcatcagtacctgacaactatggccaattctcagtgcgaatctactcccgacttgtcagatcatacgatgggcattactcaggagaaatcaaagaccataccaccaccatcggaagaccaaagcatcatatcgcgatcatgggcatacatgctggagcctgttcgctcatcgggcttcgtcgagtttgaattagtattccttaccttctgtaccggaatacaagacgccatctcgttccccgactaccattgtttcgcctcaaatcagaccggcaacacggtgttcctgttcctcgccttggtggtgccatggttcgacggcgagatgttcttcttagccaacatcggagcggctcttggattcttcctcctaggcggttgggtaacaggccagatcagccacttcgttggcccaagggttaggggttggctggtactatgtaacttcatacagacggtactggtgttcatagccgcaacaatacaatacatggcaggcacggcatccgaaggcaaagcagcagtgacagtggttgctctcctggccttcgcgtccggcagccaggtggtccagtcacgttctctgcaaatgacggagatcagcactgccatggcaacagccgcgtgggtggacttgatgatcgacccgaagctcctctcgctggagaacagacctcgaacacgacgtgtcatgttcttagtatcattggcagccggctcagtggttggtgcaggaatctatcggaccgttggctctgcggtagctatcttcgtttcggccgccggcaaactacttgttactatcatgtacttgttcaacagtgcagacaaaccaaggaagtctgatgatgttgaaagttgttaggtggagcgaggaagagcaacagagcaagtgaaggaatagacatgagataccccatagacttagatataaaggtaatgatccaatagtaatgtaattcatacaatgaaccaaaatcgatttgtataccaactgtaggttcaatctcaaggggaagtcacttgttcatccacatgtttattcgaactctcattcctcacggctggcagctgaattttgcttcaacaggggagcaagagtttgccgctggcacgtagcaggacaagtgaacgcaaagacatattctttgctttgcagtccatagtcatgatcgactaacaagacgttgaagttctta

SEQ ID NO: 27840 - DNA, 1530 bp, Muscodor strobelii
  misc_feature: SGI cDNA ID NO. 569545
  misc_feature: Encodes the peptide sequence at SEQ ID NO 27841
atgggagtttcatatctctgggccaatccggagataaaccctatcaaccgtaaagctcgatccatacccgtgctcaatgtaagagacgtttatggccgagtcttctttttctcctggtttgggtttatggtcgcattttgggcttggtacacattcccacctcttataactcatgtaatcaaagccaacttgcatcttacccctgcccaggtggccaactccaatattgtatcgctcgtagcaacactcttcatccgataccttgccggccccctttgtgatcaattcggtcctcgatatgtctttgccggtattctgttagtcggctcgatccctctcggtctagcccctcttgttcacaatgccaccggtctctacgtaagccgatttttcatcggcatactaggcgggtctttcgtcccctgtctggtttggtgcaccgggttcttcgacaagaatgtcgtcgggtctgccaatgcacttgccggtggctggggaaacgccggaggtggaataacatacttcattatgccggcggtctttgactctctcaaagggcgtgggtatagtgacggagagtcttggcgtatcgctttcatcgtaccgctcatcattacgctgagtaccggtattgctatgattgccctttgccccgacacgccaactgggaaatggtcagagagaaaagtacacgcacaagaaaaccttgcttcacacggagcgagcgaacctaacggcaacatcgtggacatatcaggagacataacccacacagtgagcccagggtataacggcaccgagcacgacaaagaaaaggagaaaagcaaattcgatcacgaagccaatctccccaaagacgaaatgatagacactgccgagggtgaaacaatcgagaagcctactttcggcagtgttgtcaagatcctcatatcacctcagacactcttccacatcataacatacttctgttcattcggtggcgagctagccatcaacgcgatcctcagcgcatactacgtcaagaatttcccaaatatcagctcgacatatgccgccaacgtagctgcaatcttcggatttctgaacttcgtcacgcggcctggtggaggttttatatcggactatctgtataaggtcacgggacgtaatctctgggcgaagaaaacatggatcgtcgtctgcggtgtattaacaggcataattttgatcatcattgggcaaattgatcctcacgacttatcgaaaatgcttggtcttgtctccctcatggctatcttcctcgaggccggcaatggtgcaaacttcggtcttgtcccacatgttcatcctgcgtctaatggagttgtctccggcacaacgggtgctgctggtaacgcgggtggcgttatattcagtataattttccgctttatggataacgggacgaactatgccaaggcgttctgggtcattggcattattcacattgtccttaatcttgcgctttgttgggtctctcctattccgagaggccaggttgggggacgttga

SEQ ID NO: 27841 - protein, 509 aa, Muscodor strobelii
  misc_feature: SGI Peptide ID NO. 569545
  misc_feature (38)..(465): Pfam Id: PF07690 Pfam Desc: Major Facilitator Superfamily
  misc_feature (1)..(509): NCBI GI: 171687601 Blast Desc: protein product [Podospora anserina] gi|170943762|emb|CAP69414.1| protein product [Podospora anserina]
  misc_feature (1)..(509): NCBI GI: 171676465 Blast Desc: protein product [Podospora anserina] gi|170936299|emb|CAP60957.1| protein product [Podospora anserina]
  misc_feature (4)..(508): NCBI GI: 145602985 Blast Desc: MGG_13793 [Magnaporthe grisea 70-15] gi|145011327|gb|EDJ95983.1| MGG_13793 [Magnaporthe grisea 70-15]
  misc_feature (3)..(509): NCBI GI: 256734568 Blast Desc: [Nectria haematococca mpVI 77-13-4]
  misc_feature (3)..(509): NCBI GI: 46106289 Blast Desc: FG00416.1 [Gibberella zeae PH-1]
  misc_feature (3)..(509): NCBI GI: 154323940 Blast Desc: BC1G_00369 [Botryotinia fuckeliana B05.10] gi|150842598|gb|EDN17791.1| BC1G_00369 [Botryotinia fuckeliana B05.10]
  misc_feature (3)..(509): NCBI GI: 156036008 Blast Desc: SS1G_12690 [Sclerotinia sclerotiorum 1980] gi|154698098|gb|EDN97836.1| SS1G_12690 [Sclerotinia sclerotiorum 1980]
  misc_feature (2)..(509): NCBI GI: 189207198 Blast Desc: high affinity nitrate transporter NrtB [Pyrenophora tritici-repentis Pt-1C-BFP] gi|187976026|gb|EDU42652.1| high affinity nitrate transporter NrtB [Pyrenophora tritici-repentis
  misc_feature (3)..(509): NCBI GI: 169619613 Blast Desc: SNOG_13005 [Phaeosphaeria nodorum SN15] gi|111058685|gb|EAT79805.1| SNOG_13005 [Phaeosphaeria nodorum SN15]
  misc_feature (3)..(506): NCBI GI: 70995800 Blast Desc: nitrate transporter CrnA [Aspergillus fumigatus Af293] gi|42820688|emb|CAF32001.1| nitrate permease, [Aspergillus fumigatus] gi|66850290|gb|EAL90617.1| nitrate transporter CrnA
MGVSYLWANPEINPINRKARSIPVLNVRDVYGRVFFFSWFGFMVAFWAWYTFPPLITHVIKANLHLTPAQVANSNIVSLVATLFIRYLAGPLCDQFGPRYVFAGILLVGSIPLGLAPLVHNATGLYVSRFFIGILGGSFVPCLVWCTGFFDKNVVGSANALAGGWGNAGGGITYFIMPAVFDSLKGRGYSDGESWRIAFIVPLIITLSTGIAMIALCPDTPTGKWSERKVHAQENLASHGASEPNGNIVDISGDITHTVSPGYNGTEHDKEKEKSKFDHEANLPKDEMIDTAEGETIEKPTFGSVVKILISPQTLFHIITYFCSFGGELAINAILSAYYVKNFPNISSTYAANVAAIFGFLNFVTRPGGGFISDYLYKVTGRNLWAKKTWIVVCGVLTGIILIIIGQIDPHDLSKMLGLVSLMAIFLEAGNGANFGLVPHVHPASNGVVSGTTGAAGNAGGVIFSIIFRFMDNGTNYAKAFWVIGIIHIVLNLALCWVSPIPRGQVGGR

SEQ ID NO: 27842 - DNA, 2730 bp, Muscodor strobelii
  misc_feature: SGI EST ID NO. CUFF.65680.0
  misc_feature: Variant of the nucleotide sequence at SEQ ID NO 27840
ctgtaagctcatacgctagagaaccagtgagcatcgacagccttatctgaggcgcctattgtgggtcgagacgtatacggcagtgtcacccacaccgagccacatccccatacccctgctttaagataaggaagtccctttaacttacgaactctggggtatgtcgtggtactgttgagcgacaatcaaagacgtcttcaaataatgaatattgttgtgtttagaaatgcttcgatgtggtcgtacagaaaggacccccctactgatgggcttttctgtggcttatgccaaggatcgtggagaacttttagcctcatttctcgatgcctcctcttctcgagccctttgcttctgcatggctcactgccaaggtgatgggattatttcatcagcgctttctctaaggatctgcagtgatcatgtttaacgagcgacagcgataccctgcttcgatcgcatctcaaccggcaacgcacggcatataataagcaacccgctgcgtagctcaatcgtcgagtctttaccctaacgcccgaagtcagcgaaagaattatcagattcatcgcgtttcatcttgtcattgtcgtatctcatcgcatcggaaacgattattaatcacccacgcgcttatctgccgtacctggcgatcattcagtctcagccgtgataacatcgattccttatctctctggaagatccgtgttgaagattgtcgccggaaaggacctccgcggagacagtctaatatcctccgtagtatacgctactgacgaccgatcccactctaagagccttatccggagatgcatcataaatgtgcaacccagtctcacacatcgagatagatttgaagcacttatatgaaggtagtcggtctttgagagcagggcaataaacgaagacaagcgggcaaatcaagcgatacatgattacgagagcattaaacttttgttggaacattcacattttattggacatataattgcatcctctgattacatcaacaacgtctacaatgggagtttcatatctctgggccaatccggagataaaccctatcaaccgtaaagctcgatccatacccgtgctcaatgtaagagacgtttatggccgagtcttctttttctcctggtttgggtttatggtcgcattttgggcttggtacacattcccacctcttataactcatgtaatcaaagccaacttgcatcttacccctgcccaggtggccaactccaatattgtatcgctcgtagcaacactcttcatccgataccttgccggccccctttgtgatcaattcggtcctcgatatgtctttgccggtattctgttagtcggctcgatccctctcggtctagcccctcttgttcacaatgccaccggtctctacgtaagccgatttttcatcggcatactaggcgggtctttcgtcccctgtctggtttggtgcaccgggttcttcgacaagaatgtcgtcgggtctgccaatgcacttgccggtggctggggaaacgccggaggtggaataacatacttcattatgccggcggtctttgactctctcaaagggcgtgggtatagtgacggagagtcttggcgtatcgctttcatcgtaccgctcatcattacgctgagtaccggtattgctatgattgccctttgccccgacacgccaactgggaaatggtcagagagaaaagtacacgcacaagaaaaccttgcttcacacggagcgagcgaacctaacggcaacatcgtggacatatcaggagacataacccacacagtgagcccagggtataacggcaccgagcacgacaaagaaaaggagaaaagcaaattcgatcacgaagccaatctccccaaagacgaaatgatagacactgccgagggtgaaacaatcgagaagcctactttcggcagtgttgtcaagatcctcatatcacctcagacactcttccacatcataacatacttctgttcattcggtggcgagctagccatcaacgcgatcctcagcgcatactacgtcaagaatttcccaaatatcagctcgacatatgccgccaacgtagctgcaatcttcggatttctgaacttcgtcacgcggcctggtggaggttttatatcggactatctgtataaggtcacgggacgtaatctctgggcgaagaaaacatggatcgtcgtctgcggtgtattaacaggcataattttgatcatcattgggcaaattgatcctcacgacttatcgaaaatgcttggtcttgtctccctcatggctatcttcctcgaggccggcaatggtgcaaacttcggtcttgtcccacatgttcatcctgcgtctaatggagttgtctccggcacaacgggtgctgctggtaacgcgggtggcgttatattcagtataattttccgctttatggataacgggacgaactatgccaaggcgttctgggtcattggcattattcacattgtccttaatcttgcgctttgttgggtctctcctattccgagaggccaggttgggggacgttgaatcgccatctagtgttgtttgtaatcaaaactggtgtgttgtacgtatacgaaagcttctacgagtttgtttggaaagtgttttcatgggagatttgggacggcgagtctctggacttgggcatatgataccacgatagaccggctagtctggcatggagacaaaataacatatttattggcact

SEQ ID NO: 27843 - DNA, 1089 bp, Muscodor strobelii
  misc_feature: SGI cDNA ID NO. 569546
  misc_feature: Encodes the peptide sequence at SEQ ID NO 27844
atgatgacgcacggtcccaagatttttcgatatttcatgaacgcgacgccaaaggccctgaacggtactgtccctcttgtactacccccatcggcggaaaatgtgcccgcattgttggatctttcatttgaatggcccaccgttgcggccgagtgcaatttgcgttttgtcggtcagagaatgagggcaagctctatcaatggcaaattcagggagactatgattggaccaccgtttgagaataacagtgccatagctcagaacgtctggtacctcgaacgatgtatatcgctgaacggtccagaccaggaagaccctttaatggcatgctacaccccagaaaactatagccctccctcaatactctcaacgcttgttcgagagctaaatattctattcgttaaccatcccgactatttcgagcttatagatatccacgttggtgatgggacatccaactacaacatgaccgatctgaatgccgtattggggaatataaacgcatcaatggactacgtggctaaaggcatgaccaaatttttgcgggacaatcagcgcgcaacaccattatcacacgaggagtggtccaatttgataatagggcaaccagagtttaaacaagcatatagatcaggcccgccatcccccataacccatggaactgcaacaagggaaatcttgatctataagattatctgggggtggatcagcctgcctgcagcatttctcttctttcttgggctattgatcctgctcacagcacttgatacacggcggaagagtataccacaatggggtcagaaccatcttgcgaacatgcttcacggcgctgacgaggctactcgacgcctgctgagagaagctgaggagaacggagagctggacgaagtagcaaggcatacgcgtgtacagcttgcgatggaccagggcttccttgttgctgttagttccgaccaaaccacggaaatgagtcagtcagaccaaacattgcacacaacaagtctatctgatgtgcgccataagcctgatacagatgttgattctactacttggagcagctctgaagctggaggatatgcgcggctgtga

SEQ ID NO: 27844 - protein, 362 aa, Muscodor strobelii
  misc_feature: SGI Peptide ID NO. 569546
  misc_feature (173)..(325): NCBI GI: 256728432 Blast Desc: NECHADRAFT_53935 [Nectria haematococca mpVI 77-13-4]
  misc_feature (233)..(307): NCBI GI: 169599855 Blast Desc: SNOG_02753 [Phaeosphaeria nodorum SN15] gi|111068364|gb|EAT89484.1| SNOG_02753 [Phaeosphaeria nodorum SN15]
  misc_feature (164)..(319): NCBI GI: 256725830 Blast Desc: NECHADRAFT_94612 [Nectria haematococca mpVI 77-13-4]
MMTHGPKIFRYFMNATPKALNGTVPLVLPPSAENVPALLDLSFEWPTVAAECNLRFVGQRMRASSINGKFRETMIGPPFENNSAIAQNVWYLERCISLNGPDQEDPLMACYTPENYSPPSILSTLVRELNILFVNHPDYFELIDIHVGDGTSNYNMTDLNAVLGNINASMDYVAKGMTKFLRDNQRATPLSHEEWSNLIIGQPEFKQAYRSGPPSPITHGTATREILIYKIIWGWISLPAAFLFFLGLLILLTALDTRRKSIPQWGQNHLANMLHGADEATRRLLREAEENGELDEVARHTRVQLAMDQGFLVAVSSDQTTEMSQSDQTLHTTSLSDVRHKPDTDVDSTTWSSSEAGGYARL

SEQ ID NO: 27845 - DNA, 765 bp, Muscodor strobelii
  misc_feature: SGI cDNA ID NO. 569547
  misc_feature: Elevated expression when VOC is produced
  misc_feature: Encodes the peptide sequence at SEQ ID NO 27846
atgcgtgctactatcgctttcgcgtccatcttcgccttggccacctcggtcttggcccgggaaaccacagagggttatgccgccatgtctgctcccgccaaggacgagaaggtccccgccggtgagacttacgacatcaagtgggatgctggcaagtacaccggtgatgctaccatcgagctgctgggaggcaagactgagggcaccttgaacatcctgagcaccattgacaccgtcaaggtggaggacgactcttacgagtgggctgttgactgctcgctcggcgagttcaagacttatggtctgaagatctccgatgttgcctccaagggcgctatcttccagtactcgttccccttctcgatcaagaagtgcaagggtggcgacgacacttccagctccagctctgccagcactagcgctactgtctcttcttctggttaccctgtccagaccctcaccagcaccagcgcaagcaccaccagcatcagcaccaagtcgcaatactccacctcgcctattgcatctgagaccagcaccactgttgctaccaccactggcaccaccactgctacaacctttgtcactaccactccctcctcttctgccgtcacctcggccagcgtcacctctgctccggccaccaccactagcggcagcagcccctctagcagtgtctccaccactcctgttcctactggcgctgctacccgtgctggtgctggactggcccttggtctcgttgccgctgtcttcgccttgtaa

SEQ ID NO: 27846 - protein, 254 aa, Muscodor strobelii
  misc_feature: SGI Peptide ID NO. 569547
  misc_feature (1)..(133): NCBI GI: 116182348 Blast Desc: CHGG_01802 [Chaetomium globosum CBS 148.51] gi|88186099|gb|EAQ93567.1| CHGG_01802 [Chaetomium globosum CBS 148.51]
  misc_feature (7)..(140): NCBI GI: 145602987 Blast Desc: MGG_04599 [Magnaporthe grisea 70-15] gi|145011328|gb|EDJ95984.1| MGG_04599 [Magnaporthe grisea 70-15]
  misc_feature (32)..(254): NCBI GI: 226504478 Blast Desc: LOC100274296 [Zea mays] gi|194707274|gb|ACF87721.1| [Zea mays]
  misc_feature (32)..(254): NCBI GI: 46106265 Blast Desc: FG00415.1 [Gibberella zeae PH-1]
  misc_feature (36)..(254): NCBI GI: 256735295 Blast Desc: NECHADRAFT_98847 [Nectria haematococca mpVI 77-13-4]
  misc_feature (1)..(122): NCBI GI: 85091445 Blast Desc: NCU09133 [Neurospora crassa OR74A] gi|28920296|gb|EAA29669.1| [Neurospora crassa OR74A]
  misc_feature (1)..(124): NCBI GI: 156057389 Blast Desc: SS1G_04425 [Sclerotinia sclerotiorum 1980] gi|154702211|gb|EDO01950.1| SS1G_04425 [Sclerotinia sclerotiorum 1980]
  misc_feature (1)..(120): NCBI GI: 154324196 Blast Desc: [Botryotinia fuckeliana B05.10] gi|150842726|gb|EDN17919.1| [Botryotinia fuckeliana B05.10]
  misc_feature (1)..(127): NCBI GI: 209570418 Blast Desc: [Glomerella graminicola]
  misc_feature (21)..(126): NCBI GI: 171695268 Blast Desc: protein product [Podospora anserina] gi|170947876|emb|CAP60040.1| protein product [Podospora anserina]
  misc_feature: Useful for introducing or modulating the production of volatile compounds
MRATIAFASIFALATSVLARETTEGYAAMSAPAKDEKVPAGETYDIKWDAGKYTGDATIELLGGKTEGTLNILSTIDTVKVEDDSYEWAVDCSLGEFKTYGLKISDVASKGAIFQYSFPFSIKKCKGGDDTSSSSSASTSATVSSSGYPVQTLTSTSASTTSISTKSQYSTSPIASETSTTVATTTGTTTATTFVTTTPSSSAVTSASVTSAPATTTSGSSPSSSVSTTPVPTGAATRAGAGLALGLVAAVFAL

SEQ ID NO: 27847 - DNA, 1548 bp, Muscodor strobelii
  misc_feature: SGI EST ID NO. CUFF.65746.0
  misc_feature: Variant of the nucleotide sequence at SEQ ID NO 27845
ctttgacaggcttggtgggcacccatcgtgggcttggctcgtcctcgcctgctcagagccgcgagctaacctctcatcactctgtgctcacttctcttttctttccttcctctcccacatccagctcaacagtccttattcagactaccacactcattggaatcagcccagtctcagccctactccggcactcacactcttttataaacagactatctgtcactccctcacacccccgactttcagtcacaccatatacgttcttaatagacttttcagttctctgttaatatcttctgtctctctcgctgtacacggattccaccttcgaaaaccattctaacgcgtatctaatctctcttcgctaatcatcaaaatgcgtgctactatcgctttcgcgtccatcttcgccttggccacctcggtcttggcccgggaaaccacagagggttatgccgccatgtctgctcccgccaaggacgagaaggtccccgccggtgagacttacgacatcaagtgggatgctggcaagtacaccggtgatgctaccatcgagctgctgggaggcaagactgagggcaccttgaacatcctgagcaccattgacaccgtcaaggtggaggacgactcttacgagtgggctgttgactgctcgctcggcgagttcaagacttatggtctgaagatctccgatgttgcctccaagggcgctatcttccagtactcgttccccttctcgatcaagaagtgcaagggtggcgacgacacttccagctccagctctgccagcactagcgctactgtctcttcttctggttaccctgtccagaccctcaccagcaccagcgcaagcaccaccagcatcagcaccaagtcgcaatactccacctcgcctattgcatctgagaccagcaccactgttgctaccaccactggcaccaccactgctacaacctttgtcactaccactccctcctcttctgccgtcacctcggccagcgtcacctctgctccggccaccaccactagcggcagcagcccctctagcagtgtctccaccactcctgttcctactggcgctgctacccgtgctggtgctggactggcccttggtctcgttgccgctgtcttcgccttgtaaatcgtctcgacgattgtctgatgtttaccgagcccgcgacaaatatcagttctcaatggcaacatgcaagtcgatgcttagaggatgatgtaatgtagataagaggattaattacgtcgttgatggcttgtggggatgaggagaaaccagatgcattggaaatgagaataatactcggcgtttggcgcatgagataaaaaacccgtatgtactctgctgttgaaaaatggcgtccacgttagactgttgagaattgaaaatgtttgtgtgagattattcgttgccctgcactttgtgaagtgagatgtgtcgacgttgtgtatgtcctgataatcgttaagagcgtttacctattcgtgaagtcatttgaactggatacagctatgtgcaagagcccaatatcttag

SEQ ID NO: 27848 - DNA, 1464 bp, Muscodor strobelii
  misc_feature: SGI cDNA ID NO. 569548
  misc_feature: Reduced expression when VOC is produced
  misc_feature: Encodes the peptide sequence at SEQ ID NO 27849
atgtctgcctcgcccacgcacaccaccaacccggccaagcgccccctagaggatgcttcctccccgtctcgatccaatgaccagcccgaggccaagcgaccggccctcgacaaagtcatcagcaatgacgaggaagacgtagagaagatcgagatccccgagagcaacggcgacgctgttcccgcaacggccgaagccaacggtaccacgaagcccgaggatgctaatggtgagaagaccgaagccaaggacgagcagggcgacactatcctccgcgatgtcaccgatcctaaggctgcaccggctcccatcacctcggccacaggcacggcaaccgttcccagcggcatcccgggcaatgcgggcgacgagactgcgtggatccacatcagagccgtcatctcgagcccagaagccgccaccattataggcaaaggtggcgagaatgtgtccaacattcgcaagctttctggtgccaaatgcactgtgagtgactatcaaaagggtgctgtagagcgtatcttgaccgttagcggggttgttgatgccgctgctaaagcatttggcttgattatccgcacgcttaacaacgagcccttgaatgagacgtccagtgctcagtcgaagacctatcctttgcgccttctaattcctcacgtgttgataggatcgatcatcggcaagggtggagtacgcattcgagagatccaagacgcgtctggggcccggcttaatgcatcggactcctgtctgcccatgtccagtgagcgttcgctcgtcgtcatgggtgtggctgacgccgtgcacatcgcaacttactatgtaggaagcactctactcgagcagctcaacgagcggttcggtgggcccgctgcctcggcatatgcaacgcggagcggaggtcctgcgggtgcggtccccggaggcatgcaggtcattccgtacactcctcagcctgctggcggcaactatggacgacaggagaactatggcagacgtcccgaccctcggtcacagcattatcctcctgctccctacgctcaaccgtaccatccccatgctgctaatccccagcagcccaatcccaatgtcccgatgcactaccaggcacaacctggtggctatggagctggtccgcacatgcctccccaccaagctggccatgctgctggtccccaacatcacggcggcccccctgcccagcaacccatgcatggtggcatggccggtgctcctctgacccagcagatttttattcctaacgatatggttggtgctataataggcaagggtggccagaagatcaatgagatcagacaaatcagcggcagcgttattaagatcaatgagccccaggacaacagcaatgagcgccttgttaccatcacgggaactgaggagtgcaacaggatggcactttacatgctgtactctcgactcgaaagcgagaaacaccggatctaa

SEQ ID NO: 27849 - protein, 487 aa, Muscodor strobelii
  misc_feature: SGI Peptide ID NO. 569548
  misc_feature (414)..(476): Pfam Id: PF00013 Pfam Desc: KH domain
  misc_feature (212)..(275): Pfam Id: PF00013 Pfam Desc: KH domain
  misc_feature (129)..(191): Pfam Id: PF00013 Pfam Desc: KH domain
  misc_feature (1)..(487): NCBI GI: 171687621 Blast Desc: protein product [Podospora anserina] gi|170943772|emb|CAP69424.1| protein product [Podospora anserina]
  misc_feature (1)..(481): NCBI GI: 261356231 Blast Desc: Poly(rC)-binding protein [Verticillium albo-atrum VaMs.102]
  misc_feature (1)..(487): NCBI GI: 116180584 Blast Desc: conserved [Chaetomium globosum CBS 148.51] gi|88185217|gb|EAQ92685.1| conserved [Chaetomium globosum CBS 148.51]
  misc_feature (1)..(486): NCBI GI: 256735150 Blast Desc: NECHADRAFT_30745 [Nectria haematococca mpVI 77-13-4]
  misc_feature (1)..(480): NCBI GI: 85111179 Blast Desc: NCU09237 [Neurospora crassa OR74A] gi|28925551|gb|EAA34578.1| NCU09237 [Neurospora crassa OR74A] gi|38566984|emb|CAE76284.1| related to hnRNP protein E2 crassa]
  misc_feature (1)..(486): NCBI GI: 156030905 Blast Desc: SS1G_14233 [Sclerotinia sclerotiorum 1980] gi|154700624|gb|EDO00363.1| SS1G_14233 [Sclerotinia sclerotiorum 1980]
  misc_feature (1)..(487): NCBI GI: 258574629 Blast Desc: conserved [Uncinocarpus reesii 1704] gi|237901762|gb|EEP76163.1| conserved [Uncinocarpus reesii 1704]
  misc_feature (1)..(487): NCBI GI: 225563195 Blast Desc: KH domain RNA binding protein [Ajellomyces capsulatus G186AR] gi|240275775|gb|EER39288.1| KH domain RNA-binding protein [Ajellomyces capsulatus H143]
  misc_feature (1)..(462): NCBI GI: 46108346 Blast Desc: FG01055.1 [Gibberella zeae PH-1]
  misc_feature (1)..(486): NCBI GI: 154319404 Blast Desc: BC1G_02183 [Botryotinia fuckeliana B05.10] gi|150855841|gb|EDN31033.1| BC1G_02183 [Botryotinia fuckeliana B05.10]
  misc_feature: Useful for introducing or modulating the production of volatile compounds
MSASPTHTTNPAKRPLEDASSPSRSNDQPEAKRPALDKVISNDEEDVEKIEIPESNGDAVPATAEANGTTKPEDANGEKTEAKDEQGDTILRDVTDPKAAPAPITSATGTATVPSGIPGNAGDETAWIHIRAVISSPEAATIIGKGGENVSNIRKLSGAKCTVSDYQKGAVERILTVSGVVDAAAKAFGLIIRTLNNEPLNETSSAQSKTYPLRLLIPHVLIGSIIGKGGVRIREIQDASGARLNASDSCLPMSSERSLVVMGVADAVHIATYYVGSTLLEQLNERFGGPAASAYATRSGGPAGAVPGGMQVIPYTPQPAGGNYGRQENYGRRPDPRSQHYPPAPYAQPYHPHAANPQQPNPNVPMHYQAQPGGYGAGPHMPPHQAGHAAGPQHHGGPPAQQPMHGGMAGAPLTQQIFIPNDMVGAIIGKGGQKINEIRQISGSVIKINEPQDNSNERLVTITGTEECNRMALYMLYSRLESEKHRI

SEQ ID NO: 27850 - DNA, 3053 bp, Muscodor strobelii
  misc_feature: SGI EST ID NO. CUFF.65720.0
  misc_feature: Variant of the nucleotide sequence at SEQ ID NO 27848
ctttttccatcgccctttttcaacgaggcacaagcacatattcaactcgaagtcttcgccgggacttgagcaccacggcgatagatatcagcattcattgtcctctgtgccattcaatttcccctcagagattatctgccgtaattgtaacgcgtggtcgttaatgcagcgccaccgctacgccaggtacattgaattttagtttggcggctctgactggctgcccatctgaaagagtgggacacctggggaaagctagctgctgcctcaccagctctttctctccgacagactgcatcgggtcatcctccaggttcttgccatcttcatcatcaacatcatcaacacaactgtttctttcacccacggccgtcgcacgctgcacctaccgtcaacagcagcaggcagtggcagcttccgacgaccctgtcgtgtgtgacatcggggtatttccgtagagaaggaacgccggcaattctgaatcaggttcagaaattgaactcggactgaaggagcttggaaaggtttgaggacaagttcacctctctgattctacccgtcgctcacctcgcgtcacctacctcctcattcagtccgccaacctctctgacatctgggtatcttgttctcctcttgacactcccagcaccactcactctctccttgggttgatcatcatctcctgtgatctccccatctgcctccctcccaacctcgcactgttgagctctgaagtcttccatccgccacaccagtcgccgcctcgtgcacttccctccttgtcaacgctttcagtctcgccgcccgccagacttcgagcacacctcttcagccctccaccgctggactctagcagacggctgaactcagcggcatctgcccagcttccaatctccgtcgtcaccacccgacctggcagcaccggcttctgtcactgcaacgaccctacagcctccagctcgacccgatcctgtttgtccctgatcctcagaccacacaaagcctcctgcccacctccgtgtgcctcccagcttgactttcgccccgagccattgcacctgcacgttttcctacgcaaaacagttcaaggtgtagataatcaagactcgataatcaagaattctatcgctattcggctgaaaaagctaaagctgtgccacatctcccactatctgtgtgacatatatccagccattataggacaaccgaccaaacgacaacatgtctgcctcgcccacgcacaccaccaacccggccaagcgccccctagaggatgcttcctccccgtctcgatccaatgaccagcccgaggccaagcgaccggccctcgacaaagtcatcagcaatgacgaggaagacgtagagaagatcgagatccccgagagcaacggcgacgctgttcccgcaacggccgaagccaacggtaccacgaagcccgaggatgctaatggtgagaagaccgaagccaaggacgagcagggcgacactatcctccgcgatgtcaccgatcctaaggctgcaccggctcccatcacctcggccacaggcacggcaaccgttcccagcggcatcccgggcaatgcgggcgacgagactgcgtggatccacatcagagccgtcatctcgagcccagaagccgccaccattataggcaaaggtggcgagaatgtgtccaacattcgcaagctttctggtgccaaatgcactgtgagtgactatcaaaagggtgctgtagagcgtatcttgaccgttagcggggttgttgatgccgctgctaaagcatttggcttgattatccgcacgcttaacaacgagcccttgaatgagacgtccagtgctcagtcgaagacctatcctttgcgccttctaattcctcacgtgttgataggatcgatcatcggcaagggtggagtacgcattcgagagatccaagacgcgtctggggcccggcttaatgcatcggactcctgtctgcccatgtccagtgagcgttcgctcgtcgtcatgggtgtggctgacgccgtgcacatcgcaacttactatgtaggaagcactctactcgagcagctcaacgagcggttcggtgggcccgctgcctcggcatatgcaacgcggagcggaggtcctgcgggtgcggtccccggaggcatgcaggtcattccgtacactcctcagcctgctggcggcaactatggacgacaggagaactatggcagacgtcccgaccctcggtcacagcattatcctcctgctccctacgctcaaccgtaccatccccatgctgctaatccccagcagcccaatcccaatgtcccgatgcactaccaggcacaacctggtggctatggagctggtccgcacatgcctccccaccaagctggccatgctgctggtccccaacatcacggcggcccccctgcccagcaacccatgcatggtggcatggccggtgctcctctgacccagcagatttttattcctaacgatatggttggtgctataataggcaagggtggccagaagatcaatgagatcagacaaatcagcggcagcgttattaagatcaatgagccccaggacaacagcaatgagcgccttgttaccatcacgggaactgaggagtgcaacaggatggcactttacatgctgtactctcgactcgaaagcgagaaacaccggatctaaatgccatgtcacatcacccgacgatgccgtccgactcacgtttccaggttttccaggctggtctcctcccgccctctcgattcgtattcgttcataccacgaccggcgattcctcgactctccgaccaggagtgggtatatggcggtggacggcgtcaaggtttggtcatggtttgctatctttttaatggttcgggcgtttacaaaaaaaattgttcgttcaagctcgggtatacatgatgagaagggagaaggttgatacataggaagcccataataagtacagatgtggattttcggcattctagctcgtttcttctggcctgttggtgctacatgtgttccttgctatttcgtgacccggctat

SEQ ID NO: 27851 - DNA, 1476 bp, Muscodor strobelii
  misc_feature: SGI cDNA ID NO. 569549
  misc_feature: Reduced expression when VOC is produced
  misc_feature: Encodes the peptide sequence at SEQ ID NO 27852
atgtctgcctcgcccacgcacaccaccaacccggccaagcgccccctagaggatgcttcctccccgtctcgatccaatgaccagcccgaggccaagcgaccggccctcgacaaagtcatcagcaatgacgaggaagacgtagagaagatcgagatccccgagagcaacggcgacgctgttcccgcaacggccgaagccaacggtaccacgaagcccgaggatgctaatggtgagaagaccgaagccaaggacgagcagggcgacactatcctccgcgatgtcaccgatcctaaggctgcaccggctcccatcacctcggccacaggcacggcaaccgttcccagcggcatcccgggcaatgcgggcgacgagactgcgtggatccacatcagagccgtcatctcgagcccagaagccgccaccattataggcaaaggtggcgagaatgtgtccaacattcgcaagctttctggtgccaaatgcactgtgagtgactatcaaaagggtgctgtagagcgtatcttgaccgttagcggggttgttgatgccgctgctaaagcatttggcttgattatccgcacgcttaacaacgagcccttgaatgagacgtccagtgctcagtcgaagacctatcctttgcgccttctaattcctcacgtgttgataggatcgatcatcggcaagggtggagtacgcattcgagagatccaagacgcgtctggggcccggcttaatgcatcggactcctgtctgcccatgtccagtgagcgttcgctcgtcgtcatgggtgtggctgacgccgtgcacatcgcaacttactatgtaggaagcactctactcgagcagctcaacgagcggttcggtgggcccgctgcctcggcatatgcaacgcggagcggaggtcctgcgggtgcggtccccggaggcatgcaggtcattccgtacactcctcagcctgctggcggcaactatggacgacaggagaactatggcagacgtcccgaccctcggtcacagcattatcctcctgctccctacgctcaaccgtaccatccccatgctgctaatccccagcagcccaatcccaatgtcccgatgcactaccaggcacaacctggtggctatggagctggtccgcacatgcctccccaccaagctggccatgctgctggtccccaacatcacggcggcccccctgcccagcaacccatgcatggtggcatggccggtgctcctctgacccagcagatttttattcctaacgatatggttggtgctataataggcaagggtggccagaagatcaatgagatcagacaaatcagcggcagcgttattaagatcaatgagccccaggacaacagcaatgagcgccttgttaccatcacgggaactgaggagtgcaacaggatggcactttacatgctgtactctcgactcggtgagctcaagtcccggactgcgggaaacaattga

SEQ ID NO: 27852 - protein, 491 aa, Muscodor strobelii
  misc_feature: SGI Peptide ID NO. 569549
  misc_feature (414)..(476): Pfam Id: PF00013 Pfam Desc: KH domain
  misc_feature (212)..(275): Pfam Id: PF00013 Pfam Desc: KH domain
  misc_feature (129)..(191): Pfam Id: PF00013 Pfam Desc: KH domain
  misc_feature (1)..(480): NCBI GI: 261356231 Blast Desc: Poly(rC)-binding protein [Verticillium albo-atrum VaMs.102]
  misc_feature (1)..(486): NCBI GI: 171687621 Blast Desc: protein product [Podospora anserina] gi|170943772|emb|CAP69424.1| protein product [Podospora anserina]
  misc_feature (1)..(491): NCBI GI: 256735150 Blast Desc: NECHADRAFT_30745 [Nectria haematococca mpVI 77-13-4]
  misc_feature (1)..(485): NCBI GI: 85111179 Blast Desc: NCU09237 [Neurospora crassa OR74A] gi|28925551|gb|EAA34578.1| NCU09237 [Neurospora crassa OR74A] gi|38566984|emb|CAE76284.1| related to hnRNP protein E2 crassa]
  misc_feature (1)..(486): NCBI GI: 116180584 Blast Desc: conserved [Chaetomium globosum CBS 148.51] gi|88185217|gb|EAQ92685.1| conserved [Chaetomium globosum CBS 148.51]
  misc_feature (1)..(488): NCBI GI: 156030905 Blast Desc: SS1G_14233 [Sclerotinia sclerotiorum 1980] gi|154700624|gb|EDO00363.1| SS1G_14233 [Sclerotinia sclerotiorum 1980]
  misc_feature (1)..(484): NCBI GI: 258574629 Blast Desc: conserved [Uncinocarpus reesii 1704] gi|237901762|gb|EEP76163.1| conserved [Uncinocarpus reesii 1704]
  misc_feature (1)..(485): NCBI GI: 145611282 Blast Desc: MGG_00514 [Magnaporthe grisea 70-15] gi|145018586|gb|EDK02865.1| MGG_00514 [Magnaporthe grisea 70-15]
  misc_feature (1)..(462): NCBI GI: 46108346 Blast Desc: FG01055.1 [Gibberella zeae PH-1]
  misc_feature (1)..(486): NCBI GI: 225563195 Blast Desc: KH domain RNA binding protein [Ajellomyces capsulatus G186AR] gi|240275775|gb|EER39288.1| KH domain RNA-binding protein [Ajellomyces capsulatus H143]
  misc_feature: Useful for introducing or modulating the production of volatile compounds
MSASPTHTTNPAKRPLEDASSPSRSNDQPEAKRPALDKVISNDEEDVEKIEIPESNGDAVPATAEANGTTKPEDANGEKTEAKDEQGDTILRDVTDPKAAPAPITSATGTATVPSGIPGNAGDETAWIHIRAVISSPEAATIIGKGGENVSNIRKLSGAKCTVSDYQKGAVERILTVSGVVDAAAKAFGLIIRTLNNEPLNETSSAQSKTYPLRLLIPHVLIGSIIGKGGVRIREIQDASGARLNASDSCLPMSSERSLVVMGVADAVHIATYYVGSTLLEQLNERFGGPAASAYATRSGGPAGAVPGGMQVIPYTPQPAGGNYGRQENYGRRPDPRSQHYPPAPYAQPYHPHAANPQQPNPNVPMHYQAQPGGYGAGPHMPPHQAGHAAGPQHHGGPPAQQPMHGGMAGAPLTQQIFIPNDMVGAIIGKGGQKINEIRQISGSVIKINEPQDNSNERLVTITGTEECNRMALYMLYSRLGELKSRTAGNN

SEQ ID NO: 27853 - DNA, 3053 bp, Muscodor strobelii; identical to SEQ ID NO: 27850
  misc_feature: SGI EST ID NO. CUFF.65720.0
  misc_feature: Variant of the nucleotide sequence at SEQ ID NO 27851

SEQ ID NO: 27854 - DNA, 999 bp, Muscodor strobelii
  misc_feature: SGI cDNA ID NO. 569550
  misc_feature: Encodes the peptide sequence at SEQ ID NO 27855
atggctggtttgatcaacgaaacgcgtcggaccgatgacttcgacatggttcatgcaaggcacctggaggacacgctgcaggaactccaggccatggttgacgagcatcaagatgcattgaataagctactcgcatcaccagcaatcaatctccaggctcagcatgtgcctgcaacttcgtcattggatgcaatgaaaacggcatttgatgatctggcagcaacaacaccatttctcccacatcctgactctgtcctaccggcacttcttgctcttcggaggacgcatcagaccgtagaggagacgaagcaggccatagcaacacaggagcagaccgtggaaaacaccaagaaaaaattggaggagaccaaggcagacttcagcaatcaacaggcgcttgcacacagcctacgcgggcgcattcaatccttacagaatggcctcgaggatcgcatggaattgggcccggaagacattgcacgcgagaggatcaaggaactaaaacagaagaaaagacactacgataaagagacctcgaagctgatgagatcactcaagaagttcattggagatcatcttgcaggaatgctcgccgcggaggaactcggcgggcctgttgtgggcgatttgatggaagttgaccaggaggatatcgctggaggcttcaactctcagggacgagccaagaaaacacaggcgaagaatgcagatggcaaaagacaacagcgcatcgatgaaatatggggcgccaatagagaagatgaggaagaggataactggaacgagatcacggcggctggtcaagagatgcaggacctcacagcagaattgctcaaccagttggcagaatccgagggtgacagctcagcggcatacgtccagcttgccagagagtcggcggcagctagatttctggtgcgcgctcaagtagcacaattccaccccaaggactcgactagactgcgattgatcgactttggcagggagttggatgactga

SEQ ID NO: 27855 - protein, 332 aa, Muscodor strobelii
  misc_feature: SGI Peptide ID NO. 569550
  misc_feature (18)..(332): NCBI GI: 261356232 Blast Desc: conserved [Verticillium albo-atrum VaMs.102]
  misc_feature (18)..(332): NCBI GI: 39974677 Blast Desc: MGG_00515 [Magnaporthe grisea 70-15] gi|145018585|gb|EDK02864.1| MGG_00515 [Magnaporthe grisea 70-15]
  misc_feature (22)..(331): NCBI GI: 256734437 Blast Desc: NECHADRAFT_74699 [Nectria haematococca mpVI 77-13-4]
  misc_feature (17)..(332): NCBI GI: 116180582 Blast Desc: CHGG_00919 [Chaetomium globosum CBS 148.51] gi|88185216|gb|EAQ92684.1| CHGG_00919 [Chaetomium globosum CBS 148.51]
  misc_feature (22)..(331): NCBI GI: 46108344 Blast Desc: FG01054.1 [Gibberella zeae PH-1]
  misc_feature (18)..(332): NCBI GI: 171687623 Blast Desc: protein product [Podospora anserina] gi|170943773|emb|CAP69425.1| protein product [Podospora anserina]
  misc_feature (1)..(332): NCBI GI: 85111181 Blast Desc: NCU09238 [Neurospora crassa OR74A] gi|28925552|gb|EAA34579.1| [Neurospora crassa OR74A] gi|38566985|emb|CAE76285.1| [Neurospora crassa]
  misc_feature (13)..(332): NCBI GI: 169617926 Blast Desc: SNOG_12146 [Phaeosphaeria nodorum SN15] gi|160703515|gb|EAT80558.2| SNOG_12146 [Phaeosphaeria nodorum SN15]
  misc_feature (13)..(332): NCBI GI: 189194347 Blast Desc: conserved [Pyrenophora tritici-repentis Pt-1C-BFP] gi|187979076|gb|EDU45702.1| conserved [Pyrenophora tritici-repentis Pt-1C-BFP]
  misc_feature (18)..(332): NCBI GI: 212529004 Blast Desc: conserved [Penicillium marneffei ATCC 18224] gi|210074057|gb|EEA28144.1| conserved [Penicillium marneffei ATCC 18224]
MAGLINETRRTDDFDMVHARHLEDTLQELQAMVDEHQDALNKLLASPAINLQAQHVPATSSLDAMKTAFDDLAATTPFLPHPDSVLPALLALRRTHQTVEETKQAIATQEQTVENTKKKLEETKADFSNQQALAHSLRGRIQSLQNGLEDRMELGPEDIARERIKELKQKKRHYDKETSKLMRSLKKFIGDHLAGMLAAEELGGPVVGDLMEVDQEDIAGGFNSQGRAKKTQAKNADGKRQQRIDEIWGANREDEEEDNWNEITAAGQEMQDLTAELLNQLAESEGDSSAAYVQLARESAAARFLVRAQVAQFHPKDSTRLRLIDFGRELDD

SEQ ID NO: 27856 - DNA, 552 bp, Muscodor strobelii
  misc_feature: SGI cDNA ID NO. 569551
  misc_feature: Encodes the peptide sequence at SEQ ID NO 27857
atgaccatagacccagtcgcatcgcctccaacatcaccgccgtctaagcgactcaaaacaaacaacatcgcaagcacaatggccgaaagcaccagcaacgtcgctgtcgctcccctggagtcatctcctcccctgcagatcaagaagctatctgagacggcctgtttgcctactcgtggaagcgctttcgccgctggatacgacgtctacgcctctaaggctactactgtccctgcgcgtggtaaagttcttgtcgataccgatatcgccatcgctgtgcctgccggtacctatggccgtattgcgcctcgctcgggcctagcctcgaagcacttcattgacaccggtgccggtgtcatcgacgccgactaccgcggccaagtcaagatcctgctcttcaaccactctgagaccgacttccccattgcggagggtgatcgagttgcgcagctcatcattgagcgtatctatacccctgaggttgttgaggtccaggagctggaggagagtgttcgtggtgctggtggcttcggcagcacgggaactaattag

SEQ ID NO: 27857 - protein, 183 aa, Muscodor strobelii
  misc_feature: SGI Peptide ID NO. 569551
  misc_feature (52)..(181): Pfam Id: PF00692 Pfam Desc: dUTPase
  misc_feature (10)..(183): NCBI GI: 116180580 Blast Desc: dUTP pyrophosphatase [Chaetomium globosum CBS 148.51] gi|88185215|gb|EAQ92683.1| dUTP pyrophosphatase [Chaetomium globosum CBS 148.51]
  misc_feature (8)..(183): NCBI GI: 67515979 Blast Desc: AN0271.2 [Aspergillus nidulans FGSC A4] gi|40746988|gb|EAA66144.1| AN0271.2 [Aspergillus nidulans FGSC A4] gi|259489510|tpe|CBF89841.1| TPA: dUTPase (Dut), putaive FGSC
  misc_feature (10)..(181): NCBI GI: 119497199 Blast Desc: dUTPase (Dut), putaive [Neosartorya fischeri NRRL 181] gi|119413524|gb|EAW23465.1| dUTPase (Dut), putaive [Neosartorya fischeri NRRL 181]
  misc_feature (1)..(181): NCBI GI: 256734438 Blast Desc: [Nectria haematococca mpVI 77-13-4]
  misc_feature (36)..(181): NCBI GI: 156035996 Blast Desc: SS1G_12684 [Sclerotinia sclerotiorum 1980] gi|154698092|gb|EDN97830.1| SS1G_12684 [Sclerotinia sclerotiorum 1980]
  misc_feature (8)..(181): NCBI GI: 70990380 Blast Desc: dUTPase (Dut), putaive [Aspergillus fumigatus Af293] gi|66847671|gb|EAL88001.1| dUTPase (Dut), putaive [Aspergillus fumigatus Af293] gi|159130517|gb|EDP55630.1| dUTPase (Dut),
  misc_feature (10)..(183): NCBI GI: 238483415 Blast Desc: dUTPase (Dut), [Aspergillus flavus NRRL3357] gi|220700996|gb|EED57334.1| dUTPase (Dut), [Aspergillus flavus NRRL3357]
  misc_feature (10)..(181): NCBI GI: 145229243 Blast Desc: An01g05040 [Aspergillus niger] gi|134055031|emb|CAK37038.1| protein product [Aspergillus niger]
  misc_feature (16)..(181): NCBI GI: 212539496 Blast Desc: dUTPase (Dut), [Penicillium marneffei ATCC 18224] gi|210067202|gb|EEA21294.1| dUTPase (Dut), [Penicillium marneffei ATCC 18224]
  misc_feature (10)..(183): NCBI GI: 169766662 Blast Desc: [Aspergillus oryzae RIB40] gi|83765657|dbj|BAE55800.1| protein product [Aspergillus oryzae]
  misc_feature (36)..(177): SWISSPROT Homolog: EC 3.6.1.23 dUTP diphosphatase
MTIDPVASPPTSPPSKRLKTNNIASTMAESTSNVAVAPLESSPPLQIKKLSETACLPTRGSAFAAGYDVYASKATTVPARGKVLVDTDIAIAVPAGTYGRIAPRSGLASKHFIDTGAGVIDADYRGQVKILLFNHSETDFPIAEGDRVAQLIIERIYTPEVVEVQELEESVRGAGGFGSTGTN

SEQ ID NO: 27858 - DNA, 3062 bp, Muscodor strobelii
  misc_feature: SGI EST ID NO. CUFF.65814.0
  misc_feature: Variant of the nucleotide sequence at SEQ ID NO 27856
gtcgtctcttcgcccactccaaacagccccaccacttaacgcgtctaaacgcgacttccctgtcacctctcaactcaattggcaaccgtccccccaccaaacaccatcgaccggtgaccgcccttttctcgacaacagcacaatccgtaccgaataacacaacctgtaccgatcaatcgatgccagtaccatgaccatagacccagtcgcatcgcctccaacatcaccgccgtctaagcgactcaaaacaaacaacatcgcaagcacaatggccgaaagcaccagcaacgtcgctgtcgctcccctggagtcatctcctcccctgcagatcaagaagctatctgagacggcctgtttgcctactcgtggaagcgctttcgccgctggatacgacgtctacgcctctaaggctactactgtccctgcgcgtggtaaagttcttgtcgataccgatatcgccatcgctgtgcctgccggtacctatggccgtattgcgcctcgctcgggcctagcctcgaagcacttcattgacaccggtgccggtgtcatcgacgccgactaccgcggccaagtcaagatcctgctcttcaaccactctgagaccgacttccccattgcggagggtgatcgagttgcgcagctcatcattgagcgtatctatacccctgaggttgttgaggtccaggagctggaggagagtgttcgtggtgctggtggcttcggcagcacgggaactaattagcagacggttcccgatgatgcgagcgagcatgctagtggtagcgatgatgacttttactactccgccggtcatgatgcgggaatcgagtggaatcagaatgactacgcagccgcactaggagatgatccaatttattttcctggtgaggtagagcataagcctattgaatgggtggacggcttggctctctgaatgcccaacaacggagatgaaatagacgcctataaccaaggcctcttactttggttcgaatcatctctcgaaccatcatccgaatgatttctgggatcgaggtgaccgtcagcctttgttgcaaaccaagaggaaacaggaatatcggattgccctatttcttgttgtggtatggcatgacagagaaaaaagaagatgaatcaaaggatcacagggcaaataattccggtctcatatggccaagttagccatagcataggatgacaattagctatgaatgaaaaccaagactcataacctgaaccgcttgttttctacaaatactctattccatgttgaatttatccccttccatgctataacgaaacaaatgcaaccaaccatctttaatgcgaccctgaaatgctcaattaaaccctcccaacaacaaccacgcaaccttcaagccccttcacatcctaactgccctatactcaacactaggccccctcaaacacttcaaattcctgctcaacttcaactccgccgcctgactcctgagtaaatgcatcgcatcaacatcttccctcacagcactttcctctacaccccttctccccgctaatcttttaacagcctcctgcagctgtccttccattccctcacaagtcctcaacagtacttcatgcatactcgcaagcaccttctctgccgccctagcaagcggtaaatccgtagcctcgacttgatcaggactcaaccaactctccctatctctcgtcccaaactgcacatcatcacagaccgcctccctcatccgtaccaccatgagcgctgcgaacatatcccccgtgccggagaaatacgctttgaagactgggaactggatagtgaataatctcgctttaccctctgatgtacggctcgatcccacgacggacatggttggggtttggggaacttgtgactgaatgggactcgcaggacgtgtcgaagttggagtttgcgaaggcgtgatgatgggtagggagacggatgttattacgatgtgcgggatgttgtatgagctgtgtaggacttcgatggcgcgggatagggatgtggagtcggttatttttacgccggagaggagtctgtagtgttgttcgttagctctcgctcctggctacacatgaaacatcggcttcaagttgtaaaaagtaacagcgctcactcagcctcaaactgattaggaagaatcaaatccgcactcgagatcaactccctatacttcggcaccacatcctcagcgacgtatatcttcccattatcacccatgacagggtcaagaacccagaagaaaccccctggtctactcttcgcgttttctttcagctcctttgctatagcgcctacggactcaacgcccgcggcgccgggcacgtagccggagagcatcatgtcgaaggtatcgaggtgtgattgtttaagcccatcccagagatcggtgatctcctgcgcggatagacgcgtgcctttgaagcgccggtagcctgtgtggttacctatctactaggtcagaagtcttggtctggattcgggacggagcgacgagaacatactgaattgtacggtgtttagggctgatacgtcgcagcctagggactgaaggacgaagacggcgatcttgtttcctacatggctgtaggaaactctcattagcggaccggcgcatcggaatagggggactaagctcacccggagacaaccttgataaggaattagctaagcggcgcaagacgtgggaagatgacttattcctacatggctggcgatcgcgaggacgcttgtttctggtacaggaggttcggaactcatttgagtctctgtgtgactctaaattttcgataatgagcgaagaagctctgggagctggcgcattcgatgtttttacagctcaagtggaatacggtctttgagcgctggtgacggcgttcgggtgtggaatgtcctcttggattggatctatgaatttctagagggaaccaaataatcgagtatactgaaaagtgagttttgattagagaatcgttaaagataaagtccgcaagaatgtcagaacggtgtgactcgtgactttcctaccggcgcaacttgaaataaaagacgg

SEQ ID NO: 27859 - DNA, 1137 bp, Muscodor strobelii
  misc_feature: SGI cDNA ID NO. 569552
  misc_feature: Reduced expression when VOC is produced
  misc_feature: Encodes the peptide sequence at SEQ ID NO 27860
atgagttccgaacctcctgtaccagaaacaagcgtcctcgcgatcgccagccatgttgtctccggccatgtaggaaacaagatcgccgtcttcgtccttcagtccctaggctgcgacgtatcagccctaaacaccgtacaattcagtaaccacacaggctaccggcgcttcaaaggcacgcgtctatccgcgcaggagatcaccgatctctgggatgggcttaaacaatcacacctcgataccttcgacatgatgctctccggctacgtgcccggcgccgcgggcgttgagtccgtaggcgctatagcaaaggagctgaaagaaaacgcgaagagtagaccagggggtttcttctgggttcttgaccctgtcatgggtgataatgggaagatatacgtcgctgaggatgtggtgccgaagtatagggagttgatctcgagtgcggatttgattcttcctaatcagtttgaggctgaactcctctccggcgtaaaaataaccgactccacatccctatcccgcgccatcgaagtcctacacagctcatacaacatcccgcacatcgtaataacatccgtctccctacccatcatcacgccttcgcaaactccaacttcgacacgtcctgcgagtcccattcagtcacaagttccccaaaccccaaccatgtccgtcgtgggatcgagccgtacatcagagggtaaagcgagattattcactatccagttcccagtcttcaaagcgtatttctccggcacgggggatatgttcgcagcgctcatggtggtacggatgagggaggcggtctgtgatgatgtgcagtttgggacgagagatagggagagttggttgagtcctgatcaagtcgaggctacggatttaccgcttgctagggcggcagagaaggtgcttgcgagtatgcatgaagtactgttgaggacttgtgagggaatggaaggacagctgcaggaggctgttaaaagattagcggggagaaggggtgtagaggaaagtgctgtgagggaagatgttgatgcgatgcatttactcaggagtcaggcggcggagttgaagttgagcaggaatttgaagtgtttgagggggcctagtgttgagtatagggcagttaggatgtga

SEQ ID NO: 27860 - protein, 378 aa, Muscodor strobelii
  misc_feature: SGI Peptide ID NO. 569552
  misc_feature (135)..(191): Pfam Id: PF00294 Pfam Desc: pfkB family carbohydrate kinase
  misc_feature (134)..(191): Pfam Id: PF08543 Pfam Desc: Phosphomethylpyrimidine kinase
  misc_feature (1)..(378): NCBI GI: 46108342 Blast Desc: FG01053.1 [Gibberella zeae PH-1]
  misc_feature (1)..(367): NCBI GI: 256735151 Blast Desc: [Nectria haematococca mpVI 77-13-4]
  misc_feature (1)..(375): NCBI GI: 121703133 Blast Desc: pyridoxine kinase [Aspergillus clavatus NRRL 1] gi|119397974|gb|EAW08405.1| pyridoxine kinase [Aspergillus clavatus NRRL 1]
  misc_feature (33)..(325): NCBI GI: 164423046 Blast Desc: NCU10351 [Neurospora crassa OR74A] gi|157069926|gb|EDO64924.1| NCU10351 [Neurospora crassa OR74A]
  misc_feature (33)..(378): NCBI GI: 145611278 Blast Desc: MGG_00517 [Magnaporthe grisea 70-15] gi|145018583|gb|EDK02862.1| MGG_00517 [Magnaporthe grisea 70-15]
  misc_feature (7)..(373): NCBI GI: 255951346 Blast Desc: Pc22g25550 [Penicillium chrysogenum Wisconsin 54-1255] gi|211593457|emb|CAP99843.1| Pc22g25550 [Penicillium chrysogenum Wisconsin 54-1255]
  misc_feature (1)..(375): NCBI GI: 145229245 Blast Desc: An01g05050 [Aspergillus niger] gi|134055032|emb|CAK37039.1| protein product [Aspergillus niger]
  misc_feature (4)..(325): NCBI GI: 38566987 Blast Desc: related to pyridoxal kinase [Neurospora crassa]
  misc_feature (1)..(318): NCBI GI: 261356236 Blast Desc: pyridoxal kinase [Verticillium albo-atrum VaMs.102]
  misc_feature (28)..(375): NCBI GI: 154323930 Blast Desc: BC1G_00364 [Botryotinia fuckeliana B05.10] gi|150842593|gb|EDN17786.1| BC1G_00364 [Botryotinia fuckeliana B05.10]
  misc_feature (12)..(316): SWISSPROT Homolog: EC 2.7.1.35 Pyridoxal kinase
  misc_feature: Useful for introducing or modulating the production of volatile compounds
MSSEPPVPETSVLAIASHVVSGHVGNKIAVFVLQSLGCDVSALNTVQFSNHTGYRRFKGTRLSAQEITDLWDGLKQSHLDTFDMMLSGYVPGAAGVESVGAIAKELKENAKSRPGGFFWVLDPVMGDNGKIYVAEDVVPKYRELISSADLILPNQFEAELLSGVKITDSTSLSRAIEVLHSSYNIPHIVITSVSLPIITPSQTPTSTRPASPIQSQVPQTPTMSVVGSSRTSEGKARLFTIQFPVFKAYFSGTGDMFAALMVVRMREAVCDDVQFGTRDRESWLSPDQVEATDLPLARAAEKVLASMHEVLLRTCEGMEGQLQEAVKRLAGRRGVEESAVREDVDAMHLLRSQAAELKLSRNLKCLRGPSVEYRAVRM

SEQ ID NO: 27861 - DNA, 2873 bp, Muscodor strobelii
  misc_feature: SGI EST ID NO. CUFF.65815.2
  misc_feature: Variant of the nucleotide sequence at SEQ ID NO 27859
ccgtcttttatttcaagttgcgccggtaggaaagtcacgagtcacaccgttctgacattcttgcggactttatctttaacgattctctaatcaaaactcacttttcagtatactcgattatttggttccctctagaaattcatagatccaatccaagaggacattccacacccgaacgccgtcaccagcgctcaaagaccgtattccacttgagctgtaaaaacatcgaatgcgccagctcccagagcttcttcgctcattatcgaaaatttagagtcacacagagactcaaatgagttccgaacctcctgtaccagaaacaagcgtcctcgcgatcgccagccatgttgtctccggccatgtaggaaacaagatcgccgtcttcgtccttcagtccctaggctgcgacgtatcagccctaaacaccgtacaattcagtaaccacacaggctaccggcgcttcaaaggcacgcgtctatccgcgcaggagatcaccgatctctgggatgggcttaaacaatcacacctcgataccttcgacatgatgctctccggctacgtgcccggcgccgcgggcgttgagtccgtaggcgctatagcaaaggagctgaaagaaaacgcgaagagtagaccagggggtttcttctgggttcttgaccctgtcatgggtgataatgggaagatatacgtcgctgaggatgtggtgccgaagtatagggagttgatctcgagtgcggatttgattcttcctaatcagtttgaggctgaactcctctccggcgtaaaaataaccgactccacatccctatcccgcgccatcgaagtcctacacagctcatacaacatcccgcacatcgtaataacatccgtctccctacccatcatcacgccttcgcaaactccaacttcgacacgtcctgcgagtcccattcagtcacaagttccccaaaccccaaccatgtccgtcgtgggatcgagccgtacatcagagggtaaagcgagattattcactatccagttcccagtcttcaaagcgtatttctccggcacgggggatatgttcgcagcgctcatggtggtacggatgagggaggcggtctgtgatgatgtgcagtttgggacgagagatagggagagttggttgagtcctgatcaagtcgaggctacggatttaccgcttgctagggcggcagagaaggtgcttgcgagtatgcatgaagtactgttgaggacttgtgagggaatggaaggacagctgcaggaggctgttaaaagattagcggggagaaggggtgtagaggaaagtgctgtgagggaagatgttgatgcgatgcatttactcaggagtcaggcggcggagttgaagttgagcaggaatttgaagtgtttgagggggcctagtgttgagtatagggcagttaggatgtgaaggggcttgaaggttgcgtggttgttgttgggagggtttaattgagcatttcagggtcgcattaaagatggttggttgcatttgtttcgttatagcatggaaggggataaattcaacatggaatagagtatttgtagaaaacaagcggttcaggttatgagtcttggttttcattcatagctaattgtcatcctatgctatggctaacttggccatatgagaccggaattatttgccctgtgatcctttgattcatcttcttttttctctgtcatgccataccacaacaagaaatagggcaatccgatattcctgtttcctcttggtttgcaacaaaggctgacggtcacctcgatcccagaaatcattcggatgatggttcgagagatgattcgaaccaaagtaagaggccttggttataggcgtctatttcatctccgttgttgggcattcagagagccaagccgtccacccattcaataggcttatgctctacctcaccaggaaaataaattggatcatctcctagtgcggctgcgtagtcattctgattccactcgattcccgcatcatgaccggcggagtagtaaaagtcatcatcgctaccactagcatgctcgctcgcatcatcgggaaccgtctgctaattagttcccgtgctgccgaagccaccagcaccacgaacactctcctccagctcctggacctcaacaacctcaggggtatagatacgctcaatgatgagctgcgcaactcgatcaccctccgcaatggggaagtcggtctcagagtggttgaagagcaggatcttgacttggccgcggtagtcggcgtcgatgacaccggcaccggtgtcaatgaagtgcttcgaggctaggcccgagcgaggcgcaatacggccatctgattgtggtgatgattagtattgcattgagaaagatagatacagacgaatgacttacaggtaccggcaggcacagcgatggcgatatcggtatcgacaagaactttaccacgcgcagggacagtagtagccttagaggcgtagacgtcgtatccagcggcgaaagcgcttccacgagtaggcaaacaggccgtctcagatagcttcttgatctgcaggggaggagatgactccaggggagcgacagcgacgttgctggtgctttcggccattgtgcttgcgatgttgtttgttttgagtcgcttagacggcggtgatgttggaggcgatgcgactgggtctatggtcatggtactggcatcgattgatcggtacaggttgtgttattcggtacggattgtgctgttgtcgagaaaagggcggtcaccggtcgatggtgtttggtggggggacggttgccaattgagttgagaggtgacagggaagtcgcgtttagacgcgttaagtggtggggctgtttggagtgggcgaagagacgac

SEQ ID NO: 27862 - DNA, 780 bp, Muscodor strobelii
  misc_feature: SGI cDNA ID NO. 569553
  misc_feature: Encodes the peptide sequence at SEQ ID NO 27863
atgctggaagccagactcgagcagtccgcggttctgaagaaggtcgtcgatgccatcaaggacctggtgcaggactgcaacttcgactgcaatgactcaggcatcgccctccaggccatggacaactcccacgtcgccctcgtgtccatgctgctcaaggccgaatccttcaacccctacagatgcgaccgaaacatcgcccttggtgtcaacttggtctccctgaccaaggttctgcgtgccctccagtccgatgaccagatcaccctcaaggccgaggatgcccccgactctctcaacattcagttcgacagctcttctgccgaccggctgagtgtctacgacctcaagcttatggacatcgaccaggagcacttgggcattcccgacaccgagtatgccgctaccgtctccatgccctcggccgagttcaagcgcatctgcacagatttgatggctatgtctgagtctgtcaccatcgaagccaccaaggacggcgtcaagttctcgtgcagtggcgatatcggcaacggtgccgtcactctacgaaactaccagatagaaggaaagcccgaggccaacgtcgaaatcgagttgaccgagcctgtctctctcacattctcgctcaagtatctcgtcaacttctgcaaagcccagcctctgtcgccgaccgtcaagatctgtctctctaatgaagtgccgctgttggtggagtacctcgtaagcggaaccagctacctgcggttctacctggctcctaagattggagacgaggagtaa

SEQ ID NO: 27863 - protein, 259 aa, Muscodor strobelii
  misc_feature: SGI Peptide ID NO. 569553
  misc_feature (127)..(254): Pfam Id: PF02747 Pfam Desc: Proliferating cell nuclear antigen, C-terminal domain
  misc_feature (1)..(125): Pfam Id: PF00705 Pfam Desc: Proliferating cell nuclear antigen, N-terminal domain
  misc_feature (1)..(259): NCBI GI: 145611276 Blast Desc: conserved [Magnaporthe grisea 70-15] gi|145018582|gb|EDK02861.1| conserved [Magnaporthe grisea 70-15]
  misc_feature (1)..(259): NCBI GI: 85114334 Blast Desc: proliferating cell nuclear antigen [Neurospora crassa OR74A] gi|28926465|gb|EAA35438.1| proliferating cell nuclear antigen [Neurospora crassa OR74A] gi|38566988|emb|CAE76288.1|
  misc_feature (1)..(259): NCBI GI: 156036000 Blast Desc: conserved [Sclerotinia sclerotiorum 1980] gi|154698094|gb|EDN97832.1| conserved [Sclerotinia sclerotiorum 1980]
  misc_feature (1)..(259): NCBI GI: 154323932 Blast Desc: proliferating cell nuclear antigen [Botryotinia fuckeliana B05.10] gi|150842594|gb|EDN17787.1| proliferating cell nuclear antigen [Botryotinia fuckeliana B05.10]
  misc_feature (1)..(257): NCBI GI: 116180576 Blast Desc: proliferating cell nuclear antigen [Chaetomium globosum CBS 148.51] gi|88185213|gb|EAQ92681.1| proliferating cell nuclear antigen [Chaetomium globosum CBS 148.51]
  misc_feature (1)..(259): NCBI GI: 171687631 Blast Desc: protein product [Podospora anserina] gi|170943777|emb|CAP69429.1| protein product [Podospora anserina]
  misc_feature (1)..(254): NCBI GI: 256735152 Blast Desc: [Nectria haematococca mpVI 77-13-4]
  misc_feature (1)..(259): NCBI GI: 238486486 Blast Desc: proliferating cell nuclear antigen (PCNA) [Aspergillus flavus NRRL3357] gi|220699360|gb|EED55699.1| proliferating cell nuclear antigen (PCNA) [Aspergillus flavus NRRL3357]
  misc_feature (1)..(259): NCBI GI: 46108340 Blast Desc: FG01052.1 [Gibberella zeae PH-1]
  misc_feature (1)..(259): NCBI GI: 169771015 Blast Desc: [Aspergillus oryzae RIB40] gi|83767836|dbj|BAE57975.1| protein product [Aspergillus oryzae]
MLEARLEQSAVLKKVVDAIKDLVQDCNFDCNDSGIALQAMDNSHVALVSMLLKAESFNPYRCDRNIALGVNLVSLTKVLRALQSDDQITLKAEDAPDSLNIQFDSSSADRLSVYDLKLMDIDQEHLGIPDTEYAATVSMPSAEFKRICTDLMAMSESVTIEATKDGVKFSCSGDIGNGAVTLRNYQIEGKPEANVEIELTEPVSLTFSLKYLVNFCKAQPLSPTVKICLSNEVPLLVEYLVSGTSYLRFYLAPKIGDEE

SEQ ID NO: 27864 - DNA, 1606 bp, Muscodor strobelii
  misc_feature: SGI EST ID NO. CUFF.65740.0
  misc_feature: Variant of the nucleotide sequence at SEQ ID NO 27862
ttacgcgtcgcaaacccgcgcttgactttttgtgtcggaccccaacaacctccatcccaccacctcaccttcagctgcctctcgccctgacaactgcactgcacttcacccacgcctactatcttctctacaacgtcccgtacatacacaatcacaatacacaattgtatactgcactctctgcctcattatcacttggctccgctgcgacagaccgtaatctctgcagccgaacccctcacttttctccttctcacaacttatccacgctctcaagcaacaacgccaagatgctggaagccagactcgagcagtccgcggttctgaagaaggtcgtcgatgccatcaaggacctggtgcaggactgcaacttcgactgcaatgactcaggcatcgccctccaggccatggacaactcccacgtcgccctcgtgtccatgctgctcaaggccgaatccttcaacccctacagatgcgaccgaaacatcgcccttggtgtcaacttggtctccctgaccaaggttctgcgtgccctccagtccgatgaccagatcaccctcaaggccgaggatgcccccgactctctcaacattcagttcgacagctcttctgccgaccggctgagtgtctacgacctcaagcttatggacatcgaccaggagcacttgggcattcccgacaccgagtatgccgctaccgtctccatgccctcggccgagttcaagcgcatctgcacagatttgatggctatgtctgagtctgtcaccatcgaagccaccaaggacggcgtcaagttctcgtgcagtggcgatatcggcaacggtgccgtcactctacgaaactaccagatagaaggaaagcccgaggccaacgtcgaaatcgagttgaccgagcctgtctctctcacattctcgctcaagtatctcgtcaacttctgcaaagcccagcctctgtcgccgaccgtcaagatctgtctctctaatgaagtgccgctgttggtggagtacctcgtaagcggaaccagctacctgcggttctacctggctcctaagattggagacgaggagtaataccccaaagaatacgaagcaaaagatctgtgtccccaagagctcatgggggagattacgtgactgacgacctggagacgataacctggcatagatgatcggtgaggttccggaggtcctcgagtgtactgctatgtgaggggtctggaggtgtatacatacacatcaggttggaggtaatgagcaaggattgcgtctcctgaatcctaatgaagatgttgcaggacagcgagactgaataacacatacctcaatgtgtcgttttcagctaccatgacaaaaggaaataaaaggaaaagaaattacgcactgtccgcctgactcttccttcaatccgtcatatgatatactcgctcctgcaatcattcattcgatgtgccagctatttgacgaccaatacataccgactgtcgggtcgcgtaaaaaatgaatagcattaccgaacaagacaatgcttaaaacaccgaattttacagcgtttaatgtttctataattgtttaaataattatttgaatttatttttaaatgatttctg

SEQ ID NO: 27865 - DNA, 792 bp, Muscodor strobelii
  misc_feature: SGI cDNA ID NO. 569554
  misc_feature: Encodes the peptide sequence at SEQ ID NO 27866
atgctggaagccagactcgagcagtccgcggttctgaagaaggtcgtcgatgccatcaaggacctggtgcaggactgcaacttcgactgcaatgactcaggcatcgccctccaggccatggacaactcccacgtcgccctcgtgtccatgctgctcaaggccgaatccttcaacccctacagatgcgaccgaaacatcgcccttggtgtcaacttggtctccctgaccaaggttctgcgtgccctccagtccgatgaccagatcaccctcaaggccgaggatgcccccgactctctcaacattcagttcgacagctcttctgccgaccggctgagtgtctacgacctcaagcttatggacatcgaccaggagcacttgggcattcccgacaccgagtatgccgctaccgtctccatgccctcggccgagttcaagcgcatctgcacagatttgatggctatgtctgagtctgtcaccatcgaagccaccaaggacggcgtcaagttctcgtgcagtggcgatatcggcaacggtgccgtcactctacgaaactaccagatagaaggaaagcccgaggccaacgtcgaaatcgagttgaccgagcctgtctctctcacattctcgctcaagtatctcgtcaacttctgcaaagcccagcctctgtcgccgaccgtcaagatctgtctctctaatgaagtgccgctgttggtggagtacctcgtaagcggaaccagctacctgcggttctacctggctcctaaggtgcgtcctgtctttcctcatcgcccatga

SEQ ID NO: 27866 - protein, 263 aa, Muscodor strobelii
  misc_feature: SGI Peptide ID NO. 569554
  misc_feature (127)..(254): Pfam Id: PF02747 Pfam Desc: Proliferating cell nuclear antigen, C-terminal domain
  misc_feature (1)..(125): Pfam Id: PF00705 Pfam Desc: Proliferating cell nuclear antigen, N-terminal domain
  misc_feature (1)..(255): NCBI GI: 145611276 Blast Desc: conserved [Magnaporthe grisea 70-15] gi|145018582|gb|EDK02861.1| conserved [Magnaporthe grisea 70-15]
  misc_feature (1)..(255): NCBI GI: 85114334 Blast Desc: proliferating cell nuclear antigen [Neurospora crassa OR74A] gi|28926465|gb|EAA35438.1| proliferating cell nuclear antigen [Neurospora crassa OR74A] gi|38566988|emb|CAE76288.1|
  misc_feature (1)..(255): NCBI GI: 116180576 Blast Desc: proliferating cell nuclear antigen [Chaetomium globosum CBS 148.51] gi|88185213|gb|EAQ92681.1| proliferating cell nuclear antigen [Chaetomium globosum CBS 148.51]
  misc_feature (1)..(255): NCBI GI: 156036000 Blast Desc: conserved [Sclerotinia sclerotiorum 1980] gi|154698094|gb|EDN97832.1| conserved [Sclerotinia sclerotiorum 1980]
  misc_feature (1)..(255): NCBI GI: 154323932 Blast Desc: proliferating cell nuclear antigen [Botryotinia fuckeliana B05.10] gi|150842594|gb|EDN17787.1| proliferating cell nuclear antigen [Botryotinia fuckeliana B05.10]
  misc_feature (1)..(259): NCBI GI: 256735152 Blast Desc: [Nectria haematococca mpVI 77-13-4]
  misc_feature (1)..(255): NCBI GI: 171687631 Blast Desc: protein product [Podospora anserina] gi|170943777|emb|CAP69429.1| protein product [Podospora anserina]
  misc_feature (1)..(255): NCBI GI: 46108340 Blast Desc: FG01052.1 [Gibberella zeae PH-1]
  misc_feature (1)..(255): NCBI GI: 238486486 Blast Desc: proliferating cell nuclear antigen (PCNA) [Aspergillus flavus NRRL3357] gi|220699360|gb|EED55699.1| proliferating cell nuclear antigen (PCNA) [Aspergillus flavus NRRL3357]
  misc_feature (1)..(255): NCBI GI: 169771015 Blast Desc: [Aspergillus oryzae RIB40] gi|83767836|dbj|BAE57975.1| protein product [Aspergillus oryzae]
MLEARLEQSAVLKKVVDAIKDLVQDCNFDCNDSGIALQAMDNSHVALVSMLLKAESFNPYRCDRNIALGVNLVSLTKVLRALQSDDQITLKAEDAPDSLNIQFDSSSADRLSVYDLKLMDIDQEHLGIPDTEYAATVSMPSAEFKRICTDLMAMSESVTIEATKDGVKFSCSGDIGNGAVTLRNYQIEGKPEANVEIELTEPVSLTFSLKYLVNFCKAQPLSPTVKICLSNEVPLLVEYLVSGTSYLRFYLAPKVRPVFPHRP

SEQ ID NO: 27867 - DNA, 1606 bp, Muscodor strobelii; identical to SEQ ID NO: 27864
  misc_feature: SGI EST ID NO. CUFF.65740.0
  misc_feature: Variant of the nucleotide sequence at SEQ ID NO 27865

SEQ ID NO: 27868 - DNA, 1881 bp, Muscodor strobelii
  misc_feature: SGI cDNA ID NO. 569555
  misc_feature: Encodes the peptide sequence at SEQ ID NO 27869
atggagactcacgtagatgaggactcgcctctgggcaactatatcgaggccacgggcgagagggaagggtggaactggcaggagcaggagaacgacgggtacgacagttccccaccggagacaccttcgcgagactttgcgccccggggcctcgccaaagtccggaggaagtttcgcgataggttgtctaggccgatggagctagaaatcccgaatctaccatctcatgtcgactacgaccagatacacagtcatgcctcccctatcctcgacctattccgactcctcctgaggacggtcacatcctccatcgaccacacccgatcgatcaaattcatcgagcgactgcgccttgccattatacagtcccagttgttagacaatcctctcactttaggctatcgttcttccgcagatcccgctgtgtcacaacctgccggcgatttaaccagcaatgactttacgacctcgggcgccgtggccgccgctgtctttggacttgggttcgcctcgcttgttcggtggtatatgctcggtggcttgctgccgacctggaggcggacgcttgtcgctatcgggttgtctgcgggaattctcttcgtgcttcgatgctatgtacggagagaagtgctgaggaatatccagcggcaggggctcatcgagtctgagtcgttctttgcgctctctcgcgattttgatagtgccaatagtgcggcattgaacttcattatggaagtcgagcttgttgcgcgtggataccgattgagcaccccgatcccgcctatcagtcgaatcgagaacaatggccagaatatcaaatgtcgagagctgaggcaagcccttcggacgagtctcgttgaagttaccgcatcctactaccagaccgcgtttataatatggggtatggccgagcagacagaattgctgcaactgcaatcccaataccagtttaccgtcgtggatgtggttgaacgcttccacgcattctccaagccggatcttcaggataatgagaaactgcagtcgttgaaagacgctgcgtttctctttcacgacatccgcaaggtctttctaggcggcctccttgctctgcacatttctggcaaggattcggaccggttgcgctttacaacggtgctggaggccttcaaggaattgaatagcgtgacaaagacggcttatactcgtgtgagaaatatcctagctgacaatgactaccaagccacccctcagctgtccaaatctccacgatcgccattgtcgccgggtcacgatcgctggcaacatcaggttcggaggctgggagcgatgacaatgaatatccgcagtgttcaagccaaattacatctcctgcgagaagagtccaataaggcacttaacgaagccaatgacataacagagatgggccccttatttatggcgcagtacgattcgataggacaagacttacgggatctgatggaagcatggcagtctggcagaacggccttgcgatctggaatagacagaaacgagaaaaggatctcatcgattgggtccgttatgatgtctccaacgagcacgctaagtggccgcacgatcgccggagatgatagcagtaccgacgaacaggagatggaccgcaaagaagcccacgccaagactttgaagagtctcgaaggaggaccaccagccatgccgatcgagcctgaggtgttcgaggcgatatccgtgccgaggcccaggagcatgctctcgagagaagagcgaattatcaagatgagagaagataggaaaattaaagaggtggccaaggccaaggcggaagcacatagaggcatgatgcgagagctcgagggtgttctcggcaagaagggacccagaggtcgcatgtcgatgtga

SEQ ID NO: 27869 - protein, 626 aa, Muscodor strobelii
  misc_feature: SGI Peptide ID NO. 569555
  misc_feature (37)..(621): NCBI GI: 85114338 Blast Desc: NCU09240 [Neurospora crassa OR74A] gi|28926466|gb|EAA35439.1| conserved [Neurospora crassa OR74A] gi|38566989|emb|CAE76289.1| [Neurospora crassa]
  misc_feature (46)..(625): NCBI GI: 46108338 Blast Desc: FG01051.1 [Gibberella zeae PH-1]
  misc_feature (46)..(618): NCBI GI: 145611274 Blast Desc: MGG_00519 [Magnaporthe grisea 70-15] gi|145018581|gb|EDK02860.1| MGG_00519 [Magnaporthe grisea 70-15]
  misc_feature (1)..(625): NCBI GI: 154318094 Blast Desc: BC1G_03030 [Botryotinia fuckeliana B05.10] gi|150843688|gb|EDN18881.1| BC1G_03030 [Botryotinia fuckeliana B05.10]
  misc_feature (46)..(624): NCBI GI: 116180574 Blast Desc: CHGG_00915 [Chaetomium globosum CBS 148.51] gi|88185212|gb|EAQ92680.1| CHGG_00915 [Chaetomium globosum CBS 148.51]
  misc_feature (28)..(624): NCBI GI: 171687633 Blast Desc: protein product [Podospora anserina] gi|170943778|emb|CAP69430.1| protein product [Podospora anserina]
  misc_feature (1)..(621): NCBI GI: 189204113 Blast Desc: conserved [Pyrenophora tritici-repentis Pt-1C-BFP] gi|187985491|gb|EDU50979.1| conserved [Pyrenophora tritici-repentis Pt-1C-BFP]
  misc_feature (1)..(623): NCBI GI: 119189721 Blast Desc: CIMG_04908 [Coccidioides immitis RS]
  misc_feature (1)..(623): NCBI GI: 240111135 Blast Desc: CPC735_069700 [Coccidioides posadasii C735 delta SOWgp]
  misc_feature (1)..(625): NCBI GI: 119496801 Blast Desc: NFIA_019820 [Neosartorya fischeri NRRL 181] gi|119413336|gb|EAW23277.1| conserved [Neosartorya fischeri NRRL 181]
METHVDEDSPLGNYIEATGEREGWNWQEQENDGYDSSPPETPSRDFAPRGLAKVRRKFRDRLSRPMELEIPNLPSHVDYDQIHSHASPILDLFRLLLRTVTSSIDHTRSIKFIERLRLAIIQSQLLDNPLTLGYRSSADPAVSQPAGDLTSNDFTTSGAVAAAVFGLGFASLVRWYMLGGLLPTWRRTLVAIGLSAGILFVLRCYVRREVLRNIQRQGLIESESFFALSRDFDSANSAALNFIMEVELVARGYRLSTPIPPISRIENNGQNIKCRELRQALRTSLVEVTASYYQTAFIIWGMAEQTELLQLQSQYQFTVVDVVERFHAFSKPDLQDNEKLQSLKDAAFLFHDIRKVFLGGLLALHISGKDSDRLRFTTVLEAFKELNSVTKTAYTRVRNILADNDYQATPQLSKSPRSPLSPGHDRWQHQVRRLGAMTMNIRSVQAKLHLLREESNKALNEANDITEMGPLFMAQYDSIGQDLRDLMEAWQSGRTALRSGIDRNEKRISSIGSVMMSPTSTLSGRTIAGDDSSTDEQEMDRKEAHAKTLKSLEGGPPAMPIEPEVFEAISVPRPRSMLSREERIIKMREDRKIKEVAKAKAEAHRGMMRELEGVLGKKGPRGRMSM

SEQ ID NO: 27870 - DNA, 7303 bp, Muscodor strobelii
  misc_feature: SGI EST ID NO. CUFF.65841.0
  misc_feature: Variant of the nucleotide sequence at SEQ ID NO 27868
taaacatcgccgagtctcaattcaataagctcacacatcagcagctcatattactgcccacttgcaaccctcaaatacctacgtctgctctctgtgacttcgatatggattcttactagaaatcatcattgaactcgactacagcatttctgcatttcttgacttcgtaaaggctaaagatgatgccggtaatacgaagaaaatttttatatccccagcaaatggcttattacttctcaatcactttaagagggacaacaatgtgcttatggagaagagcttgaacaagcacataatttacctgtttatttttttctggtttctcgtttatctgctttagatacgcatcttacatagcagcaacgaagcatccgtggtctctagcttcatcgagttgccttgccttgcacctataggggttctcgggaaacgcggtgtgaatccggtcatggcatctatcttcacctttgaacacgagcccccacgggtacactccccatggcgatctgttcaagatgccggcaaacgcctgcagaacggtcggtctgcatcaagcggtgcctctattgagtcggaccagatctcggacacggaagtagacaggctcgaagctgagccgcaagatggtcctattgagtataaactccacctcctcttgcgtccgaggagagcatatgagactatgagtactactcaggctcccgctggatcgcagactggcaagggttacaagcagacccgaacggctaaacagaccatggctttagctgcttccaatacgagtagagaagttcggctgcaacatttgacaacacagctattgtggagactgtcacagtcctcgccgcatcatactacagccaagagagatctcgtcataccaaagttgcctcaagactcggacgaattagcccttttgcaagagcctgcaaaactgctgccaggcttagaggagtcaaacggagccctctacgaaattggagttgctgacgatggcacatttgttggtctcactaaggaagaaatggacgagagcatgaacactttgaaagttatggcagccagtctcggttgtagagttgaagttcagagaatgaaagctgtaggtacatgtacatggacagaaatcattgacctttcggaagcccaaattcggcaggaagatctctgggttgcggaggctttggtcattcctatactgagaggacaaaatggagataaggcaaatggtaatagtccggaggacagtgagactcctagaagaggcgcatcgacaacagaggaacttcgtgtgtcattgatcgggcctacttccggcaagacgacacttcttggtacgcttgcgaacggaacgctggataacggccgaggtctaagtagaattaacctactgaagcatcggcatgaagtggcttctggacgcacgagttctgtagctcaagaacttatcggctacgacggccgaaacattttgaactacaacgctgatgggattaccgagtggactgatattcacacttgcgccgcggatggccgcttggtttacctcttggactctgccgggcatcctcgataccatcggactacccttcgcgccctggtaggatgggctcctcattggacactcctctgcatagcagcaaatgaggagccgattagcacgactggtacgcactctttgacgaacgcggatggtgctatgggtgggattgctgcaatggacctcgccatggctcatctagacttgtgcctgcagcttgagattcctctcgcaattctgatgacgaaagtggatcttgcagttacaaagctactccgagacaagttgaatcgagttttgactaaaataaaaaacactggcagagtacccaagctcctgacaagtgctactgggccgctgtgcggcgatggatccgagataccagacggagacctgagcaaatgtcaagctgaaattgtcgatagtatcaactcggctggagatcctctttctattgtacccattgtactcacgagtgccgtgacaggtatgggaataggaatgactcatgccttgctgaagagcttgcccgtaccaccagcgcccactgctcaggactttactccccagacactcaatccagaacagcccgcgtctctgtttcacatcgatgaggtgttcgagctgtctctcaatcgcgcgcgggcttctacagatcgtgccaatgacagtgcacctgtcattacaggctatctacgatttggaagtctgtcgattggagatcgagtggttctgggtcctttcccgtcagaagaggaagatcaggatgctcgcatacccaaagatcatccttctccggggtatggcctgtccatccctcacccctcatcggctcaatttgcgcgtctgaatgcgcggaatgggctctcggcctctaagattgagggagaatggcggaatgccaccattgtgaatattcgcgcccttcgattgccggtacagacaatcggggccggacaatccggatctattcagttggtcattgatgagtgcaccgaggcatcagctgatctagacgactcggtcaaacaaagcgccccgcctccccggatccgtaaaggtcacgttgttgctatgcctagccaacatatgatcggtactggactttcgctccaagcttctacgggatttaaagcggcgttcaagacccctggaatccaatcgctcgccgtcggtagtttggtcaatgcatatgttggaatggtgcgagctgccacccgggtctgcagagtgagccgagtcagagccgagaatggcgatcggaatcatgtagcagaagacaacgacgatgtctttggcatgagcgataacctggagctcgagcgtaccaaatccgaagaggatgtagacgtgtctcatacggagtaccatgtctctttggagctcttgacgaaccgggagtggatcgaattgggagctcgagttgtactgctcgaagggggcatcaaggacaagtctggaggtctggagggcttcgtgggtagggttgtcgagattaccgaataagcaactagtgtagatggcgatttgaactgcgtcagggtttgatttcagctatagattttgtttccgtccttgagttcatcgtttagcattcgggatatagcagcgcaagcagcattttgactattatcacgagctacggaatatagcataacgtttttttgggtccataaagcggtgttaataattcgcagcaactcttttatcctatccccaacgccattaatatgctagcacccatcatctcgtcccatcctaagctcatgcccgtacgagaccgtagaataaagtccacgtcaatatataccccgccaacccaccaaacaatcctcccgtccagaaatcccagggagacttaaaatatctactcgtatcgagcggagaatgcccggctttcacggacgtgggagcgatgcggatggtgtagaagagcccggtggagaggatggtgaagatgaagtagaagaggaaaccgctgtaggactcgagaccgaggattccagctgcggcgccgattacgcttgcggttaggttttgcaggttggatagggtctgggtggctgttagataggataaagagagaggggtgtggtggtgggtagggggaagagggctgctgacccgcgcgttgtgcatgacggactctggcacgatgggagagatctggagctctctttccgttgacattgttgtgcgtggcccgaggctgggtctgctacgatgcgggattaggttgtgtgggaggtcgaggaggattcttctgctttggcgcgtagcagaaggctgagtcggcgcttgggttggttgggtcaaatatgcggcccgccgtcgagtcgttgtcgtctgtgatcttaggagctgtggtgggattattggctagtcatggagatcccgccgacgtctcgttaccgtcaagtcggagcaggcctacctaggagaacccgcagagtggaataacaggtaagcgagcaggacgatgcggagtggttatgggtcgtcagacaattggagctagcgccacccgctcgaaaccttgtttccacgctacgcgcctgatggaagatggaatcacgatgcgctggccagctggtcccggctagtgccaaatcgatcagtttgcgactatcatgactcgaaatgccacatttccatgttggttggatatttcagacgtcaggatgacatcaactatgctatgcaatcgaccgtgatctcagtcgatcaaacgagtgttgccgtgttcaaagcttgaaaggatgaacctcgctgccccggacattcgagaccgttgaaccccgtgatagttgaggatagtaacacccggacccttgtacatggcaatctccagtcaaatgaacgtgtccgactgcatgaaacggcccatcttgctttgatcaccaattccccgttgagcccgtcccgtccgaactttacggcgtgtgcctctcgaatcgttttgccttagcgggctattatttactatttccctgttgtagtcaagtcgttgctgttcccatcaccattactacctaccttactgtagtacctaattcattgcattccttttgtgaaaacaccttaaccttagtgttaattcacagctcaacattagttcctattcgacttattactacggctggccgccgagtatcatcatttcccctttgtcccgttacgccgttgttcaccctatcgcgacactagacctgacacctccagtcttccccggacctgacctgtacgacctcctttgttcgagtccctgccaccgactgccccaggccatcccgaacgaacagttgttgctcgggcgccagatggacgtcatccactgtgcaacaccgtaatttcatggagactcacgtagatgaggactcgcctctgggcaactatatcgaggccacgggcgagagggaagggtggaactggcaggagcaggagaacgacgggtacgacagttccccaccggagacaccttcgcgagactttgcgccccggggcctcgccaaagtccggaggaagtttcgcgataggttgtctaggccgatggagctagaaatcccgaatctaccatctcatgtcgactacgaccagatacacagtcatgcctcccctatcctcgacctattccgactcctcctgaggacggtcacatcctccatcgaccacacccgatcgatcaaattcatcgagcgactgcgccttgccattatacagtcccagttgttagacaatcctctcactttaggctatcgttcttccgcagatcccgctgtgtcacaacctgccggcgatttaaccagcaatgactttacgacctcgggcgccgtggccgccgctgtctttggacttgggttcgcctcgcttgttcggtggtatatgctcggtggcttgctgccgacctggaggcggacgcttgtcgctatcgggttgtctgcgggaattctcttcgtgcttcgatgctatgtacggagagaagtgctgaggaatatccagcggcaggggctcatcgagtctgagtcgttctttgcgctctctcgcgattttgatagtgccaatagtgcggcattgaacttcattatggaagtcgagcttgttgcgcgtggataccgattgagcaccccgatcccgcctatcagtcgaatcgagaacaatggccagaatatcaaatgtcgagagctgaggcaagcccttcggacgagtctcgttgaagttaccgcatcctactaccagaccgcgtttataatatggggtatggccgagcagacagaattgctgcaactgcaatcccaataccagtttaccgtcgtggatgtggttgaacgcttccacgcattctccaagccggatcttcaggataatgagaaactgcagtcgttgaaagacgctgcgtttctctttcacgacatccgcaaggtctttctaggcggcctccttgctctgcacatttctggcaaggattcggaccggttgcgctttacaacggtgctggaggccttcaaggaattgaatagcgtgacaaagacggcttatactcgtgtgagaaatatcctagctgacaatgactgtaagtaacgtctgcgaagccgttagatatatattgcctaaccaaatcttctagaccaagccacccctcagctgtccaaatctccacgatcgccattgtcgccgggtcacgatcgctggcaacatcaggttcggaggctgggagcgatgacaatgaatatccgcagtgttcaagccaaattacatctcctgcgagaagagtccaataaggcacttaacgaagccaatgacataacagagatgggccccttatttatggcgcagtacgattcgataggacaagacttacgggatctgatggaagcatggcagtctggcagaacggccttgcgatctggaatagacagaaacgagaaaaggatctcatcgattgggtccgttatgatgtctccaacgagcacgctaagtggccgcacgatcgccggagatgatagcagtaccgacgaacaggagatggaccgcaaagaagcccacgccaagactttgaagagtctcgaaggaggaccaccagccatgccgatcgagcctgaggtgttcgaggcgatatccgtgccgaggcccaggagcatgctctcgagagaagagcgaattatcaagatgagagaagataggaaaattaaagaggtggccaaggccaaggcggaagcacatagaggcatgatgcgagagctcgagggtgttctcggcaagaagggacccagaggtcgcatgtcgatgtgatatggaagacataagatatggcgatactcggtctcagcatattgacgactacataatgaacttgatcacgacgggcgcatctggatagagagcggttgatttacatcgagtataaagagaggcgattatctttcctcttcggcacaaaagcacactttttcatcaggcgctccgggacactgcatagaggtcgggcattgcaccatacgatcgttttacagtataatgtttttattgtgtattatataacctgtatatatcatcatcgtacataggacatacaacgagcattgataccatatgcatctagtacatcctgagaggagattgtgcattttgcaactacacatgtggtgcagtcatcttccagacaattgggagccttcaccgaagtacgacgaaagtttggaattgtccatctgatctagactagttacgggattaaatcttacactaatctgcaatacatgtcga

SEQ ID NO: 27871 - DNA, 357 bp, Muscodor strobelii
  misc_feature: SGI cDNA ID NO. 569556
  misc_feature: Encodes the peptide sequence at SEQ ID NO 27872
atgtcaacggaaagagagctccagatctctcccatcgtgccagagtccgtcatgcacaacgcgcggaccctatccaacctgcaaaacctaaccgcaagcgtaatcggcgccgcagctggaatcctcggtctcgagtcctacagcggtttcctcttctacttcatcttcaccatcctctccaccgggctcttctacaccatccgcatcgctcccacgtccgtgaaagccgggcattctccgctcgatacgagtagatattttaagtctccctgggatttctggacgggaggattgtttggtgggttggcggggtatatattgacgtggactttattctacggtctcgtacgggcatga

SEQ ID NO: 27872 - protein, 118 aa, Muscodor strobelii
  misc_feature: SGI Peptide ID NO. 569556
  misc_feature (1)..(116): Pfam Id: PF05646 Pfam Desc: Domain of function (DUF786)
  misc_feature (36)..(116): Pfam Id: PF05646 Pfam Desc: Domain of function (DUF786)
  misc_feature (1)..(118): NCBI GI: 261356247 Blast Desc: conserved [Verticillium albo-atrum VaMs.102]
  misc_feature (1)..(118): NCBI GI: 46108956 Blast Desc: FG01360.1 [Gibberella zeae PH-1]
  misc_feature (2)..(118): NCBI GI: 256734294 Blast Desc: [Nectria haematococca mpVI 77-13-4]
  misc_feature (1)..(118): NCBI GI: 39974667 Blast Desc: MGG_00520 [Magnaporthe grisea 70-15] gi|145018580|gb|EDK02859.1| MGG_00520 [Magnaporthe grisea 70-15]
  misc_feature (1)..(118): NCBI GI: 154318106 Blast Desc: BC1G_03036 [Botryotinia fuckeliana B05.10] gi|150843694|gb|EDN18887.1| BC1G_03036 [Botryotinia fuckeliana B05.10]
  misc_feature (1)..(118): NCBI GI: 171687635 Blast Desc: protein product [Podospora anserina] gi|170943779|emb|CAP69431.1| protein product [Podospora anserina]
  misc_feature (1)..(118): NCBI GI: 116180572 Blast Desc: CHGG_00914 [Chaetomium globosum CBS 148.51] gi|88185211|gb|EAQ92679.1| CHGG_00914 [Chaetomium globosum CBS 148.51]
  misc_feature (1)..(118): NCBI GI: 156049931 Blast Desc: SS1G_07551 [Sclerotinia sclerotiorum 1980] gi|154691953|gb|EDN91691.1| SS1G_07551 [Sclerotinia sclerotiorum 1980]
  misc_feature (1)..(104): NCBI GI: 164423051 Blast Desc: NCU11402 [Neurospora crassa OR74A] gi|157069928|gb|EDO64926.1| conserved [Neurospora crassa OR74A]
  misc_feature (1)..(118): NCBI GI: 189204119 Blast Desc: PTRG_08063 [Pyrenophora tritici-repentis Pt-1C-BFP] gi|187985494|gb|EDU50982.1| PTRG_08063 [Pyrenophora tritici-repentis Pt-1C-BFP]
MSTERELQISPIVPESVMHNARTLSNLQNLTASVIGAAAGILGLESYSGFLFYFIFTILSTGLFYTIRIAPTSVKAGHSPLDTSRYFKSPWDFWTGGLFGGLAGYILTWTLFYGLVRA

SEQ ID NO: 27873 - DNA, 4874 bp, Muscodor strobelii
  misc_feature: SGI EST ID NO. CUFF.65840.2
  misc_feature: Variant of the nucleotide sequence at SEQ ID NO 27871
cctcgatatagttgcccagaggcgagtcctcatctacgtgagtctccatgaaattacggtgttgcacagtggatgacgtccatctggcgcccgagcaacaactgttcgttcgggatggcctggggcagtcggtggcagggactcgaacaaaggaggtcgtacaggtcaggtccggggaagactggaggtgtcaggtctagtgtcgcgatagggtgaacaacggcgtaacgggacaaaggggaaatgatgatactcggcggccagccgtagtaataagtcgaataggaactaatgttgagctgtgaattaacactaaggttaaggtgttttcacaaaaggaatgcaatgaattaggtactacagtaaggtaggtagtaatggtgatgggaacagcaacgacttgactacaacagggaaatagtaaataatagcccgctaaggcaaaacgattcgagaggcacacgccgtaaagttcggacgggacgggctcaacggggaattggtgatcaaagcaagatgggccgtttcatgcagtcggacacgttcatttgactggagattgccatgtacaagggtccgggtgttactatcctcaactatcacggggttcaacggtctcgaatgtccggggcagcgaggttcatcctttcaagctttgaacacggcaacactcgtttgatcgactgagatcacggtcgattgcatagcatagttgatgtcatcctgacgtctgaaatatccaaccaacatggaaatgtggcatttcgagtcatgatagtcgcaaactgatcgatttggcactagccgggaccagctggccagcgcatcgtgattccatcttccatcaggcgcgtagcgtggaaacaaggtttcgagcgggtggcgctagctccaattgtctgacgacccataaccactccgcatcgtcctgctcgcttacctgttattccactctgcgggttctcctaggtaggcctgctccgacttgacggtaacgagacgtcggcgggatctccatgactagccaataatcccaccacagctcctaagatcacagacgacaacgactcgacggcgggccgcatatttgacccaaccaacccaagcgccgactcagccttctgctacgcgccaaagcagaagaatcctcctcgacctcccacacaacctaatcccgcatcgtagcagacccagcctcgggccacgcacaacaatgtcaacggaaagagagctccagatctctcccatcgtgccagagtccgtcatgcacaacgcgcggaccctatccaacctgcaaaacctaaccgcaagcgtaatcggcgccgcagctggaatcctcggtctcgagtcctacagcggtttcctcttctacttcatcttcaccatcctctccaccgggctcttctacaccatccgcatcgctcccacgtccgtgaaagccgggcattctccgctcgatacgagtagatattttaagtctccctgggatttctggacgggaggattgtttggtgggttggcggggtatatattgacgtggactttattctacggtctcgtacgggcatgagcttaggatgggacgagatgatgggtgctagcatattaatggcgttggggataggataaaagagttgctgcgaattattaacaccgctttatggacccaaaaaaacgttatgctatattccgtagctcgtgataatagtcaaaatgctgcttgcgctgctatatcccgaatgctaaacgatgaactcaaggacggaaacaaaatctatagctgaaatcaaaccctgacgcagttcaaatcgccatctacactagttgcttattcggtaatctcgacaaccctacccacgaagccctccagacctccagacttgtccttgatgcccccttcgagcagtacaactcgagctcccaattcgatccactcccggttcgtcaagagctccaaagagacatggtactccgtatgagacacgtctacatcctcttcggatttggtacgctcgagctccaggttatcgctcatgccaaagacatcgtcgttgtcttctgctacatgattccgatcgccattctcggctctgactcggctcactctgcagacccgggtggcagctcgcaccattccaacatatgcattgaccaaactaccgacggcgagcgattggattccaggggtcttgaacgccgctttaaatcccgtagaagcttggagcgaaagtccagtaccgatcatatgttggctaggcatagcaacaacgtgacctttacggatccggggaggcggggcgctttgtttgaccgagtcgtctagatcagctgatgcctcggtgcactcatcaatgaccaactgaatagatccggattgtccggccccgattgtctgtaccggcaatcgaagggcgcgaatattcacaatggtggcattccgccattctccctcaatcttagaggccgagagcccattccgcgcattcagacgcgcaaattgagccgatgaggggtgagggatggacaggccataccccggagaaggatgatctttgggtatgcgagcatcctgatcttcctcttctgacgggaaaggacccagaaccactcgatctccaatcgacagacttccaaatcgtagatagcctgtaatgacaggtgcactgtcattggcacgatctgtagaagcccgcgcgcgattgagagacagctcgaacacctcatcgatgtgaaacagagacgcgggctgttctggattgagtgtctggggagtaaagtcctgagcagtgggcgctggtggtacgggcaagctcttcagcaaggcatgagtcattcctattcccatacctgtcacggcactcgtgagtacaatgggtacaatagaaagaggatctccagccgagttgatactatcgacaatttcagcttgacatttgctcaggtctccgtctggtatctcggatccatcgccgcacagcggcccagtagcacttgtcaggagcttgggtactctgccagtgttttttattttagtcaaaactcgattcaacttgtctcggagtagctttgtaactgcaagatccactttcgtcatcagaattgcgagaggaatctcaagctgcaggcacaagtctagatgagccatggcgaggtccattgcagcaatcccacccatagcaccatccgcgttcgtcaaagagtgcgtaccagtcgtgctaatcggctcctcatttgctgctatgcagaggagtgtccaatgaggagcccatcctaccagggcgcgaagggtagtccgatggtatcgaggatgcccggcagagtccaagaggtaaaccaagcggccatccgcggcgcaagtgtgaatatcagtccactcggtaatcccatcagcgttgtagttcaaaatgtttcggccgtcgtagccgataagttcttgagctacagaactcgtgcgtccagaagccacttcatgccgatgcttcagtaggttaattctacttagacctcggccgttatccagcgttccgttcgcaagcgtaccaagaagtgtcgtcttgccggaagtaggcccgatcaatgacacacgaagttcctctgttgtcgatgcgcctcttctaggagtctcactgtcctccggactattaccatttgccttatctccattttgtcctctcagtataggaatgaccaaagcctccgcaacccagagatcttcctgccgaatttgggcttccgaaaggtcaatgatttctgtccatgtacatgtacctacagctttcattctctgaacttcaactctacaaccgagactggctgccataactttcaaagtgttcatgctctcgtccatttcttccttagtgagaccaacaaatgtgccatcgtcagcaactccaatttcgtagagggctccgtttgactcctctaagcctggcagcagttttgcaggctcttgcaaaagggctaattcgtccgagtcttgaggcaactttggtatgacgagatctctcttggctgtagtatgatgcggcgaggactgtgacagtctccacaatagctgtgttgtcaaatgttgcagccgaacttctctactcgtattggaagcagctaaagccatggtctgtttagccgttcgggtctgcttgtaacccttgccagtctgcgatccagcgggagcctgagtagtactcatagtctcatatgctctcctcggacgcaagaggaggtggagtttatactcaataggaccatcttgcggctcagcttcgagcctgtctacttccgtgtccgagatctggtccgactcaatagaggcaccgcttgatgcagaccgaccgttctgcaggcgtttgccggcatcttgaacagatcgccatggggagtgtacccgtgggggctcgtgttcaaaggtgaagatagatgccatgaccggattcacaccgcgtttcccgagaacccctataggtgcaaggcaaggcaactcgatgaagctagagaccacggatgcttcgttgctgctatgtaagatgcgtatctaaagcagataaacgagaaaccagaaaaaaataaacaggtaaattatgtgcttgttcaagctcttctccataagcacattgttgtccctcttaaagtgattgagaagtaataagccatttgctggggatataaaaattttcttcgtattaccggcatcatctttagcctttacgaagtcaagaaatgcagaaatgctgtagtcgagttcaatgatgatttctagtaagaatccatatcgaagtcacagagagcagacgtaggtatttgagggttgcaagtgggcagtaatatgagctgctgatgtgtgagcttattgaattgagactcggcgatgttta

SEQ ID NO: 27874 - DNA, 2598 bp, Muscodor strobelii
  misc_feature: SGI cDNA ID NO. 569557
  misc_feature: Encodes the peptide sequence at SEQ ID NO 27875
atggcatctatcttcacctttgaacacgagcccccacgggtacactccccatggcgatctgttcaagatgccggcaaacgcctgcagaacggtcggtctgcatcaagcggtgcctctattgagtcggaccagatctcggacacggaagtagacaggctcgaagctgagccgcaagatggtcctattgagtataaactccacctcctcttgcgtccgaggagagcatatgagactatgagtactactcaggctcccgctggatcgcagactggcaagggttacaagcagacccgaacggctaaacagaccatggctttagctgcttccaatacgagtagagaagttcggctgcaacatttgacaacacagctattgtggagactgtcacagtcctcgccgcatcatactacagccaagagagatctcgtcataccaaagttgcctcaagactcggacgaattagcccttttgcaagagcctgcaaaactgctgccaggcttagaggagtcaaacggagccctctacgaaattggagttgctgacgatggcacatttgttggtctcactaaggaagaaatggacgagagcatgaacactttgaaagttatggcagccagtctcggttgtagagttgaagttcagagaatgaaagctgtaggtacatgtacatggacagaaatcattgacctttcggaagcccaaattcggcaggaagatctctgggttgcggaggctttggtcattcctatactgagaggacaaaatggagataaggcaaatggtaatagtccggaggacagtgagactcctagaagaggcgcatcgacaacagaggaacttcgtgtgtcattgatcgggcctacttccggcaagacgacacttcttggtacgcttgcgaacggaacgctggataacggccgaggtctaagtagaattaacctactgaagcatcggcatgaagtggcttctggacgcacgagttctgtagctcaagaacttatcggctacgacggccgaaacattttgaactacaacgctgatgggattaccgagtggactgatattcacacttgcgccgcggatggccgcttggtttacctcttggactctgccgggcatcctcgataccatcggactacccttcgcgccctggtaggatgggctcctcattggacactcctctgcatagcagcaaatgaggagccgattagcacgactggtacgcactctttgacgaacgcggatggtgctatgggtgggattgctgcaatggacctcgccatggctcatctagacttgtgcctgcagcttgagattcctctcgcaattctgatgacgaaagtggatcttgcagttacaaagctactccgagacaagttgaatcgagttttgactaaaataaaaaacactggcagagtacccaagctcctgacaagtgctactgggccgctgtgcggcgatggatccgagataccagacggagacctgagcaaatgtcaagctgaaattgtcgatagtatcaactcggctggagatcctctttctattgtacccattgtactcacgagtgccgtgacaggtatgggaataggaatgactcatgccttgctgaagagcttgcccgtaccaccagcgcccactgctcaggactttactccccagacactcaatccagaacagcccgcgtctctgtttcacatcgatgaggtgttcgagctgtctctcaatcgcgcgcgggcttctacagatcgtgccaatgacagtgcacctgtcattacaggctatctacgatttggaagtctgtcgattggagatcgagtggttctgggtcctttcccgtcagaagaggaagatcaggatgctcgcatacccaaagatcatccttctccggggtatggcctgtccatccctcacccctcatcggctcaatttgcgcgtctgaatgcgcggaatgggctctcggcctctaagattgagggagaatggcggaatgccaccattgtgaatattcgcgcccttcgattgccggtacagacaatcggggccggacaatccggatctattcagttggtcattgatgagtgcaccgaggcatcagctgatctagacgactcggtcaaacaaagcgccccgcctccccggatccgtaaaggtcacgttgttgctatgcctagccaacatatgatcggtactggactttcgctccaagcttctacgggatttaaagcggcgttcaagacccctggaatccaatcgctcgccgtcggtagtttggtcaatgcatatgttggaatggtgcgagctgccacccgggtctgcagagtgagccgagtcagagccgagaatggcgatcggaatcatgtagcagaagacaacgacgatgtctttggcatgagcgataacctggagctcgagcgtaccaaatccgaagaggatgtagacgtgtctcatacggagtaccatgtctctttggagctcttgacgaaccgggagtggatcgaattgggagctcgagttgtactgctcgaagggggcatcaaggacaagtctggaggtctggagggcttcgtgggtagggttgtcgagattaccgaataa

SEQ ID NO: 27875 - protein, 865 aa, Muscodor strobelii
  misc_feature: SGI Peptide ID NO. 569557
  misc_feature (1)..(865): NCBI GI: 256735006 Blast Desc: NECHADRAFT_65370 [Nectria haematococca mpVI 77-13-4]
  misc_feature (3)..(865): NCBI GI: 46108954 Blast Desc: FG01359.1 [Gibberella zeae PH-1]
  misc_feature (3)..(865): NCBI GI: 116180570 Blast Desc: CHGG_00913 [Chaetomium globosum CBS 148.51] gi|88185210|gb|EAQ92678.1| CHGG_00913 [Chaetomium globosum CBS 148.51]
  misc_feature (3)..(865): NCBI GI: 171687733 Blast Desc: protein product [Podospora anserina] gi|170943828|emb|CAP69480.1| protein product [Podospora anserina]
  misc_feature (1)..(865): NCBI GI: 154318076 Blast Desc: BC1G_03021 [Botryotinia fuckeliana B05.10] gi|150843679|gb|EDN18872.1| BC1G_03021 [Botryotinia fuckeliana B05.10]
  misc_feature (3)..(865): NCBI GI: 145611272 Blast Desc: MGG_00521 [Magnaporthe grisea 70-15] gi|145018579|gb|EDK02858.1| MGG_00521 [Magnaporthe grisea 70-15]
  misc_feature (107)..(865): NCBI GI: 261356248 Blast Desc: GTP-binding protein [Verticillium albo-atrum VaMs.102]
  misc_feature (1)..(865): NCBI GI: 156049905 Blast Desc: SS1G_07537 [Sclerotinia sclerotiorum 1980] gi|154691940|gb|EDN91678.1| SS1G_07537 [Sclerotinia sclerotiorum 1980]
  misc_feature (3)..(865): NCBI GI: 85114343 Blast Desc: NCU09241 [Neurospora crassa OR74A] gi|28926467|gb|EAA35440.1| conserved [Neurospora crassa OR74A] gi|38566991|emb|CAE76291.1| related to GTP-binding protein 2
  misc_feature (1)..(863): NCBI GI: 145243936 Blast Desc: An11g04890 [Aspergillus niger] gi|134079165|emb|CAK40693.1| protein product [Aspergillus niger]
MASIFTFEHEPPRVHSPWRSVQDAGKRLQNGRSASSGASIESDQISDTEVDRLEAEPQDGPIEYKLHLLLRPRRAYETMSTTQAPAGSQTGKGYKQTRTAKQTMALAASNTSREVRLQHLTTQLLWRLSQSSPHHTTAKRDLVIPKLPQDSDELALLQEPAKLLPGLEESNGALYEIGVADDGTFVGLTKEEMDESMNTLKVMAASLGCRVEVQRMKAVGTCTWTEIIDLSEAQIRQEDLWVAEALVIPILRGQNGDKANGNSPEDSETPRRGASTTEELRVSLIGPTSGKTTLLGTLANGTLDNGRGLSRINLLKHRHEVASGRTSSVAQELIGYDGRNILNYNADGITEWTDIHTCAADGRLVYLLDSAGHPRYHRTTLRALVGWAPHWTLLCIAANEEPISTTGTHSLTNADGAMGGIAAMDLAMAHLDLCLQLEIPLAILMTKVDLAVTKLLRDKLNRVLTKIKNTGRVPKLLTSATGPLCGDGSEIPDGDLSKCQAEIVDSINSAGDPLSIVPIVLTSAVTGMGIGMTHALLKSLPVPPAPTAQDFTPQTLNPEQPASLFHIDEVFELSLNRARASTDRANDSAPVITGYLRFGSLSIGDRVVLGPFPSEEEDQDARIPKDHPSPGYGLSIPHPSSAQFARLNARNGLSASKIEGEWRNATIVNIRALRLPVQTIGAGQSGSIQLVIDECTEASADLDDSVKQSAPPPRIRKGHVVAMPSQHMIGTGLSLQASTGFKAAFKTPGIQSLAVGSLVNAYVGMVRAATRVCRVSRVRAENGDRNHVAEDNDDVFGMSDNLELERTKSEEDVDVSHTEYHVSLELLTNREWIELGARVVLLEGGIKDKSGGLEGFVGRVVEITE

SEQ ID NO: 27876 - DNA, 7303 bp, Muscodor strobelii; identical to SEQ ID NO: 27870
  misc_feature: SGI EST ID NO. CUFF.65841.0
  misc_feature: Variant of the nucleotide sequence at SEQ ID NO 27874

SEQ ID NO: 27877 - DNA, 1017 bp, Muscodor strobelii
  misc_feature: SGI cDNA ID NO. 569558
  misc_feature: Reduced expression when VOC is produced
  misc_feature: Encodes the peptide sequence at SEQ ID NO 27878
atgggaataggaatgactcatgccttgctgaagagcttgcccgtaccaccagcgcccactgctcaggactttactccccagacactcaatccagaacagcccgcgtctctgtttcacatcgatgaggtgttcgagctgtctctcaatcgcgcgcgggcttctacagatcgtgccaatgacagtgcacctgtcattacaggctatctacgatttggaagtctgtcgattggagatcgagtggttctgggtcctttcccgtcagaagaggaagatcaggatgctcgcatacccaaagatcatccttctccggggtatggcctgtccatccctcacccctcatcggctcaatttgcgcgtctgaatgcgcggaatgggctctcggcctctaagattgagggagaatggcggaatgccaccattgtgaatattcgcgcccttcgattgccggtacagacaatcggggccggacaatccggatctattcagttggtcattgatgagtgcaccgaggcatcagctgatctagacgactcggtcaaacaaagcgccccgcctccccggatccgtaaaggtcacgttgttgctatgcctagccaacatatgatcggtactggactttcgctccaagcttctacgggatttaaagcggcgttcaagacccctggaatccaatcgctcgccgtcggtagtttggtcaatgcatatgttggaatggtgcgagctgccacccgggtctgcagagtgagccgagtcagagccgagaatggcgatcggaatcatgtagcagaagacaacgacgatgtctttggcatgagcgataacctggagctcgagcgtaccaaatccgaagaggatgtagacgtgtctcatacggagtaccatgtctctttggagctcttgacgaaccgggagtggatcgaattgggagctcgagttgtactgctcgaagggggcatcaaggacaagtctggaggtctggagggcttcgtgggtagggttgtcgagattaccgaataa

SEQ ID NO: 27878 - protein, 338 aa, Muscodor strobelii
  misc_feature: SGI Peptide ID NO. 569558
  misc_feature (2)..(338): NCBI GI: 256735006 Blast Desc: NECHADRAFT_65370 [Nectria haematococca mpVI 77-13-4]
  misc_feature (2)..(338): NCBI GI: 171687733 Blast Desc: protein product [Podospora anserina] gi|170943828|emb|CAP69480.1| protein product [Podospora anserina]
  misc_feature (2)..(338): NCBI GI: 46108954 Blast Desc: FG01359.1 [Gibberella zeae PH-1]
  misc_feature (2)..(338): NCBI GI: 261356248 Blast Desc: GTP-binding protein [Verticillium albo-atrum VaMs.102]
  misc_feature (2)..(338): NCBI GI: 145611272 Blast Desc: MGG_00521 [Magnaporthe grisea 70-15] gi|145018579|gb|EDK02858.1| MGG_00521 [Magnaporthe grisea 70-15]
  misc_feature (2)..(338): NCBI GI: 116180570 Blast Desc: CHGG_00913 [Chaetomium globosum CBS 148.51] gi|88185210|gb|EAQ92678.1| CHGG_00913 [Chaetomium globosum CBS 148.51]
  misc_feature (2)..(338): NCBI GI: 154318076 Blast Desc: BC1G_03021 [Botryotinia fuckeliana B05.10] gi|150843679|gb|EDN18872.1| BC1G_03021 [Botryotinia fuckeliana B05.10]
  misc_feature (2)..(338): NCBI GI: 156049905 Blast Desc: SS1G_07537 [Sclerotinia sclerotiorum 1980] gi|154691940|gb|EDN91678.1| SS1G_07537 [Sclerotinia sclerotiorum 1980]
  misc_feature (2)..(338): NCBI GI: 85114343 Blast Desc: NCU09241 [Neurospora crassa OR74A] gi|28926467|gb|EAA35440.1| conserved [Neurospora crassa OR74A] gi|38566991|emb|CAE76291.1| related to GTP-binding protein 2
  misc_feature (1)..(335): NCBI GI: 189194403 Blast Desc: conserved [Pyrenophora tritici-repentis Pt-1C-BFP] gi|187979104|gb|EDU45730.1| conserved [Pyrenophora tritici-repentis Pt-1C-BFP]
  misc_feature: Useful for introducing or modulating the production of volatile compounds
MGIGMTHALLKSLPVPPAPTAQDFTPQTLNPEQPASLFHIDEVFELSLNRARASTDRANDSAPVITGYLRFGSLSIGDRVVLGPFPSEEEDQDARIPKDHPSPGYGLSIPHPSSAQFARLNARNGLSASKIEGEWRNATIVNIRALRLPVQTIGAGQSGSIQLVIDECTEASADLDDSVKQSAPPPRIRKGHVVAMPSQHMIGTGLSLQASTGFKAAFKTPGIQSLAVGSLVNAYVGMVRAATRVCRVSRVRAENGDRNHVAEDNDDVFGMSDNLELERTKSEEDVDVSHTEYHVSLELLTNREWIELGARVVLLEGGIKDKSGGLEGFVGRVVEITE

SEQ ID NO: 27879 - DNA, 7303 bp, Muscodor strobelii; identical to SEQ ID NO: 27870
  misc_feature: SGI EST ID NO. CUFF.65841.0
  misc_feature: Variant of the nucleotide sequence at SEQ ID NO 27877

SEQ ID NO: 27880 - DNA, 1245 bp, Muscodor strobelii
  misc_feature: SGI cDNA ID NO. 569559
  misc_feature: Encodes the peptide sequence at SEQ ID NO 27881
atgaagaaattccttgcaaagaaggaaaagggctctccggcacagtccgagaatccttactcctctccaccaccggcggccgacccatatcttgacaatcaaaaatatgtgactccttaccaagccgctcgtaatggcctacccagcggccccgctcccagcagcagaagctacagcatcgcctctaatgccaccgcgcctccgccctattccaaccaagctcagagcgggtatggctccgaacgttttggtacgggaacaggctacgggaacgacaacaagtacgctggtggtaatgcctacgggaactcctctgcaaggggaccaggtggatatggcggtctaggtccctcggacaacgccagacaggattcccagccaccgccatcatttccatcccgctataacaaccagacccccattgacacgggcagcggctctacctacgcacaaccaagctcgagcactggatatgaccagtctgacgctgacggcggaggatatggcgcacggcgcgagctgactgaagaagagagggaacgggaggaataccgcaacatcaagaaacaaatccacgagacaacgaatgccagcttagcaacgaaccaagattctcttaggtacatgaaccaggccatcgataccgggctgtcaacctacgccagattgggcgagcagaatgagcgtctacaccacacagaccaactcctcgatactgctactgagtcacaccgacatgccgaggcgcagacgaagaaactcaagtctttgaacagatcaatgtttgcagtgcatgtcaagaatccgttcacagagaagcgcagaaatgctgaacaagaagcacggctcttagcccagaatcaagaggatagggaggtccgggaggcaacgaggagagataggtttgcgcagacatcccgcatggagcagaactttgctgcgctcaatcagcaagacgaagcgccatcgtcctttacacgagctaatcgtggcgaccgctcaaagtacaccctcgaagatgattcagactctgagggagcagctgccttagatcaagccaatgagcaaatcgagcgtgatttggagcagatgtccattggtgtaaacaaactgaagcgcatcggacaagccatgggcgaggagcttgaccacagcaataagctcatcgatagaattggcagcaagacggaccctctcgatgatcagattagagtgacgaacgcgagaatgaaccgtatccgctaa

SEQ ID NO: 27881 - protein, 414 aa, Muscodor strobelii
  misc_feature: SGI Peptide ID NO. 569559
  misc_feature (356)..(414): Pfam Id: PF05739 Pfam Desc: SNARE domain
  misc_feature (1)..(413): NCBI GI: 154318078 Blast Desc: BC1G_03022 [Botryotinia fuckeliana B05.10] gi|150843680|gb|EDN18873.1| BC1G_03022 [Botryotinia fuckeliana B05.10]
  misc_feature (4)..(413): NCBI GI: 119481613 Blast Desc: plasma membrane SNARE protein (Sec9), [Neosartorya fischeri NRRL 181] gi|119408989|gb|EAW18938.1| plasma membrane SNARE protein (Sec9), [Neosartorya fischeri NRRL 181]
  misc_feature (4)..(413): NCBI GI: 159129766 Blast Desc: plasma membrane SNARE protein (Sec9), [Aspergillus fumigatus A1163]
  misc_feature (4)..(413): NCBI GI: 71002056 Blast Desc: plasma membrane SNARE protein (Sec9) [Aspergillus fumigatus Af293] gi|66853347|gb|EAL93671.1| plasma membrane SNARE protein (Sec9), [Aspergillus fumigatus Af293]
  misc_feature (1)..(413): NCBI GI: 156049907 Blast Desc: SS1G_07538 [Sclerotinia sclerotiorum 1980] gi|154691941|gb|EDN91679.1| SS1G_07538 [Sclerotinia sclerotiorum 1980]
  misc_feature (4)..(414): NCBI GI: 67523927 Blast Desc: AN2419.2 [Aspergillus nidulans FGSC A4] gi|40745374|gb|EAA64530.1| AN2419.2 [Aspergillus nidulans FGSC A4] gi|259487827|tpe|CBF86809.1| TPA: transport protein SEC9 FGSC
  misc_feature (4)..(413): NCBI GI: 121716342 Blast Desc: plasma membrane SNARE protein (Sec9), [Aspergillus clavatus NRRL 1] gi|119403935|gb|EAW14352.1| plasma membrane SNARE protein (Sec9), [Aspergillus clavatus NRRL 1]
  misc_feature (172)..(414): NCBI GI: 238496967 Blast Desc: plasma membrane SNARE protein (Sec9), [Aspergillus flavus NRRL3357] gi|220694599|gb|EED50943.1| plasma membrane SNARE protein (Sec9), [Aspergillus flavus NRRL3357]
  misc_feature (1)..(413): NCBI GI: 145232459 Blast Desc: An02g05390 [Aspergillus niger] gi|134056591|emb|CAK37645.1| protein product [Aspergillus niger]
  misc_feature (172)..(414): NCBI GI: 117166085 Blast Desc: v-SNARE [Aspergillus oryzae]
MKKFLAKKEKGSPAQSENPYSSPPPAADPYLDNQKYVTPYQAARNGLPSGPAPSSRSYSIASNATAPPPYSNQAQSGYGSERFGTGTGYGNDNKYAGGNAYGNSSARGPGGYGGLGPSDNARQDSQPPPSFPSRYNNQTPIDTGSGSTYAQPSSSTGYDQSDADGGGYGARRELTEEEREREEYRNIKKQIHETTNASLATNQDSLRYMNQAIDTGLSTYARLGEQNERLHHTDQLLDTATESHRHAEAQTKKLKSLNRSMFAVHVKNPFTEKRRNAEQEARLLAQNQEDREVREATRRDRFAQTSRMEQNFAALNQQDEAPSSFTRANRGDRSKYTLEDDSDSEGAAALDQANEQIERDLEQMSIGVNKLKRIGQAMGEELDHSNKLIDRIGSKTDPLDDQIRVTNARMNRIR

SEQ ID NO: 27882 - DNA, 1795 bp, Muscodor strobelii
  misc_feature: SGI EST ID NO. CUFF.65928.2
  misc_feature: Variant of the nucleotide sequence at SEQ ID NO 27880
tacaacataactcttgtcatccctcgaattgaaccagaggaagtaggcaaccgtctattgtctgcatttctttatttcttgcgctcgagtccgatacaccgtccgctcatctaacaatattctctgcgacatcatcgtcaccatacagcacgcgccgtccactcctctagcagcatcctcaacgacaacgactgtcatcgtccaccacagaaacagattctaccaactatgaagaaattccttgcaaagaaggaaaagggctctccggcacagtccgagaatccttactcctctccaccaccggcggccgacccatatcttgacaatcaaaaatatgtgactccttaccaagccgctcgtaatggcctacccagcggccccgctcccagcagcagaagctacagcatcgcctctaatgccaccgcgcctccgccctattccaaccaagctcagagcgggtatggctccgaacgttttggtacgggaacaggctacgggaacgacaacaagtacgctggtggtaatgcctacgggaactcctctgcaaggggaccaggtggatatggcggtctaggtccctcggacaacgccagacaggattcccagccaccgccatcatttccatcccgctataacaaccagacccccattgacacgggcagcggctctacctacgcacaaccaagctcgagcactggatatgaccagtctgacgctgacggcggaggatatggcgcacggcgcgagctgactgaagaagagagggaacgggaggaataccgcaacatcaagaaacaaatccacgagacaacgaatgccagcttagcaacgaaccaagattctcttaggtacatgaaccaggccatcgataccgggctgtcaacctacgccagattgggcgagcagaatgagcgtctacaccacacagaccaactcctcgatactgctactgagtcacaccgacatgccgaggcgcagacgaagagtaaactcctatcatcatgtcaatagtagatcatagatgtctaatgacgatgcagaactcaagtctttgaacagatcaatgtttgcagtgcatgtcaagaatccgttcacagagaagcgcagaaatgctgaacaagaagcacggctcttagcccagagtaagatctcatgccattttaccgttcagggatacgactctgagttgtccatgaaaggctgcgataactaacgtgagattgaagatcaagaggatagggaggtccgggaggcaacgaggagagataggtttgcgcagacatcccgcatggagcagaactttgctgcgctcaatcagcaagacgaagcgccatcgtcctttacacgagctaatcgtggcgaccgctcaaagtacaccctcgaagatgattcagactctgagggagcagctgccttagatcaagccaatgagcaaatcgagcgtgatttggagcagatgtccattggtgtaaacaaactgaagcgcatcggacaagccatgggcgaggagcttgaccacagcaataagctcatcgatagaattggcagcaagacggaccctctcgatgatcagattagagtgacgaacgcgagaatgaaccgtatccgctaaggtggaatgtcacgacttcacgacccatatatcttgcgctcaaagacgcgtgcagatagatgatctctttagcttaaaagcggacatagaaatttgagcgatgatcagactcattatggatagattcgtagtatcattaatatatggcatcgggttgacagtacaatattttcgttacaaggc

SEQ ID NO: 27883 - DNA, 390 bp, Muscodor strobelii
  misc_feature: SGI cDNA ID NO. 569560
  misc_feature: Reduced expression when VOC is produced
  misc_feature: Encodes the peptide sequence at SEQ ID NO 27884
atgagagcaaccacaagactacttgccacgacggcgacaacagcgggcaatgcgctaaaaccggcaccgctcgcgattttaccaccgatcccgctgtatagacgtttgttgagggcgcatcggaaacatctaccgtctgagatgaggttgctgggcgatgagtatgtgaaggcggagtttagggcacataaagggatcgataatccgacgcagcttattgggtttttgaccgagtggcagttttatgctcagaagattgagggtgaggagtgggttggggagaggattgatccgcagaaggttgctaagatgagtgatcaacaaattggccagatgtatgaactcatgcaggctatcaggaatcgacatgatgaagagggcgaacagtga

SEQ ID NO: 27884 - protein, 129 aa, Muscodor strobelii
  misc_feature: SGI Peptide ID NO. 569560
  misc_feature (31)..(121): Pfam Id: PF05882 Pfam Desc: ACN9 family
  misc_feature (1)..(129): NCBI GI: 46108948 Blast Desc: FG01356.1 [Gibberella zeae PH-1] gi|81167686|sp|Q4IN52.1|ACN9_GIBZE RecName: Full=Acetate non-utilizing protein 9, mitochondrial; Flags: Precursor
  misc_feature (1)..(128): NCBI GI: 171687727 Blast Desc: protein product [Podospora anserina] gi|170943825|emb|CAP69477.1| protein product [Podospora anserina]
  misc_feature (1)..(127): NCBI GI: 154297624 Blast Desc: BC1G_12657 [Botryotinia fuckeliana B05.10] gi|150858480|gb|EDN33672.1| BC1G_12657 [Botryotinia fuckeliana B05.10]
  misc_feature (1)..(128): NCBI GI: 256735007 Blast Desc: [Nectria haematococca mpVI 77-13-4]
  misc_feature (1)..(125): NCBI GI: 85114403 Blast Desc: NCU09255 [Neurospora crassa OR74A] gi|74618351|sp|Q7SF55.1|ACN9_NEUCR RecName: Full=Acetate non-utilizing protein 9, mitochondrial; Flags: Precursor crassa
  misc_feature (1)..(122): NCBI GI: 226282573 Blast Desc: acetate non-utilizing protein [Paracoccidioides brasiliensis Pb01]
  misc_feature (1)..(128): NCBI GI: 238842234 Blast Desc: acetate non-utilizing protein 9 [Microsporum canis CBS 113480]
  misc_feature (1)..(122): NCBI GI: 67523293 Blast Desc: AN2103.2 [Aspergillus nidulans FGSC A4] gi|74597682|sp|Q5BBH7.1|ACN9_EMENI RecName: Full=Acetate non-utilizing protein 9, mitochondrial; Flags: Precursor AN2103.2
  misc_feature (1)..(122): NCBI GI: 226292267 Blast Desc: acetate non-utilizing protein [Paracoccidioides brasiliensis Pb18]
  misc_feature (1)..(128): NCBI GI: 189200743 Blast Desc: acetate non-utilizing protein 9, mitochondrial precursor [Pyrenophora tritici-repentis Pt-1C-BFP] gi|187983807|gb|EDU49295.1| acetate non-utilizing protein 9,
  misc_feature: Useful for introducing or modulating the production of volatile compounds
MRATTRLLATTATTAGNALKPAPLAILPPIPLYRRLLRAHRKHLPSEMRLLGDEYVKAEFRAHKGIDNPTQLIGFLTEWQFYAQKIEGEEWVGERIDPQKVAKMSDQQIGQMYELMQAIRNRHDEEGEQ

SEQ ID NO: 27885 - DNA, 673 bp, Muscodor strobelii
  misc_feature: SGI EST ID NO. CUFF.65748.2
  misc_feature: Variant of the nucleotide sequence at SEQ ID NO 27883
tcatcactcactaatctacctctcatatacgcatcattcaacactcacagcaacagcaacataacatgagagcaaccacaagactacttgccacgacggcgacaacagcgggcaatgcgctaaaaccggcaccgctcgcgattttaccaccgatcccgctgtatagacgtttgttgagggcgcatcggaaacatctaccgtctgagatgaggttgctgggcgatgagtatgtgaaggcggagtttagggcacataaagggatcgataatccgacgcagcttattgggtttttgaccgagtggcagttttatgctcagaagattgagggtgaggagtgggttggggagaggattgatccgcagaaggttgctaagatgagtgatcaacaaattggccagatgtatgaactcatgcaggctatcaggaatcgacatgatgaagagggcgaacagtgatgactaggcggaggcaacaagaatgagtgagaagtgatgagagggtatcgtacttgtacatggagtgtttgaatagaaaaatttgttttcgagttagttgctaagatcacggatctaatagatacctgcctcccaccacaggcaccttgtacaatattaatctcttgacgagatcgctagaagaagtccacattatcttgctaagatatcatcccctg

SEQ ID NO: 27886 - DNA, 2301 bp, Muscodor strobelii
  misc_feature: SGI cDNA ID NO. 569561
  misc_feature: Encodes the peptide sequence at SEQ ID NO 27887
atggagaatgatggacataggtcaaagagacgaaagactaaggcaaacagctcgtcattagtccaaattggcgacaaggtgatatcgctggacgcattcctcgccgcaccacctcccaagaagtctgaagaaaagatatccgtggagaactcacaagtttcgacctccgagttaccgctaggaaaaaaccagatcgacaaatccgccgcaaaggatgaagatcaacgtggtgcatcgaagagatcgacggtcgcaggaaaagacacccctttactgaaagcacgcaaggcactgccaatatgggcttaccgtgacgagatcacgtccagccttcgcaaggataatgatatgcttctcatagtgggtgagacaggttcagggaaaagtacccagacaccacaattcttatgcagcgagccatggtgccaaaggagaaaggtgcgaattcaatccgatgatgtagccgtcgggggcatgatagccattacgcagccacgtcgagtggccgccacgactctggccggccgtgtagcacgcgagatgggcgcaccacttggtgccggaacgcaaggctcagtcggttattcggtccggtttgatcacaaggtacctaaagggactaaaattaagtttctcaccgaaggtatgcttctccaagagctgctacgagatccgaatctgcgacaatacagcgctatcattgtggatgagattcacgagagaagtgttgatgttgacttgatcgccgggttcctgaagcagatcttatccagcgacaaagtgggccgaggaggtatcccattgaaagtcgtagtcatgagtgcgacagccgatatagcgaaaatacaaaacttcttcaatcctggtgagacacccgcgccgatgcgactactgcggatcgaagggcgacaattccccgtggaaataaaatatgcgcccaaacccgttccggatatcgcagaggctctagttaagaggatattcgacattcatttgcacgagccactaccgggcgacattctcgcctttctcactggccaagaggagatcgaggctgcccagcgtctcatcgaagagcactgtgctactttggcatcaaatgcaccaaagttgaccgtttttccgctctacggacaattgtctattcaggctcagcaagatgctttccagcctgcaaagacgaaattcacaaggaaggttgtcttagcgacaaacatcgctgagacgtccgttactgtacctggcgtgcggtacgtcgttgactgcggcaaggcgaaggtgaaacaatttcgtgctcagctgggtatggagtcactccttgcgaaggcgatttctaaatcttcggccattcagcggacgggacgagcgggccgtgaaggcccaggaaagtgttacagattatacacatctgaaacctacgaagagcttgaggaagcagaccttcccgagattctacgtaacgatgtcctgggagctgttttgacgatgaaagctcgaggcataaataatgtcctttcctttccactcatggattttccggatatcgacgctgttgaaaaggcattgatacatttattctttctcggtgctgtagcaaaagacggcaacataaccgaaattgggcgcaaactcgcaatattccctgtttctgcacagtacggacgcgttctcctcgcggccgcgacaccagaattcgattgtctcttagaggtcatagacgtgattgcagtgcttacgtcaggcgaatcaattttccatcaacttcagcatgaagacgaagccgaacgtgatgccatcgaggaggcgcgaaaggaattgcagcgccgcgaaggcgacattctcaccttcctcacgactatgcagcgctacgcagccgagaacgcagaccgtgtggcctggtgcaaacaacggcgcatcagcgtccgcaacatgcgtcaagcgctcaacatccgccgccagctacgtggtatttgcgtgaaagagaaactcttctcatcttctgagccaccaccccctgatccgcagccatttgtaccgtcgtcgcctgaaaaagcggataatcttctgcgctgttttttgactggctttgcgacaaagactgcgctcctcgcgccggattcgagttatgtcactgtgcagggaaaacatgtcgtggctattcatccctcgagtgtgttgcatgggcagaagaaggaggctattatgttcttggaacatgttttcactacgaagaactatgctaagaaggtcagttccatacgcggtgactggattattcaggcgatggagtcccgagaatga

SEQ ID NO: 27887 - protein, 766 aa, Muscodor strobelii
  misc_feature: SGI Peptide ID NO. 569561
  misc_feature (652)..(765): Pfam Id: PF07717 Pfam Desc: Domain of function (DUF1605)
  misc_feature (520)..(617): Pfam Id: PF04408 Pfam Desc: Helicase associated domain (HA2)
  misc_feature (365)..(460): Pfam Id: PF00271 Pfam Desc: Helicase conserved C-terminal domain
  misc_feature (3)..(765): NCBI GI: 46108950 Blast Desc: FG01357.1 [Gibberella zeae PH-1]
  misc_feature (8)..(765): NCBI GI: 256734296 Blast Desc: [Nectria haematococca mpVI 77-13-4]
  misc_feature (12)..(763): NCBI GI: 171687729 Blast Desc: protein product [Podospora anserina] gi|170943826|emb|CAP69478.1| protein product [Podospora anserina]
  misc_feature (77)..(763): NCBI GI: 116180568 Blast Desc: CHGG_00912 [Chaetomium globosum CBS 148.51] gi|88185209|gb|EAQ92677.1| CHGG_00912 [Chaetomium globosum CBS 148.51]
  misc_feature (132)..(763): NCBI GI: 261356251 Blast Desc: pre-mRNA-splicing factor ATP-dependent RNA helicase PRP43 [Verticillium albo-atrum VaMs.102]
  misc_feature (11)..(762): NCBI GI: 85114398 Blast Desc: NCU09254 [Neurospora crassa OR74A] gi|28926480|gb|EAA35453.1| NCU09254 [Neurospora crassa OR74A] gi|38567006|emb|CAE76305.1| related to ATP-dependent RNA helicase
  misc_feature (4)..(765): NCBI GI: 39974661 Blast Desc: MGG_00523 [Magnaporthe grisea 70-15] gi|145018577|gb|EDK02856.1| MGG_00523 [Magnaporthe grisea 70-15]
  misc_feature (95)..(762): NCBI GI: 154318090 Blast Desc: BC1G_03028 [Botryotinia fuckeliana B05.10] gi|150843686|gb|EDN18879.1| BC1G_03028 [Botryotinia fuckeliana B05.10]
  misc_feature (35)..(758): NCBI GI: 212528966 Blast Desc: ATP-dependent RNA helicase (Hrh1), [Penicillium marneffei ATCC 18224] gi|210074038|gb|EEA28125.1| ATP-dependent RNA helicase (Hrh1), [Penicillium marneffei ATCC 18224]
  misc_feature (91)..(758): NCBI GI: 242764919 Blast Desc: ATP-dependent RNA helicase (Hrh1), [Talaromyces stipitatus ATCC 10500] gi|218724064|gb|EED23481.1| ATP-dependent RNA helicase (Hrh1), [Talaromyces stipitatus ATCC 10500]
MENDGHRSKRRKTKANSSSLVQIGDKVISLDAFLAAPPPKKSEEKISVENSQVSTSELPLGKNQIDKSAAKDEDQRGASKRSTVAGKDTPLLKARKALPIWAYRDEITSSLRKDNDMLLIVGETGSGKSTQTPQFLCSEPWCQRRKVRIQSDDVAVGGMIAITQPRRVAATTLAGRVAREMGAPLGAGTQGSVGYSVRFDHKVPKGTKIKFLTEGMLLQELLRDPNLRQYSAIIVDEIHERSVDVDLIAGFLKQILSSDKVGRGGIPLKVVVMSATADIAKIQNFFNPGETPAPMRLLRIEGRQFPVEIKYAPKPVPDIAEALVKRIFDIHLHEPLPGDILAFLTGQEEIEAAQRLIEEHCATLASNAPKLTVFPLYGQLSIQAQQDAFQPAKTKFTRKVVLATNIAETSVTVPGVRYVVDCGKAKVKQFRAQLGMESLLAKAISKSSAIQRTGRAGREGPGKCYRLYTSETYEELEEADLPEILRNDVLGAVLTMKARGINNVLSFPLMDFPDIDAVEKALIHLFFLGAVAKDGNITEIGRKLAIFPVSAQYGRVLLAAATPEFDCLLEVIDVIAVLTSGESIFHQLQHEDEAERDAIEEARKELQRREGDILTFLTTMQRYAAENADRVAWCKQRRISVRNMRQALNIRRQLRGICVKEKLFSSSEPPPPDPQPFVPSSPEKADNLLRCFLTGFATKTALLAPDSSYVTVQGKHVVAIHPSSVLHGQKKEAIMFLEHVFTTKNYAKKVSSIRGDWIIQAMESRE

SEQ ID NO: 27888 - DNA, 2509 bp, Muscodor strobelii
  misc_feature: SGI EST ID NO. CUFF.65751.0
  misc_feature: Variant of the nucleotide sequence at SEQ ID NO 27886
aaaagcaattgcagaatcatggagtgccatttatttgtccgttatctagacgggacgaacacctgttgacgggccgacagataaattcataccatcccacgataaacttgtaatccattcgcaagattcaaacttaagactttgtcaaatcccgacgatctcataatggagaatgatggacataggtcaaagagacgaaagactaaggcaaacagctcgtcattagtccaaattggcgacaaggtgatatcgctggacgcattcctcgccgcaccacctcccaagaagtctgaagaaaagatatccgtggagaactcacaagtttcgacctccgagttaccgctaggaaaaaaccagatcgacaaatccgccgcaaaggatgaagatcaacgtggtgcatcgaagagatcgacggtcgcaggaaaagacacccctttactgaaagcacgcaaggcactgccaatatgggcttaccgtgacgagatcacgtccagccttcgcaaggataatgatatgcttctcatagtgggtgagacaggttcagggaaaagtacccagacaccacaattcttatgcagcgagccatggtgccaaaggagaaaggtgcgaattcaatccgatgatgtagccgtcgggggcatgatagccattacgcagccacgtcgagtggccgccacgactctggccggccgtgtagcacgcgagatgggcgcaccacttggtgccggaacgcaaggctcagtcggttattcggtccggtttgatcacaaggtacctaaagggactaaaattaagtttctcaccgaaggtatgcttctccaagagctgctacgagatccgaatctgcgacaatacagcgctatcattgtggatgagattcacgagagaagtgttgatgttgacttgatcgccgggttcctgaagcagatcttatccagcgacaaagtgggccgaggaggtatcccattgaaagtcgtagtcatgagtgcgacagccgatatagcgaaaatacaaaacttcttcaatcctggtgagacacccgcgccgatgcgactactgcggatcgaagggcgacaattccccgtggaaataaaatatgcgcccaaacccgttccggatatcgcagaggctctagttaagaggatattcgacattcatttgcacgagccactaccgggcgacattctcgcctttctcactggccaagaggagatcgaggctgcccagcgtctcatcgaagagcactgtgctactttggcatcaaatgcaccaaagttgaccgtttttccgctctacggacaattgtctattcaggctcagcaagatgctttccagcctgcaaagacgaaattcacaaggaaggttgtcttagcgacaaacatcgctgagacgtccgttactgtacctggcgtgcggtacgtcgttgactgcggcaaggcgaaggtgaaacaatttcgtgctcagctgggtatggagtcactccttgcgaaggcgatttctaaatcttcggccattcagcggacgggacgagcgggccgtgaaggcccaggaaagtgttacagattatacacatctgaaacctacgaagagcttgaggaagcagaccttcccgagattctacgtaacgatgtcctgggagctgttttgacgatgaaagctcgaggcataaataatgtcctttcctttccactcatggattttccggatatcgacgctgttgaaaaggcattgatacatttattctttctcggtgctgtagcaaaagacggcaacataaccgaaattgggcgcaaactcgcaatattccctgtttctgcacagtacggacgcgttctcctcgcggccgcgacaccagaattcgattgtctcttagaggtcatagacgtgattgcagtgcttacgtcaggcgaatcaattttccatcaacttcagcatgaagacgaagccgaacgtgatgccatcgaggaggcgcgaaaggaattgcagcgccgcgaaggcgacattctcaccttcctcacgactatgcagcgctacgcagccgagaacgcagaccgtgtggcctggtgcaaacaacggcgcatcagcgtccgcaacatgcgtcaagcgctcaacatccgccgccagctacgtggtatttgcgtgaaagagaaactcttctcatcttctgagccaccaccccctgatccgcagccatttgtaccgtcgtcgcctgaaaaagcggataatcttctgcgctgttttttgactggctttgcgacaaagactgcgctcctcgcgccggattcgagttatgtcactgtgcagggaaaacatgtcgtggctattcatccctcgagtgtgttgcatgggcagaagaaggaggctattatgttcttggaacatgttttcactacgaagaactatgctaagaaggtcagttccatacgcggtgactggattattcaggcgatggagtcccgagaatgaagtgctctacaatagatcattgagaatagaacaatcagcctct

SEQ ID NO: 27889 - DNA, 3966 bp, Muscodor strobelii
  misc_feature: SGI cDNA ID NO. 569562
  misc_feature: Encodes the peptide sequence at SEQ ID NO 27890
atggaggacatcaagttcactggctgggcccaaacttggcatgacgatctcgacatcgagcatcgctcacttgccattcgcaaatttggaaaagccatgatcgatccggtagaatggaaaacgttctggagtgatgcaggaggcactcctggtcttctccaattactgtcattggcttcagtgctagaagttaaggctttttgtcaagtcgtcatgttatccaaccgtcgcggaaagaaatcaagcgagagagagaaagccgtcgaagagctaattatggccctcttaccgcagcattatccttcaacaaagctactcactaaagacaaacgtccgctccagaagtatcatggccgtatgcttcgtgcttgttcttccgatttcctcgcatgcgtccttgatgcacaagaccagtcgaacccgctttttcaacagctcaacatcaagaagcttttgttcgcacacgacgagatgttgaagaatcgcttgagcaagtacatgtttcacgaaggaccggagctatcaaggtccgaagtcgatacttgcttcaaagagtttgtttcgcgagagccgcctctcccaagcatggaaccacatatgtcctcctctatgcatttcgcgcttgagttactacaagctcgcaccactcttacatgcactgctaaacgatggccctctaaaatatccgagatgtccgtattcatgtcactctacgatcggtttacaaaaaggagtcgttcggccgaccgcacattcttgatcaagctggggttccaattaatcaggttgaaatctcatttgaagtcctccgaggaagcgggcctgctgtggagggcgactgtgtctttatggaagaaagacagtaatcagtatgaagagctgttccttgaaggacttactctagaattgcggggatctgactctgtcttgccgatgattgtcgctcgatggaaaaaagatcacgagaagtacgaacacgttttaaacaagattcttcgccaagggcttggtggatctgcaaactatatctgcagtggttacgcaaacgcacttagccagatccctgatgcggaacgcagtaccgagctgcggtggcggttgttacgtctctattgtcagaatgttccgaaaaagggcattgatattagtacatcgaccgactttgaatgtcttgcaaagcaggaatgggattttgaggtcgtcgacgggcttgatagagaaaagggatcactattcttgacccagctttacaaagccaacccgaatttcagcttcctcagaggacgaagcggtacatccatttactccagacgcgaccaaccacgacgtaacttcaacgctgaacttctgttaacctcatatcatagacatcttgctgatgcccaaggtaaagctcgaaacgaggtcgatcagctacgacaaaaggcggcaggctcgcgagagcagcatgatcgcgcgatattcgcgaaggccgcggcgcactacggaatcgctacaggcgacttagctatctacgctgaaacaatgctatggcaacagcgttttattcgcgacccttttaccgcgaacgtgttattttcgagcgatgcgctacttactctggaaggtgtagatttgctctctggtgtcccctcatcggtctccgaggaaactacactgagcgttataaaggagcgttttatcgtagcgaaccaaatcatgaagagcctgaatgacgcgaagcgtactgcacagaaagaaccatcttatcagcgctcgagctggacagcgttacccagtctttactctgaagtgtatcgtgagcgtgtctcccgcatcagaaagatcaggctccagcaacatgagtcgcagatggatgtattcaagctcgtatgggaaggaattactgagttgacagacagcattggctccgattttctgggccaagtaagcgcacatattcacacgcttctagatggattctctgggccagctttgatcgctgtttgtgagacgttactcgattatactgcccaattcggcagccatcaagatagcaaccaggagaacatctttgcaataatggaagtccttacctacggaattgtgtccaagcttgcctctagcgctactccgacccgagcacgagatctaatccaacgggtgatcattgagcacccagaggccagcagttggcacagacagtttctctccctagggtatatgaaatcactgccagctgaagcagcgaagagtatgctactctcttttgctgctgccattggagagaagcttgaagagcagtcgtatgtcaaggtggatgacgaagaaccctcgaagagcaccccgccacggtctctaatcaaggtatcgactgtcaaatatctggcacagcttttgaatgatgcagacttcgtgtcacccgactctgcggtcgaagttctcattgagctgtttcagtcaggaacgcatccggacgttcgaattgctacactagacagcttattaggcacattaagggttactttgaacgatagcggcgagaaatggagagaaaaccatatggttgagaaaatccttcgcgctctggaaactgtaataccgatcgccggcaacgtgaatgagcgcaggccggttggagaactagattggactcaagcagagaagaatcttacagtcccgatcatgttcgacaacgtggacattccgcctttatttgaagcaattttgaacgtggcctcccaatttccgaagcatcccagtctggaagctgaactgttctcgcgcctggtgcttccaactctacaacgttcacaggaggagtattgccgatgggtttccctgttccttgccaaacacaagcctagcctaaacaaaattgcactgccgcgtgtaccaatcactccaaagatatggactcacctgctgagccatcaaggacatcgagtacctcccattgtgatcgagcagtacaacgaatacatgctcttcagtatgaacgtacccagagatgtaaaactgttcaacgaaaaactacgacaggatgaagccttgcgtaatgatactgatgtaaagcattggttatccaattttgacgcatcagccgacaagtcctggcagtcccgatgctggcagccggacatggtccgactgctcaatttgcttatagcaccagtggagaaggccgtatcgtcggctaccattatgaccgccattgttagtcaggtatcggtgcttctagatgattatgacagatacctgcaatcttggggttattttgttaccagcctgggaccaacgcgcatggatttgtcgagacataaaaatgtcccatactcggaaaacaagaagatagcatgggatcactggcacaaggagacttctattctagcgcaaaagctcatcgcggtcatcgaacaagaatcgactgtgaaagccgatttaccatcaacatttccattgcgtctttggtgtctcccatatccggatccgcgtacgaagccaagggatgaagccttgcggcacctcgcagcgacgcttgagggtactttcatgtcctttctggaaagcgacgaaggcgatatactactctggagcaagcttgtgaccgaggcgagcacgatatttgcttcgatctatacaacggacattgatagtctgtatattgcatgccatattggcgatctgatcctgacctcgcacaaaccaggcctggcagtcgtccagctcataaaagttgcgatggcccttagatttgtcgatagcgcatctaaaaaccatacactccgaagaccaaagcgcaagaaggaccttactgagtcgaagtctatggtgggagaattgataagccgattgcgcccgatcatggatgaatgggcatcttcggggaaacgagcgccgtcccgtgatttgtttgtacagtggaaaaataccaatcgggacacttgggaggatatccttagttgggacttgccttacgatggttaa

SEQ ID NO: 27890 - protein, 1321 aa, Muscodor strobelii
  misc_feature: SGI Peptide ID NO. 569562
  misc_feature (1)..(1316): NCBI GI: 39976159 Blast Desc: MGG_05994 [Magnaporthe grisea 70-15] gi|145011733|gb|EDJ96389.1| MGG_05994 [Magnaporthe grisea 70-15]
  misc_feature (360)..(1037): NCBI GI: 256733695 Blast Desc: NECHADRAFT_59369 [Nectria haematococca mpVI 77-13-4]
  misc_feature (76)..(1155): NCBI GI: 261357291 Blast Desc: conserved [Verticillium albo-atrum VaMs.102]
  misc_feature (299)..(1024): NCBI GI: 46129326 Blast Desc: FG08848.1 [Gibberella zeae PH-1]
  misc_feature (709)..(1027): NCBI GI: 169600739 Blast Desc: SNOG_03215 [Phaeosphaeria nodorum SN15] gi|160705504|gb|EAT89946.2| SNOG_03215 [Phaeosphaeria nodorum SN15]
  misc_feature (693)..(1166): NCBI GI: 255715477 Blast Desc: KLTH0E12496p [Lachancea thermotolerans] gi|238935402|emb|CAR23583.1| KLTH0E12496p [Lachancea thermotolerans]
  misc_feature (684)..(1157): NCBI GI: 189192238 Blast Desc: [Pyrenophora tritici-repentis Pt-1C-BFP] gi|187974064|gb|EDU41563.1| [Pyrenophora tritici-repentis Pt-1C-BFP]
  misc_feature (691)..(1031): NCBI GI: 71018059 Blast Desc: UM03113.1 [Ustilago maydis 521] gi|46098688|gb|EAK83921.1| UM03113.1 [Ustilago maydis 521]
  misc_feature (687)..(945): NCBI GI: 119177414 Blast Desc: CIMG_07650 [Coccidioides immitis RS]
  misc_feature (687)..(945): NCBI GI: 240107678 Blast Desc: CPC735_043010 [Coccidioides posadasii C735 delta SOWgp]
MEDIKFTGWAQTWHDDLDIEHRSLAIRKFGKAMIDPVEWKTFWSDAGGTPGLLQLLSLASVLEVKAFCQVVMLSNRRGKKSSEREKAVEELIMALLPQHYPSTKLLTKDKRPLQKYHGRMLRACSSDFLACVLDAQDQSNPLFQQLNIKKLLFAHDEMLKNRLSKYMFHEGPELSRSEVDTCFKEFVSREPPLPSMEPHMSSSMHFALELLQARTTLTCTAKRWPSKISEMSVFMSLYDRFTKRSRSADRTFLIKLGFQLIRLKSHLKSSEEAGLLWRATVSLWKKDSNQYEELFLEGLTLELRGSDSVLPMIVARWKKDHEKYEHVLNKILRQGLGGSANYICSGYANALSQIPDAERSTELRWRLLRLYCQNVPKKGIDISTSTDFECLAKQEWDFEVVDGLDREKGSLFLTQLYKANPNFSFLRGRSGTSIYSRRDQPRRNFNAELLLTSYHRHLADAQGKARNEVDQLRQKAAGSREQHDRAIFAKAAAHYGIATGDLAIYAETMLWQQRFIRDPFTANVLFSSDALLTLEGVDLLSGVPSSVSEETTLSVIKERFIVANQIMKSLNDAKRTAQKEPSYQRSSWTALPSLYSEVYRERVSRIRKIRLQQHESQMDVFKLVWEGITELTDSIGSDFLGQVSAHIHTLLDGFSGPALIAVCETLLDYTAQFGSHQDSNQENIFAIMEVLTYGIVSKLASSATPTRARDLIQRVIIEHPEASSWHRQFLSLGYMKSLPAEAAKSMLLSFAAAIGEKLEEQSYVKVDDEEPSKSTPPRSLIKVSTVKYLAQLLNDADFVSPDSAVEVLIELFQSGTHPDVRIATLDSLLGTLRVTLNDSGEKWRENHMVEKILRALETVIPIAGNVNERRPVGELDWTQAEKNLTVPIMFDNVDIPPLFEAILNVASQFPKHPSLEAELFSRLVLPTLQRSQEEYCRWVSLFLAKHKPSLNKIALPRVPITPKIWTHLLSHQGHRVPPIVIEQYNEYMLFSMNVPRDVKLFNEKLRQDEALRNDTDVKHWLSNFDASADKSWQSRCWQPDMVRLLNLLIAPVEKAVSSATIMTAIVSQVSVLLDDYDRYLQSWGYFVTSLGPTRMDLSRHKNVPYSENKKIAWDHWHKETSILAQKLIAVIEQESTVKADLPSTFPLRLWCLPYPDPRTKPRDEALRHLAATLEGTFMSFLESDEGDILLWSKLVTEASTIFASIYTTDIDSLYIACHIGDLILTSHKPGLAVVQLIKVAMALRFVDSASKNHTLRRPKRKKDLTESKSMVGELISRLRPIMDEWASSGKRAPSRDLFVQWKNTNRDTWEDILSWDLPYDG

SEQ ID NO: 27891 - DNA, 4639 bp, Muscodor strobelii
  misc_feature: SGI EST ID NO. CUFF.65754.0
  misc_feature: Variant of the nucleotide sequence at SEQ ID NO 27889
ctagtacagctgaactagccaatgcgggccatggcacaacgcattgctgcagaaggtgggactttgtcctcgtaacagctcaatgctttgcgatttgtatctagaaatcttgtcatcaaatgcctagctcgttctttgacgcatccattttgccagatgcatctgtgagatactgccactccgatcccacgctagttggtaattgaccaaggtgcggcaggtcacataatctgtcctcggctgggcagcctatcactaccggcaatgactcagtagcggtgtgtgaccaatagtcaacagccaccattgaccaacatctacctaccgtaccttgaagtctatatcagatcaccgtgttcagcaagtccaggatctcttgcgactatcgcgaaatggtcatacttcagattaacgactgaatacactcttccctagcggatcaattaatttcattccaggacccaagttacaagatggaggacatcaagttcactggctgggcccaaacttggcatgacgatctcgacatcgagcatcgctcacttgccattcgcaaatttggaaaagccatgatcgatccggtagaatggaaaacgttctggagtgatgcaggaggcactcctggtcttctccaattactgtcattggcttcagtgctagaagttaaggctttttgtcaagtcgtcatgttatccaaccgtcgcggaaagaaatcaagcgagagagagaaagccgtcgaagagctaattatggccctcttaccgcagcattatccttcaacaaagctactcactaaagacaaacgtccgctccagaagtatcatggccgtatgcttcgtgcttgttcttccgatttcctcgcatgcgtccttgatgcacaagaccagtcgaacccgctttttcaacagctcaacatcaagaagcttttgttcgcacacgacgagatgttgaagaatcgcttgagcaagtacatgtttcacgaaggaccggagctatcaaggtccgaagtcgatacttgcttcaaagagtttgtttcgcgagagccgcctctcccaagcatggaaccacatatgtcctcctctatgcatttcgcgcttgagttactacaagctcgcaccactcttacatgcactgctaaacgatggccctctaaaatatccgagatgtccgtattcatgtcactctacgatcggtttacaaaaaggagtcgttcggccgaccgcacattcttgatcaagctggggttccaattaatcaggttgaaatctcatttgaagtcctccgaggaagcgggcctgctgtggagggcgactgtgtctttatggaagaaagacagtaatcagtatgaagagctgttccttgaaggacttactctagaattgcggggatctgactctgtcttgccgatgattgtcgctcgatggaaaaaagatcacgagaagtacgaacacgttttaaacaagattcttcgccaagggcttggtggatctgcaaactatatctgcagtggttacgcaaacgcacttagccagatccctgatgcggaacgcagtaccgagctgcggtggcggttgttacgtctctattgtcagaatgttccgaaaaagggcattgatattagtacatcgaccgactttgaatgtcttgcaaagcaggaatgggattttgaggtcgtcgacgggcttgatagagaaaagggatcactattcttgacccagctttacaaagccaacccgaatttcagcttcctcagaggacgaagcggtacatccatttactccagacgcgaccaaccacgacgtaacttcaacgctgaacttctgttaacctcatatcatagacatcttgctgatgcccaaggtaaagctcgaaacgaggtcgatcagctacgacaaaaggcggcaggctcgcgagagcagcatgatcgcgcgatattcgcgaaggccgcggcgcactacggaatcgctacaggcgacttagctatctacgctgaaacaatgctatggcaacagcgttttattcgcgacccttttaccgcgaacgtgttattttcgagcgatgcgctacttactctggaaggtgtagatttgctctctggtgtcccctcatcggtctccgaggaaactacactgagcgttataaaggagcgttttatcgtagcgaaccaaatcatgaagagcctgaatgacgcgaagcgtactgcacagaaagaaccatcttatcagcgctcgagctggacagcgttacccagtctttactctgaagtgtatcgtgagcgtgtctcccgcatcagaaagatcaggctccagcaacatgagtcgcagatggatgtattcaagctcgtatgggaaggaattactgagttgacagacagcattggctccgattttctgggccaagtaagcgcacatattcacacgcttctagatggattctctgggccagctttgatcgctgtttgtgagacgttactcgattatactgcccaattcggcagccatcaagatagcaaccaggagaacatctttgcaataatggaagtccttacctacggaattgtgtccaagcttgcctctagcgctactccgacccgagcacgagatctaatccaacgggtgatcattgagcacccagaggccagcagttggcacagacagtttctctccctagggtatatgaaatcactgccagctgaagcagcgaagagtatgctactctcttttgctgctgccattggagagaagcttgaagagcagtcgtatgtcaaggtggatgacgaagaaccctcgaagagcaccccgccacggtctctaatcaaggtatcgactgtcaaatatctggcacagcttttgaatgatgcagacttcgtgtcacccgactctgcggtcgaagttctcattgagctgtttcagtcaggaacgcatccggacgttcgaattgctacactagacagcttattaggcacattaagggttactttgaacgatagcggcgagaaatggagagaaaaccatatggttgagaaaatccttcgcgctctggaaactgtaataccgatcgccggcaacgtgaatgagcgcaggccggttggagaactagattggactcaagcagagaagaatcttacagtcccgatcatgttcgacaacgtggacattccgcctttatttgaagcaattttgaacgtggcctcccaatttccgaagcatcccagtctggaagctgaactgttctcgcgcctggtgcttccaactctacaacgttcacaggaggagtattgccgatgggtttccctgttccttgccaaacacaagcctagcctaaacaaaattgcactgccgcgtgtaccaatcactccaaagatatggactcacctgctgagccatcaaggacatcgagtacctcccattgtgatcgagcagtacaacgaatacatgctcttcagtatgaacgtacccagagatgtaaaactgttcaacgaaaaactacgacaggatgaagccttgcgtaatgatactgatgtaaagcattggttatccaattttgacgcatcagccgacaagtcctggcagtcccgatgctggcagccggacatggtccgactgctcaatttgcttatagcaccagtggagaaggccgtatcgtcggctaccattatgaccgccattgttagtcaggtatcggtgcttctagatgattatgacagatacctgcaatcttggggttattttgttaccagcctgggaccaacgcgcatggatttgtcgagacataaaaatgtcccatactcggaaaacaagaagatagcatgggatcactggcacaaggagacttctattctagcgcaaaagctcatcgcggtcatcgaacaagaatcgactgtgaaagccgatttaccatcaacatttccattgcgtctttggtgtctcccatatccggatccgcgtacgaagccaagggatgaagccttgcggcacctcgcagcgacgcttgagggtactttcatgtcctttctggaaagcgacgaaggcgatatactactctggagcaagcttgtgaccgaggcgagcacgatatttgcttcgatctatacaacggacattgatagtctgtatattgcatgccatattggcgatctgatcctgacctcgcacaaaccaggcctggcagtcgtccagctcataaaagttgcgatggcccttagatttgtcgatagcgcatctaaaaaccatacactccgaagaccaaagcgcaagaaggaccttactgagtcgaagtctatggtgggagaattgataagccgattgcgcccgatcatggatgaatgggcatcttcggggaaacgagcgccgtcccgtgatttgtttgtacagtggaaaaataccaatcgggacacttgggaggatatccttagttgggacttgccttacgatggttaatggtggagcacgccacagactgaaataccacgacaagtcgtgggatgtaggtgtcgatgccatctagttagctagcataatgaaaatacctgccaatattcggggatgcccccggcgatgtagaccagatctaccgcaccctacatactaagtatcaaatagtaaggaatgaataatgaagcgaatattcttcggaaaac

SEQ ID NO: 27892 - DNA, 1659 bp, Muscodor strobelii
  misc_feature: SGI cDNA ID NO. 569563
  misc_feature: Encodes the peptide sequence at SEQ ID NO 27893
atgttcgctctaactgcttctgcctcccccgaggcaaatagatgcgatctagaagacgaggctcccattatggtcacatcaagcaagaaacatcgtcaaaaaattcatcagctctcgaccaagtcaattcttgaagctgccaaatcctgtgaggtgttgattcgcttgcgcaacatcgtcgagcaccatgtgttagctgaatttgagaagaattggaagaccgttggtgcaagagagtgggtatttcgagaacagctccttcgaagctgcaaaacgctggagaatcgcgaaaagcactatctctgcgaaattacgagacttctcgacaagcatcaggaacggcatcgccaagatccgtgcccagcctacgctcgaaatctcgaggcaattcgtaatctagtcggcagtttttacaaacatctcggaccaagcttccacaactacatggcgcaacgtcggtcggcgcgaaagaagactcctgctctcaagcaatcgaaggaaactcttccttcatctacggctagtctgagaagcgcaatcacaaaagttcgcatcgaagatgttcctgttactgctccgaacaaggctggcaaaagaaaacgagaacaggtcaatgaaccccagactcccaagaagaaagttcgcttcgctatcgaccctgatgacagcccaacaccactcagtcggccaacccacaggaagaagatagtcatcaaggtccctagaaagatgtcgggccgctcacttgatggcaaatacaacaatgaaatgtctacaatgggcccttttcctaacgcagtcaacggtgatggctcctctaatggacacgagtacggcagcaacaatatccaagaagaacgatctacttctcataatggagatccaattgacggaaataatgctctcactgatgacaaccaccagatggtgactcgttcagcccgaaaacaaatacagcacgctaagtcccagaagcgtaaggacaaggatcgttacgatgagatggtgtgtcagggttttcagaccattgattctttagtctacgatgctactaaaaagaagaagaggtcgtcaaaaaagcagagatactatgaagagttggaacgtcaggtacctgatatgtccggagctttggtagccaatgagaatcaactcaaggaactactaatgctgaagcccgtatctactggagatcccttgcctgtctcacttgattcgcctacggattcaacgatcaatgtcgccccttcatctacaatcaatgtgctagaagagaggagtaaccctcattcttacagtcacgccgacactcttcaagacgacatggtgtgctctgaaccagtcattgtttcacatgcctcgcatgacaaggatgtctcatgcatagatcctgccctactgcctagacaaactcctactcgcgacgcaagggctcttttggaacgtattcaagaaaggagttcaagtcaaagcaatgataagggcagtccggcgagcaagacaccagtccctgcaccccagccatggagagcgttgggcatcgcaagcccttttggtcgttctccccttatcccatcgcctcagggtagctggagcacaataagctcactttggtctccgacaaaagaagaggcctttccggatgctcaggagaagtga

SEQ ID NO: 27893 - protein, 552 aa, Muscodor strobelii
  misc_feature: SGI Peptide ID NO. 569563
MFALTASASPEANRCDLEDEAPIMVTSSKKHRQKIHQLSTKSILEAAKSCEVLIRLRNIVEHHVLAEFEKNWKTVGAREWVFREQLLRSCKTLENREKHYLCEITRLLDKHQERHRQDPCPAYARNLEAIRNLVGSFYKHLGPSFHNYMAQRRSARKKTPALKQSKETLPSSTASLRSAITKVRIEDVPVTAPNKAGKRKREQVNEPQTPKKKVRFAIDPDDSPTPLSRPTHRKKIVIKVPRKMSGRSLDGKYNNEMSTMGPFPNAVNGDGSSNGHEYGSNNIQEERSTSHNGDPIDGNNALTDDNHQMVTRSARKQIQHAKSQKRKDKDRYDEMVCQGFQTIDSLVYDATKKKKRSSKKQRYYEELERQVPDMSGALVANENQLKELLMLKPVSTGDPLPVSLDSPTDSTINVAPSSTINVLEERSNPHSYSHADTLQDDMVCSEPVIVSHASHDKDVSCIDPALLPRQTPTRDARALLERIQERSSSQSNDKGSPASKTPVPAPQPWRALGIASPFGRSPLIPSPQGSWSTISSLWSPTKEEAFPDAQEK

SEQ ID NO: 27894 - DNA, 930 bp, Muscodor strobelii
  misc_feature: SGI cDNA ID NO. 569564
  misc_feature: Encodes the peptide sequence at SEQ ID NO 27895
atgagtggtcctggagctggcttcgaatatcccccggtggaggtgtcgtggctgaagcgtgatgtcttgcttttcgccaacaccgtaggatgcaccaaggacgagcttcacttcctctacgagctcgaccccaacttctcagtgtttccgacctacccgatcattctacccttcaagaaagatacccaagaagtcgtggacttctacgctgcacagaaagcgatcaagatccccggcgttccagagttcgacgcacgacgagtagtcgacggacagcgatcgatccaattcctcaagccccttcctacgacttcggagggcaagaagttcgagatccgcagtaaggttttgggtgtctatgataagggtagaccgggcaccgtggtcgaaacccagcaagacctggtcgacgctggcactggtgaggtatacacgagagccatcggcagtggcttttacgtcgcacagggcaattggggcggccctaagggccctgcgactgagaatttccctccgcctaagggcaagaagccagacctggagtttgagaaccagacgaacgagctgacccccgtactatatcgactgaatggcgactataaccctctgcacattcacccggagccgggtaagaagatgggctttggcggcgtcatcatgcatggattatactcatggaattgggccgctcacggtctgctgcaaaagctcggcggaagcgaccccgccaacatgaaggaataccaagctcgatttgcggctcctgtcatccctggtgacaaactgattgcgtctgtctggagaaccggcgagatgaaaggagattttgaggaaatcaggtttagcgtcaaggtcgctggtaagaagcaggtcctgagcaacggccgagcattgatgaaaattgtgggagaagcgaagtccaagctttga

SEQ ID NO: 27895 - protein, 309 aa, Muscodor strobelii
  misc_feature: SGI Peptide ID NO. 569564
  misc_feature (169)..(289): Pfam Id: PF01575 Pfam Desc: MaoC like domain
  misc_feature (1)..(309): NCBI GI: 116182362 Blast Desc: CHGG_01809 [Chaetomium globosum CBS 148.51] gi|88186106|gb|EAQ93574.1| CHGG_01809 [Chaetomium globosum CBS 148.51]
  misc_feature (1)..(306): NCBI GI: 39945712 Blast Desc: MGG_04839 [Magnaporthe grisea 70-15] gi|145021310|gb|EDK05439.1| MGG_04839 [Magnaporthe grisea 70-15]
  misc_feature (1)..(306): NCBI GI: 171695296 Blast Desc: protein product [Podospora anserina] gi|170947890|emb|CAP60054.1| protein product [Podospora anserina]
  misc_feature (1)..(304): NCBI GI: 261357530 Blast Desc: peroxisomal multifunctional enzyme [Verticillium albo-atrum VaMs.102]
  misc_feature (1)..(309): NCBI GI: 85091455 Blast Desc: NCU09138 [Neurospora crassa OR74A] gi|28920301|gb|EAA29674.1| NCU09138 [Neurospora crassa OR74A]
  misc_feature (1)..(308): NCBI GI: 256735287 Blast Desc: NECHADRAFT_74966 [Nectria haematococca mpVI 77-13-4]
  misc_feature (1)..(309): NCBI GI: 46118152 Blast Desc: FG04688.1 [Gibberella zeae PH-1]
  misc_feature (1)..(307): NCBI GI: 154292102 Blast Desc: BC1G_14860 [Botryotinia fuckeliana B05.10] gi|150846287|gb|EDN21480.1| BC1G_14860 [Botryotinia fuckeliana B05.10]
  misc_feature (1)..(309): NCBI GI: 261194152 Blast Desc: peroxisomal dehydratase [Ajellomyces dermatitidis SLH14081] gi|239588495|gb|EEQ71138.1| peroxisomal dehydratase [Ajellomyces dermatitidis SLH14081] gi|239606944|gb|EEQ83931.1|
  misc_feature (1)..(309): NCBI GI: 226288800 Blast Desc: peroxisomal dehydratase [Paracoccidioides brasiliensis Pb18]
  misc_feature (12)..(268): SWISSPROT Homolog: EC 4.2.1.107 3-alpha,7-alpha,12-alpha-trihydroxy-5-beta-cholest-24-enoyl-CoAhydratase
MSGPGAGFEYPPVEVSWLKRDVLLFANTVGCTKDELHFLYELDPNFSVFPTYPIILPFKKDTQEVVDFYAAQKAIKIPGVPEFDARRVVDGQRSIQFLKPLPTTSEGKKFEIRSKVLGVYDKGRPGTVVETQQDLVDAGTGEVYTRAIGSGFYVAQGNWGGPKGPATENFPPPKGKKPDLEFENQTNELTPVLYRLNGDYNPLHIHPEPGKKMGFGGVIMHGLYSWNWAAHGLLQKLGGSDPANMKEYQARFAAPVIPGDKLIASVWRTGEMKGDFEEIRFSVKVAGKKQVLSNGRALMKIVGEAKSKL

SEQ ID NO: 27896 - DNA, 1189 bp, Muscodor strobelii
  misc_feature: SGI EST ID NO. CUFF.65763.0
  misc_feature: Variant of the nucleotide sequence at SEQ ID NO 27894
gctcaatataggtaatcctatccccgactctgctgcatgttatttatcctcatttcccttcagtgctacctggtataccgttgtatgaaagcgatcgaggttccttatttaaattctctaccaaatccagaatcatcatgagtggtcctggagctggcttcgaatatcccccggtggaggtgtcgtggctgaagcgtgatgtcttgcttttcgccaacaccgtaggatgcaccaaggacgagcttcacttcctctacgagctcgaccccaacttctcagtgtttccgacctacccgatcattctacccttcaagaaagatacccaagaagtcgtggacttctacgctgcacagaaagcgatcaagatccccggcgttccagagttcgacgcacgacgagtagtcgacggacagcgatcgatccaattcctcaagccccttcctacgacttcggagggcaagaagttcgagatccgcagtaaggttttgggtgtctatgataagggtagaccgggcaccgtggtcgaaacccagcaagacctggtcgacgctggcactggtgaggtatacacgagagccatcggcagtggcttttacgtcgcacagggcaattggggcggccctaagggccctgcgactgagaatttccctccgcctaagggcaagaagccagacctggagtttgagaaccagacgaacgagctgacccccgtactatatcgactgaatggcgactataaccctctgcacattcacccggagccgggtaagaagatgggctttggcggcgtcatcatgcatggattatactcatggaattgggccgctcacggtctgctgcaaaagctcggcggaagcgaccccgccaacatgaaggaataccaagctcgatttgcggctcctgtcatccctggtgacaaactgattgcgtctgtctggagaaccggcgagatgaaaggagattttgaggaaatcaggtttagcgtcaaggtcgctggtaagaagcaggtcctgagcaacggccgagcattgatgaaaattgtgggagaagcgaagtccaagctttgagcgactttttgatttcagatgtagatgtaggatatcgggtcggatagcaaaattagcttgatctaacatatgactagcatgcataggtaagcatcaaatgaaatgattattctcatacgagc

SEQ ID NO: 27897 - DNA, 1737 bp, Muscodor strobelii
  misc_feature: SGI cDNA ID NO. 569565
  misc_feature: Encodes the peptide sequence at SEQ ID NO 27898
atgtcggcaagcaacggtgtcggggatcgtctgtcgtatgatggggcaatttgcactgtccgctatgttggcgaggttgctggcacttcaggatcctggcttggcgtcgaatgggacgacgctgggcgaggcaaacatgatggctcacataaaggcgtgagatatttcgcgtgtatatcgcactctgcgactgcagcatcatttgtccggcccactcggccagcagaggcacctcaaagttttattgccgctctacaggacaaatacactgcagagctactaagtactaatgcgatacaattctccggcaaggtagcagaagaggtcggcttcgagaaaattcgcaaaaaacaggcacagctctcagaactacgctatgccgtgctcgacggcacacgtatcgctactgtgtacgacaaaggagacccttctatcgctgagacatgtccaaaagtgatagagttggatcttagtcgcaatctttttacacgtgttgggacagtcaccaaaatatgtgcagagctgcctagtctacgaaatctaagattgaatggtaatcggtttcacgatgtactcgaagatgaggacctcaatgaaaagggaaatcattttgcgagcatcgacgagctggggctcgaggagactctcctgacctgggaggaaatagtacacattgcgaccacattcaagtctgtttcaggacttactgcaagcgcgaatcaactgtccgcgttaccaccaactccctttctatcgctgtcatctactctcaccaccttgagtcttgagttcaacaacttcaccgctatttctcatgtggccagccttagtgcattgacctcactccgaaacctgcatttgaagggaaatagcatcgcaagtattcgactggctggcaccgatggctcaccatccaagttttcctctagcttgcaatatcttgacatatcatacaatcaggtttcatcctgggcgtttgttgacgaactacctgcctgttttccaggtttgatttcgctgcgatttgctcacaatccaatatacgacaatccggacccagaacactcaactaatcccaaaagtcttaccgaagaagcctatatgttcacagttggccgtttggcaaaccttcagacattgaattttggcacaatctcagcatccgaccgtcaaaatgcggagatgttctacctggcacgaatcggaaagcagatggctgcagtgcacgagtcgcaagaaaacgatgtcatcaaacagcatcggcgatatgaggaactctgtgagctgtatggaccacctgtcgtgaaccgaacaaaagagatcaaccctgccttcttagaagcaagactggtcaacatcagatttctgtttcatactgaggagggagaaactgttatgaaagctacgagaattcccaaaagctttgatatatacgcggtcaagggtatcgcagggaagctgtttggcatcaggccactgggtttgcgtttggtctgggagactggcgaatgggatcctgtagcaggtttcgatgatgaggtagaagacagcagcgaagacgaagaggagctgctagcacccgaaaaccgtggagactctggtctagccaaagtctcacaggctgatgagaggcccggtaagtgggtgaaaagagaagttgagttatcagacagcccccgacagttaggattctgcgttgatggattagaggcaacgatcagggttgagattcgctga

SEQ ID NO: 27898 - protein, 578 aa, Muscodor strobelii
  misc_feature: SGI Peptide ID NO. 569565
  misc_feature (7)..(75): Pfam Id: PF01302 Pfam Desc: CAP-Gly domain
  misc_feature (2)..(578): NCBI GI: 85091457 Blast Desc: NCU09139 [Neurospora crassa OR74A] gi|28920302|gb|EAA29675.1| conserved [Neurospora crassa OR74A]
  misc_feature (1)..(578): NCBI GI: 46106481 Blast Desc: FG00425.1 [Gibberella zeae PH-1]
  misc_feature (1)..(576): NCBI GI: 39974951 Blast Desc: MGG_00378 [Magnaporthe grisea 70-15] gi|145018731|gb|EDK03010.1| MGG_00378 [Magnaporthe grisea 70-15]
  misc_feature (7)..(578): NCBI GI: 171695298 Blast Desc: protein product [Podospora anserina] gi|170947891|emb|CAP60055.1| protein product [Podospora anserina]
  misc_feature (1)..(575): NCBI GI: 156062162 Blast Desc: SS1G_01196 [Sclerotinia sclerotiorum 1980] gi|154696533|gb|EDN96271.1| SS1G_01196 [Sclerotinia sclerotiorum 1980]
  misc_feature (7)..(577): NCBI GI: 255947534 Blast Desc: Pc22g04970 [Penicillium chrysogenum Wisconsin 54-1255] gi|211591551|emb|CAP97785.1| Pc22g04970 [Penicillium chrysogenum Wisconsin 54-1255]
  misc_feature (7)..(577): NCBI GI: 145229663 Blast Desc: An01g07160 [Aspergillus niger] gi|134055249|emb|CAK43835.1| protein product [Aspergillus niger]
  misc_feature (1)..(577): NCBI GI: 242768742 Blast Desc: tubulin-specific chaperone, [Talaromyces stipitatus ATCC 10500] gi|218724826|gb|EED24243.1| tubulin-specific chaperone, [Talaromyces stipitatus ATCC 10500]
  misc_feature (7)..(577): NCBI GI: 67538722 Blast Desc: AN5531.2 [Aspergillus nidulans FGSC A4] gi|40743501|gb|EAA62691.1| AN5531.2 [Aspergillus nidulans FGSC A4] gi|259485014|tpe|CBF81726.1| TPA: tubulin-specific chaperone,
  misc_feature (1)..(577): NCBI GI: 212542375 Blast Desc: tubulin-specific chaperone, [Penicillium marneffei ATCC 18224] gi|210066249|gb|EEA20342.1| tubulin-specific chaperone, [Penicillium marneffei ATCC 18224]
MSASNGVGDRLSYDGAICTVRYVGEVAGTSGSWLGVEWDDAGRGKHDGSHKGVRYFACISHSATAASFVRPTRPAEAPQSFIAALQDKYTAELLSTNAIQFSGKVAEEVGFEKIRKKQAQLSELRYAVLDGTRIATVYDKGDPSIAETCPKVIELDLSRNLFTRVGTVTKICAELPSLRNLRLNGNRFHDVLEDEDLNEKGNHFASIDELGLEETLLTWEEIVHIATTFKSVSGLTASANQLSALPPTPFLSLSSTLTTLSLEFNNFTAISHVASLSALTSLRNLHLKGNSIASIRLAGTDGSPSKFSSSLQYLDISYNQVSSWAFVDELPACFPGLISLRFAHNPIYDNPDPEHSTNPKSLTEEAYMFTVGRLANLQTLNFGTISASDRQNAEMFYLARIGKQMAAVHESQENDVIKQHRRYEELCELYGPPVVNRTKEINPAFLEARLVNIRFLFHTEEGETVMKATRIPKSFDIYAVKGIAGKLFGIRPLGLRLVWETGEWDPVAGFDDEVEDSSEDEEELLAPENRGDSGLAKVSQADERPGKWVKREVELSDSPRQLGFCVDGLEATIRVEIR

SEQ ID NO: 27899 - DNA, 1895 bp, Muscodor strobelii
  misc_feature: SGI EST ID NO. CUFF.65766.0
  misc_feature: Variant of the nucleotide sequence at SEQ ID NO 27897
cctttgcaattttttgcaaagtgccatgataaagccctaaagtttcaatccgatcaaaaatcaatgaacacctctctgatgggctcatagcacaatatgtcggcaagcaacggtgtcggggatcgtctgtcgtatgatggggcaatttgcactgtccgctatgttggcgaggttgctggcacttcaggatcctggcttggcgtcgaatgggacgacgctgggcgaggcaaacatgatggctcacataaaggcgtgagatatttcgcgtgtatatcgcactctgcgactgcagcatcatttgtccggcccactcggccagcagaggcacctcaaagttttattgccgctctacaggacaaatacactgcagagctactaagtactaatgcgatacaattctccggcaaggtagcagaagaggtcggcttcgagaaaattcgcaaaaaacaggcacagctctcagaactacgctatgccgtgctcgacggcacacgtatcgctactgtgtacgacaaaggagacccttctatcgctgagacatgtccaaaagtgatagagttggatcttagtcgcaatctttttacacgtgttgggacagtcaccaaaatatgtgcagagctgcctagtctacgaaatctaagattgaatggtaatcggtttcacgatgtactcgaagatgaggacctcaatgaaaagggaaatcattttgcgagcatcgacgagctggggctcgaggagactctcctgacctgggaggaaatagtacacattgcgaccacattcaagtctgtttcaggacttactgcaagcgcgaatcaactgtccgcgttaccaccaactccctttctatcgctgtcatctactctcaccaccttgagtcttgagttcaacaacttcaccgctatttctcatgtggccagccttagtgcattgacctcactccgaaacctgcatttgaagggaaatagcatcgcaagtattcgactggctggcaccgatggctcaccatccaagttttcctctagcttgcaatatcttgacatatcatacaatcaggtttcatcctgggcgtttgttgacgaactacctgcctgttttccaggtttgatttcgctgcgatttgctcacaatccaatatacgacaatccggacccagaacactcaactaatcccaaaagtcttaccgaagaagcctatatgttcacagttggccgtttggcaaaccttcagacattgaattttggcacaatctcagcatccgaccgtcaaaatgcggagatgttctacctggcacgaatcggaaagcagatggctgcagtgcacgagtcgcaagaaaacgatgtcatcaaacagcatcggcgatatgaggaactctgtgagctgtatggaccacctgtcgtgaaccgaacaaaagagatcaaccctgccttcttagaagcaagactggtcaacatcagatttctgtttcatactgaggagggagaaactgttatgaaagctacgagaattcccaaaagctttgatatatacgcggtcaagggtatcgcagggaagctgtttggcatcaggccactgggtttgcgtttggtctgggagactggcgaatgggatcctgtagcaggtttcgatgatgaggtagaagacagcagcgaagacgaagaggagctgctagcacccgaaaaccgtggagactctggtctagccaaagtctcacaggctgatgagaggcccggtaagtgggtgaaaagagaagttgagttatcagacagcccccgacagttaggattctgcgttgatggattagaggcaacgatcagggttgagattcgctgatatattttagtcgactttggtaattgaagacaaatgacacatcatattcgtttttgtttcca

SEQ ID NO: 27900 - DNA, 1518 bp, Muscodor strobelii
  misc_feature: SGI cDNA ID NO. 569566
  misc_feature: Encodes the peptide sequence at SEQ ID NO 27901
atgtcgtggaacggccagtacaaaggaggtatgcgtgagcaggccaagtctatcttgtcttctcctccgttacctggcaaagcccgggctcccaacatgccatggtacatagagcgacctgccaccaagatccagacagctactggcgcacgtattgttccaggtcgcttggtaccagttatctttgctgatcaactgcccgagtggttagagatcaaagggtttccacgagagctcaagcgtgagcaagtggcagacttcaactttcttggagttatgccaagaggagacacgtacaacatgtctgtagtttctccagctactggtgtctccgtagatgtctgcgagcacaaacatgttaacaccgacaccagcttaatcaaccaaagcacgggagacagtgaagcccagggagcagtccgagagggtttcgaagattttcagggtacaatggtggtcagaggacacacggctgccctacatcagtgtctaccttcacctcctcttgaggtcacagacaatgaaaatccctaccaagtgatgcgtctagatagtcgacatccaacacaacatggtcaagcaagctttgtccatccggccgaccggctccgtcaagcattcgacactgtccctcctgccaccccatacgagcccaagaccatatactgtctatactggacaaagaatgggttttgtagagaaggacgagcctgcgggtacaagcatgagatgccaatgaccaaagaagagcttcaaaaagttggtatcagcaacaacttcccagcgtggtacagagaatccctacggaaagactttcgtcgctctatcaggaacaagagcatctgctcccgttccgtcttgcaacagatggaagaatcgcacctccgaggtgttcaggagtgtatttttggcaaagatgatcaatcatccaaagatatcggcagctcgaaaagagtaaagcagtccaagattcctgagctgtttatgagaatctccggtccgaaaattgctgagaataccagcgagaatcgctacacggggcgcggcgtatctgcaaatcctgaagaccctacctcttcttctgacctggatcaaagctcaatctcaagtattgcgaataatgtttccggcagcagcggcgcgagtagtgacatggacgtctcgaatcctccacgaacactcttttcggatagacaggccccaaagcccagatttcaaggcaagggtaagaaaagaactacggtcattccagtccgtagaatgatcaatcatcaaatcgcccgctctagtagaggcgttcaacaagacatcatccagagtcaggttcgatctccttcgccagatcaattcgaggatgaggtaaaagcgctgaaggacgcaaccgacgcacgttggagacaacgacaggaggaagccaaggtgagcccggctccgcttccgcaggccatcaaggcttcttctaccagcgtcagtacgagagaggacgtgggaaacctcatttcatttgaggatgaataa

SEQ ID NO: 27901 - protein, 505 aa, Muscodor strobelii
  misc_feature: SGI Peptide ID NO. 569566
  misc_feature (35)..(264): NCBI GI: 116182358 Blast Desc: CHGG_01807 [Chaetomium globosum CBS 148.51] gi|88186104|gb|EAQ93572.1| CHGG_01807 [Chaetomium globosum CBS 148.51]
  misc_feature (30)..(91): NCBI GI: 39974949 Blast Desc: [Magnaporthe grisea 70-15] gi|145018730|gb|EDK03009.1| [Magnaporthe grisea 70-15]
  misc_feature (57)..(268): NCBI GI: 261357532 Blast Desc: VDBG_06069 [Verticillium albo-atrum VaMs.102]
  misc_feature (57)..(266): NCBI GI: 169606518 Blast Desc: SNOG_06302 [Phaeosphaeria nodorum SN15] gi|111065013|gb|EAT86133.1| SNOG_06302 [Phaeosphaeria nodorum SN15]
  misc_feature (55)..(269): NCBI GI: 239606659 Blast Desc: conserved [Ajellomyces dermatitidis ER-3]
  misc_feature (55)..(269): NCBI GI: 261197275 Blast Desc: conserved [Ajellomyces dermatitidis SLH14081] gi|239595670|gb|EEQ78251.1| conserved [Ajellomyces dermatitidis SLH14081]
  misc_feature (218)..(288): NCBI GI: 46137315 Blast Desc: FG10173.1 [Gibberella zeae PH-1]
  misc_feature (221)..(289): NCBI GI: 256731762 Blast Desc: NECHADRAFT_41200 [Nectria haematococca mpVI 77-13-4]
  misc_feature (30)..(93): NCBI GI: 171695300 Blast Desc: protein product [Podospora anserina] gi|170947892|emb|CAP60056.1| protein product [Podospora anserina]
  misc_feature (193)..(293): NCBI GI: 156043553 Blast Desc: SS1G_10780 [Sclerotinia sclerotiorum 1980] gi|154695167|gb|EDN94905.1| SS1G_10780 [Sclerotinia sclerotiorum 1980]
MSWNGQYKGGMREQAKSILSSPPLPGKARAPNMPWYIERPATKIQTATGARIVPGRLVPVIFADQLPEWLEIKGFPRELKREQVADFNFLGVMPRGDTYNMSVVSPATGVSVDVCEHKHVNTDTSLINQSTGDSEAQGAVREGFEDFQGTMVVRGHTAALHQCLPSPPLEVTDNENPYQVMRLDSRHPTQHGQASFVHPADRLRQAFDTVPPATPYEPKTIYCLYWTKNGFCREGRACGYKHEMPMTKEELQKVGISNNFPAWYRESLRKDFRRSIRNKSICSRSVLQQMEESHLRGVQECIFGKDDQSSKDIGSSKRVKQSKIPELFMRISGPKIAENTSENRYTGRGVSANPEDPTSSSDLDQSSISSIANNVSGSSGASSDMDVSNPPRTLFSDRQAPKPRFQGKGKKRTTVIPVRRMINHQIARSSRGVQQDIIQSQVRSPSPDQFEDEVKALKDATDARWRQRQEEAKVSPAPLPQAIKASSTSVSTREDVGNLISFEDE

SEQ ID NO: 27902 - DNA, 579 bp, Muscodor strobelii
  misc_feature: SGI cDNA ID NO. 569567
  misc_feature: Encodes the peptide sequence at SEQ ID NO 27903
atgcgctctccaattctgtctaccattctcctagcaggaactacagctgcagctccagcaaccagcatatttgcccgccagtccaacctatgcttcatcatcggcgataccacactcccgcaggaaacgctcgatgccgccaacgcactagccaacaccataacctgttccaccagcgcaacaacaatccaaggcgtgccagacgtgacatcaggcagcacgtccttctcatcaatcgacttcagtcaatcatcacaaacaccactcgactttgcactatcaacatttgctacagccgatcctctcgcgaactccgacctcggcttcttcaccgacgctctcaacgcatatctagcgacggaggcaggtcttcgcagcatcggcggcagtctagctatcaaggtgcctaagttcttcttagaattccaggtcagccggattgagactgcgcagggcaacccgcccgctgaggcagggttgcaggttgatcatctgagggacaaagtcttgaagaatgccgctggagaggatcaggcgctgcttgatcaggtcacgcagttggctacgcagctgcagtga

SEQ ID NO: 27903 - protein, 192 aa, Muscodor strobelii
  misc_feature: SGI Peptide ID NO. 569567
  misc_feature (10)..(191): NCBI GI: 189206718 Blast Desc: conserved [Pyrenophora tritici-repentis Pt-1C-BFP] gi|187975786|gb|EDU42412.1| conserved [Pyrenophora tritici-repentis Pt-1C-BFP]
  misc_feature (9)..(191): NCBI GI: 256733935 Blast Desc: NECHADRAFT_91726 [Nectria haematococca mpVI 77-13-4]
  misc_feature (6)..(191): NCBI GI: 116201207 Blast Desc: CHGG_08488 [Chaetomium globosum CBS 148.51] gi|88177006|gb|EAQ84474.1| CHGG_08488 [Chaetomium globosum CBS 148.51]
  misc_feature (1)..(191): NCBI GI: 46128019 Blast Desc: FG08387.1 [Gibberella zeae PH-1]
  misc_feature (1)..(189): NCBI GI: 39941394 Blast Desc: MGG_05608 [Magnaporthe grisea 70-15] gi|145022291|gb|EDK06311.1| MGG_05608 [Magnaporthe grisea 70-15]
  misc_feature (12)..(191): NCBI GI: 171679230 Blast Desc: protein product [Podospora anserina] gi|170937687|emb|CAP62344.1| protein product [Podospora anserina]
  misc_feature (20)..(143): NCBI GI: 169621295 Blast Desc: SNOG_13858 [Phaeosphaeria nodorum SN15] gi|160704223|gb|EAT78882.2| SNOG_13858 [Phaeosphaeria nodorum SN15]
  misc_feature (9)..(191): NCBI GI: 238592638 Blast Desc: MPER_07388 [Moniliophthora perniciosa FA553] gi|215459744|gb|EEB93896.1| MPER_07388 [Moniliophthora perniciosa FA553]
MRSPILSTILLAGTTAAAPATSIFARQSNLCFIIGDTTLPQETLDAANALANTITCSTSATTIQGVPDVTSGSTSFSSIDFSQSSQTPLDFALSTFATADPLANSDLGFFTDALNAYLATEAGLRSIGGSLAIKVPKFFLEFQVSRIETAQGNPPAEAGLQVDHLRDKVLKNAAGEDQALLDQVTQLATQLQ

SEQ ID NO: 27904 - DNA, 1552 bp, Muscodor strobelii
  misc_feature: SGI EST ID NO. CUFF.65781.0
  misc_feature: Variant of the nucleotide sequence at SEQ ID NO 27902
agttgccgagttggtccagtaggtcgtagtggggatgggcgtcgatcacacagcgtccagggttctctaacatcatgacacgccgccattatagaacgacccctgcactaaacggagcaccacgtttatatcgtctcatgtcttgcctcgcctaccgccaaactgattaaacaagggagcaagttctcaatgaatggtggaataaattcaccacggacttggcatcgtggaccaggctcaaaactccctcatcgacttcgtagttgaagtcgaggtcttgacacaggacaggcgggtcaaacagtccctcaaatgattatgaagtcttggtaagagatgcttcgagatgctttaatacaacataatagacagcttctacctcgacgatcgacttctgatactaacattgtttatcattcaatctttactttctcacccgctggtacagggatttcattcacttcaacgtttatcatacaattattaattgtcgatcgtcgatcactcttctgtcacgaaaatcacgagacacgactcgatatacagcaccaaccatagaaccttcaagtctggcatcatgcgctctccaattctgtctaccattctcctagcaggaactacagctgcagctccagcaaccagcatatttgcccgccagtccaacctatgcttcatcatcggcgataccacactcccgcaggaaacgctcgatgccgccaacgcactagccaacaccataacctgttccaccagcgcaacaacaatccaaggcgtgccagacgtgacatcaggcagcacgtccttctcatcaatcgacttcagtcaatcatcacaaacaccactcgactttgcactatcaacatttgctacagccgatcctctcgcgaactccgacctcggcttcttcaccgacgctctcaacgcatatctagcgacggaggcaggtcttcgcagcatcggcggcagtctagctatcaaggtgcctaagttcttcttagaattccaggtcagccggattgagactgcgcagggcaacccgcccgctgaggcagggttgcaggttgatcatctgagggacaaagtcttgaagaatgccgctggagaggatcaggcgctgcttgatcaggtcacgcagttggctacgcagctgcagtgaacgtatatgattccctaaatgtaaaggttcttgttggttatttggttggaatcgatatgccgatgataaagacgatggtcaagtaatggtctgatagtgatagaaactatcaagaatgatgtccataataataccatgtcatttcaaggatcatcaatttcggtgcagtactcagactatggccacaacttcacaagcatcttgcaaaatttagtaattccccaactttcaaacaatccaataagaggtctaaagccacggggatacttgctggtatgttcaattacctaggtatcattaatatatcttgcttctcccctttttagggatacctaccctgaatgcaccatgaacacgtccactcacagacgctcatgtttccaacaatactatttc

SEQ ID NO: 27905 - DNA, 1215 bp, Muscodor strobelii
  misc_feature: SGI cDNA ID NO. 569568
  misc_feature: Reduced expression when VOC is produced
  misc_feature: Encodes the peptide sequence at SEQ ID NO 27906
atggcttctcttgcacgccgtagagttttcttgcctctgaaaccgtcaccggctcccctaacgtgtctctgtggccaattgagaccattagcagcacggacatcgccatcgtcacgagccgatcacagccgatcgttctcctctcaatcttccctctcccaagacgcctcacaacatacgcgcagattcacttacgacgtcgccgcctccttctctgccaaatacaagaaattcgatcccctcaccaacgtcttccacttcaacccctacaaccgcatccagaccgagaagaaggagcccaagtcgaaacgccccgccagcggccaggatgccttcttcatcagccgcgtcggcgacaccaatgccgtcgcattcggcatcgcggacggcgttggtggctgggaggagagcggtgtcgatcccgccgactttgcccacagcttctgcgactacatggcctcggccgcctacgagcacaagcccgaagcgagcgagaccccgctaagcccacgatcactcgtgcagcgaggttacgacgacgtctgcaaggacagaagtatatatgccggaggcagcaccgcatcagtagccatcgcaagcgaggatggcaaattggaggtcgctaacctgggcgactctggattcgtccagttgcggctgaacggcgtgcacacctactcggagccgcagacacacgctttcaacacaccctaccagctgtctatagtgccagcaagcatgttggctcgcgcagctgcattcggcggtgcccagctctgcgactatcccaaagacgccgatatcagccagcacaacctgcagcatggcgatatcctcgtcttcgcaagtgacggagtatgggacaacttgttcaaccaggacatactacgcatagccagccgcttgatgacgggtatcggggcgtggaagacctcggacgacggtatccaggttgccgacaacctgcgccgcttcacacaagcggtggactcggcacagagaccagtcacgctgcaaagtgccctcgcgatcgagatcgtcggcgcagctaaggcggctagcacgaaccagcgcctcgatggaccattcgccaaggaagtgcagaagtattacccgcaagagaactggcacggcggcaagatcgacgacatctgtgtcgttgtggcggtagtctccgacagtagcaaatcgcctgacgtacagagcaagctatga

SEQ ID NO: 27906 - protein, 404 aa, Muscodor strobelii
  misc_feature: SGI Peptide ID NO. 569568
  misc_feature (60)..(393): NCBI GI: 46122467 Blast Desc: FG05611.1 [Gibberella zeae PH-1]
  misc_feature (54)..(393): NCBI GI: 85116977 Blast Desc: NCU00958 [Neurospora crassa OR74A] gi|28926955|gb|EAA35915.1| conserved [Neurospora crassa OR74A] gi|38567030|emb|CAE76328.1| conserved [Neurospora crassa]
  misc_feature (59)..(393): NCBI GI: 116180554 Blast Desc: CHGG_00905 [Chaetomium globosum CBS 148.51] gi|88185202|gb|EAQ92670.1| CHGG_00905 [Chaetomium globosum CBS 148.51]
  misc_feature (63)..(404): NCBI GI: 39975375 Blast Desc: MGG_00166 [Magnaporthe grisea 70-15] gi|145018983|gb|EDK03262.1| MGG_00166 [Magnaporthe grisea 70-15]
  misc_feature (62)..(404): NCBI GI: 171687715 Blast Desc: protein product [Podospora anserina] gi|170943819|emb|CAP69471.1| protein product [Podospora anserina]
  misc_feature (63)..(404): NCBI GI: 261356359 Blast Desc: conserved [Verticillium albo-atrum VaMs.102]
  misc_feature (62)..(385): NCBI GI: 156062602 Blast Desc: SS1G_01417 [Sclerotinia sclerotiorum 1980] gi|154696753|gb|EDN96491.1| SS1G_01417 [Sclerotinia sclerotiorum 1980]
  misc_feature (29)..(391): NCBI GI: 189203061 Blast Desc: 5-azacytidine resistance protein azr1 [Pyrenophora tritici-repentis Pt-1C-BFP] gi|187984965|gb|EDU50453.1| 5-azacytidine resistance protein azr1 [Pyrenophora Pt-1C-BFP]
  misc_feature (2)..(395): NCBI GI: 169602955 Blast Desc: SNOG_04482 [Phaeosphaeria nodorum SN15] gi|160706298|gb|EAT88242.2| SNOG_04482 [Phaeosphaeria nodorum SN15]
  misc_feature (26)..(385): NCBI GI: 121719731 Blast Desc: conserved [Aspergillus clavatus NRRL 1] gi|119404776|gb|EAW15138.1| conserved [Aspergillus clavatus NRRL 1]
  misc_feature (10)..(346): SWISSPROT Homolog: EC 3.1.3.16 Phosphoprotein phosphatase
  misc_feature: Useful for introducing or modulating the production of volatile compounds
MASLARRRVFLPLKPSPAPLTCLCGQLRPLAARTSPSSRADHSRSFSSQSSLSQDASQHTRRFTYDVAASFSAKYKKFDPLTNVFHFNPYNRIQTEKKEPKSKRPASGQDAFFISRVGDTNAVAFGIADGVGGWEESGVDPADFAHSFCDYMASAAYEHKPEASETPLSPRSLVQRGYDDVCKDRSIYAGGSTASVAIASEDGKLEVANLGDSGFVQLRLNGVHTYSEPQTHAFNTPYQLSIVPASMLARAAAFGGAQLCDYPKDADISQHNLQHGDILVFASDGVWDNLFNQDILRIASRLMTGIGAWKTSDDGIQVADNLRRFTQAVDSAQRPVTLQSALAIEIVGAAKAASTNQRLDGPFAKEVQKYYPQENWHGGKIDDICVVVAVVSDSSKSPDVQSKL

SEQ ID NO: 27907 - DNA, 1749 bp, Muscodor strobelii
  misc_feature: SGI EST ID NO. CUFF.65784.0
  misc_feature: Variant of the nucleotide sequence at SEQ ID NO 27905
ctcacataatgcctactgcaagctgtgacgaacaaggcaaggctgaaatggcagcctcagccgatcttttgatttcagattaagtaaaaattacatgttttccatttcccatcgtcattggcaactttcttggccatctctgcaaactgggggcccttgtgactttcacttccgacattacccgcgaggaatggcagcatcactctcagtaccaccaaccttcaagcttctcgcctctacgcgcgtcaaaactcaggcgccatggcttctcttgcacgccgtagagttttcttgcctctgaaaccgtcaccggctcccctaacgtgtctctgtggccaattgagaccattagcagcacggacatcgccatcgtcacgagccgatcacagccgatcgttctcctctcaatcttccctctcccaagacgcctcacaacatacgcgcagattcacttacgacgtcgccgcctccttctctgccaaatacaagaaattcgatcccctcaccaacgtcttccacttcaacccctacaaccgcatccagaccgagaagaaggagcccaagtcgaaacgccccgccagcggccaggatgccttcttcatcagccgcgtcggcgacaccaatgccgtcgcattcggcatcgcggacggcgttggtggctgggaggagagcggtgtcgatcccgccgactttgcccacagcttctgcgactacatggcctcggccgcctacgagcacaagcccgaagcgagcgagaccccgctaagcccacgatcactcgtgcagcgaggttacgacgacgtctgcaaggacagaagtatatatgccggaggcagcaccgcatcagtagccatcgcaagcgaggatggcaaattggaggtcgctaacctgggcgactctggattcgtccagttgcggctgaacggcgtgcacacctactcggagccgcagacacacgctttcaacacaccctaccagctgtctatagtgccagcaagcatgttggctcgcgcagctgcattcggcggtgcccagctctgcgactatcccaaagacgccgatatcagccagcacaacctgcagcatggcgatatcctcgtcttcgcaagtgacggagtatgggacaacttgttcaaccaggacatactacgcatagccagccgcttgatgacgggtatcggggcgtggaagacctcggacgacggtatccaggttgccgacaacctgcgccgcttcacacaagcggtggactcggcacagagaccagtcacgctgcaaagtgccctcgcgatcgagatcgtcggcgcagctaaggcggctagcacgaaccagcgcctcgatggaccattcgccaaggaagtgcagaagtattacccgcaagagaactggcacggcggcaagatcgacgacatctgtgtcgttgtggcggtagtctccgacagtagcaaatcgcctgacgtacagagcaagctatgattattgcgagtgtgtggatgttgctatatttggggaactttacatatactaatataggagcgagggagggaaacgacatgttttcagatagcataccctgttttgtgcatagtcaggcgttcatgggggttaactctagatcttggcaaagagaaaatagtatcttgggctggcgatttgcattggctgggttgactggctgtacgatagctaagataggtggtagactagtgaatactactgataggctatagataactacttattgggaaa

SEQ ID NO: 27908 - DNA, 846 bp, Muscodor strobelii
  misc_feature: SGI cDNA ID NO. 569569
  misc_feature: Reduced expression when VOC is produced
  misc_feature: Encodes the peptide sequence at SEQ ID NO 27909
atggcagctctccgctctacctcacggctcttcgccgccgccgcctcgcgctcccacgtcgccggcccctcgatgttcgtccgcggcatggcctcagtcggcgatgccaccgtcaacgccgaccccaagaactcgtccgagtcgcgcagcaagtcgttccagatttaccgctggaaccccgagaacccgaccgagaagcccaagatgcagacctatacgctcgacctcaacaagaccggccccatggtcctcgacgccctcgtccgcatcaagaacgagatagaccccaccctcaccttccgccggagttgtcgagagggcatctgcggctcctgcgccatgaacatcaacggcaccaacaccctcgcctgtctctgccgcattcccaccgacagtgccgagatgaaggtctacccgctaccgcacacctacgtcgtcaaggatctcgtccccgacttgaccctcttctacaagcaatacaagtccatcaagccctacctccagagagacgaccccgcacccgacggtcgtgaataccgtcagtccaaggccgaccgcaagaagctcgacggcctgtacgaatgtatcctgtgcgcctgctgctccacctcttgtccctcgtactggtggaactccgaagagtatctgggtcccgccatccttctgcagtcctaccgatggatcatcgactcgcgtgaccagcgcaccgaggcccgcaaggccgccctcgacaactctatgagcttgtaccgatgccacaccattctcaactgcacgaggacctgccccaagggtctcaatcccggcctggccattgccgagatcaagaagcagatggctttttaa

SEQ ID NO: 27909 - protein, 281 aa, Muscodor strobelii
  misc_feature: SGI Peptide ID NO. 569569
  misc_feature (100)..(130): Pfam Id: PF00111 Pfam Desc: 2Fe-2S iron-sulfur cluster binding domain
  misc_feature (1)..(281): NCBI GI: 39975373 Blast Desc: conserved [Magnaporthe grisea 70-15] gi|58257381|gb|AAW69312.1| succinate dehydrogenase ubiquinone iron-sulfur protein-like protein [Magnaporthe grisea] conserved
  misc_feature (1)..(281): NCBI GI: 261356358 Blast Desc: succinate dehydrogenase iron-sulfur subunit [Verticillium albo-atrum VaMs.102]
  misc_feature (1)..(281): NCBI GI: 85116983 Blast Desc: succinate dehydrogenase iron-sulfur protein, mitochondrial precursor [Neurospora crassa OR74A] gi|28926956|gb|EAA35916.1| succinate dehydrogenase iron-sulfur
  misc_feature (1)..(281): NCBI GI: 171687223 Blast Desc: protein product [Podospora anserina] gi|170943573|emb|CAP69225.1| protein product [Podospora anserina]
  misc_feature (1)..(281): NCBI GI: 261199688 Blast Desc: succinate dehydrogenase iron-sulfur protein [Ajellomyces dermatitidis SLH14081] gi|239594453|gb|EEQ77034.1| succinate dehydrogenase iron-sulfur protein [Ajellomyces protein
  misc_feature (1)..(281): NCBI GI: 225558114 Blast Desc: succinate dehydrogenase iron-sulfur protein [Ajellomyces capsulatus G186AR]
  misc_feature (1)..(281): NCBI GI: 240273353 Blast Desc: succinate dehydrogenase iron-sulphur protein [Ajellomyces capsulatus H143]
  misc_feature (1)..(281): NCBI GI: 154280707 Blast Desc: succinate dehydrogenase iron-sulfur protein, mitochondrial precursor [Ajellomyces capsulatus NAm1] gi|150411345|gb|EDN06733.1| succinate dehydrogenase iron-sulfur
  misc_feature (1)..(281): NCBI GI: 119181244 Blast Desc: succinate dehydrogenase iron-sulfur protein, mitochondrial precursor [Coccidioides immitis RS]
  misc_feature (1)..(281): NCBI GI: 240108919 Blast Desc: Succinate dehydrogenase iron-sulfur protein,mitochondrial precursor , [Coccidioides posadasii C735 delta SOWgp]
  misc_feature (3)..(281): SWISSPROT Homolog: EC 1.3.5.1 Succinate dehydrogenase (ubiquinone)
  misc_feature: Useful for introducing or modulating the production of volatile compounds
MAALRSTSRLFAAAASRSHVAGPSMFVRGMASVGDATVNADPKNSSESRSKSFQIYRWNPENPTEKPKMQTYTLDLNKTGPMVLDALVRIKNEIDPTLTFRRSCREGICGSCAMNINGTNTLACLCRIPTDSAEMKVYPLPHTYVVKDLVPDLTLFYKQYKSIKPYLQRDDPAPDGREYRQSKADRKKLDGLYECILCACCSTSCPSYWWNSEEYLGPAILLQSYRWIIDSRDQRTEARKAALDNSMSLYRCHTILNCTRTCPKGLNPGLAIAEIKKQMAF

SEQ ID NO: 27910 - DNA, 1810 bp, Muscodor strobelii
  misc_feature: SGI EST ID NO. CUFF.65787.0
  misc_feature: Variant of the nucleotide sequence at SEQ ID NO 27908
ctggagctgccctcaaaccttagccgagggatcaaaccgggttggctcgtcgctgcgaattgaggctctatgatgaagacattctcgactccatcgccactgcgcttctttgtccctccgcacgctcaaccttaattggggtgtgtctgattgcgatatctgtctgccaccgtttgagtgcctggcccttggatatccttaatcgtccttcgattattcctacctagcatttctctttcctattgcagctgttcagtcgctaatctccctcaccacacacttcgccctctacacatcgcctaccatggcagctctccgctctacctcacggctcttcgccgccgccgcctcgcgctcccacgtcgccggcccctcgatgttcgtccgcggcatggcctcagtcggcgatgccaccgtcaacgccgaccccaagaactcgtccgagtcgcgcagcaagtcgttccagatttaccgctggaaccccgagaacccgaccgagaagcccaagatgcagacctatacgctcgacctcaacaagaccggccccatggtcctcgacgccctcgtccgcatcaagaacgagatagaccccaccctcaccttccgccggagttgtcgagagggcatctgcggctcctgcgccatgaacatcaacggcaccaacaccctcgcctgtctctgccgcattcccaccgacagtgccgagatgaaggtctacccgctaccgcacacctacgtcgtcaaggatctcgtccccgacttgaccctcttctacaagcaatacaagtccatcaagccctacctccagagagacgaccccgcacccgacggtcgtgaataccgtcagtccaaggccgaccgcaagaagctcgacggcctgtacgaatgtatcctgtgcgcctgctgctccacctcttgtccctcgtactggtggaactccgaagagtatctgggtcccgccatccttctgcagtcctaccgatggatcatcgactcgcgtgaccagcgcaccgaggcccgcaaggccgccctcgacaactctatgagcttgtaccgatgccacaccattctcaactgcacgaggacctgccccaagggtctcaatcccggcctggccattgccgagatcaagaagcagatggctttttaaaaagctcatccaaatcatatgaggacgtcaattgagaagaaagaggaagataagagagaaagatgacgcatggcatgaagtcgcgacatagaggagcatacaagttgggcagagagacgaagataccgacctgtacaaagttcttccccacctacaactcatgttttccagcagaggacgaggaaacgcacacccgtcgtgtatgtctaatccgtgttccttccggttgagcatgggctggagtttgagttgtccctttttttttttaaacccatcttgtttaacacgaattttttttgttgagaaatatatttgttcatcatcatttttatgaccctattaggcgacactaatgttagtgtgaaatgaggcaagatatgtgatgtaccgcgcactgtattttgtaatgtgtgcttgattacttgatgccagctgagttgccatacgggatacggttttaagatgtgagttacgataaagtaagattgcactatgtctatgcggcacctgtacgacttcttgtattgggtcgtgatattaaacggtcaatggcagtgcagtgttcaatgcgatgatttcggctcagtttcttgcaacttattatgcgaaatataggggaacgctcattccgtcatacgctcagaagcttatcttgacttg

SEQ ID NO: 27911 - DNA, 291 bp, Muscodor strobelii
  misc_feature: SGI cDNA ID NO. 569570
  misc_feature: Encodes the peptide sequence at SEQ ID NO 27912
atgacagccatcatcaagtaccggggccaagatggcattatgctggataacaccctcagaaatgccatcaagcctggcgtttctgctggcacaaacagtatcgaagcgaggcgaagcgagaaagttgcagcagcaatgaagcaagcgacgcaaccgtcggatgccaatgtcaaggagaagggcaccactaagaaggctattccggaagttgcataccacaaaacaccagaggccgggcggaacgacggagatcagttcgataagtccattgatcagattgagcatttgtga

SEQ ID NO: 27912 - protein, 96 aa, Muscodor strobelii
  misc_feature: SGI Peptide ID NO. 569570
MTAIIKYRGQDGIMLDNTLRNAIKPGVSAGTNSIEARRSEKVAAAMKQATQPSDANVKEKGTTKKAIPEVAYHKTPEAGRNDGDQFDKSIDQIEHL

SEQ ID NO: 27913 - DNA, 1042 bp, Muscodor strobelii
  misc_feature: SGI EST ID NO. CUFF.65796.0
  misc_feature: Variant of the nucleotide sequence at SEQ ID NO 27911
atgcatgcctaagatgtgaagactggaaggcgctttccatctggagaatcggcaggcaggcaggttctgcctttctcgacagactcctagaaggcaagcacgtctaaggctctatctgaatgcactgaacctgcctgctacgcctaactgcgtcttcgaccagtaggtgttctcctgaagtcagtcagcccatgagttttgaagcttagtctttggtgaatggactctggtctattgatcccagcttcttcgttgccctttacaccatttggaagtgcgttcagggacgctcgcgtccgaaagtccacgatctcgaaagctgcaacccgcatcaagtcgaaactgcgctgaaagagtgcgcaatgacagccatcatcaagtaccggggccaagatggcattatgctggataacaccctcagaaatgccatcaagcctggcgtttctgctggcacaaacagtatcgaagcgaggcgaagcgagaaagttgcagcagcaatgaagcaagcgacgcaaccgtcggatgccaatgtcaaggagaagggcaccactaagaaggctattccggaagttgcataccacaaaacaccagaggccgggcggaacgacggagatcagttcgataagtccattgatcagattgagcatttgtgatgcgttacatactcagaggacgagggaactcgagatccccaaaacgaaatctgtcgttggcgttcggatctctattacctcccccttgagagatttcgacgtgaccattgtcgataagaacttggtggacttgttgatcgccttggagtacttgaacatctgcatttgcttcggtccgaaatcaccaccggtattggcttggacttggtgtgtgtccacagcgtttgtagtctgcgtgatgtcaaccatttgctggtccatcacattctctgccgcgggctgctgctgctgctgctgctgttgtttgtggttctcaagttggtgcgcagcgtggccagcgcgccttgcagcttgacgacaacctaaaaaatagtcagtacaaaaagaac

SEQ ID NO: 27914 - DNA, 384 bp, Muscodor strobelii
  misc_feature: SGI cDNA ID NO. 569571
  misc_feature: Encodes the peptide sequence at SEQ ID NO 27915
atggatcccaacggaaatcgaggtccagcatatggttgtcgtcaagctgcaaggcgcgctggccacgctgcgcaccaacttgagaaccacaaacaacagcagcagcagcagcagcagcccgcggcagagaatgtgatggaccagcaaatggttgacatcacgcagactacaaacgctgtggacacacaccaagtccaagccaataccggtggtgatttcggaccgaagcaaatgcagatgttcaagtactccaaggcgatcaacaagtccaccaagttcttatcgacaatggtcacgtcgaaatctctcaagggggaggtaatagagatccgaacgccaacgacagatttcgttttggggatctcgagttccctcgtcctctga

SEQ ID NO: 27915 - protein, 127 aa, Muscodor strobelii
  misc_feature: SGI Peptide ID NO. 569571
MDPNGNRGPAYGCRQAARRAGHAAHQLENHKQQQQQQQQPAAENVMDQQMVDITQTTNAVDTHQVQANTGGDFGPKQMQMFKYSKAINKSTKFLSTMVTSKSLKGEVIEIRTPTTDFVLGISSSLVL

SEQ ID NO: 27916 - DNA, 633 bp, Muscodor strobelii
  misc_feature: SGI cDNA ID NO. 569572
  misc_feature: Encodes the peptide sequence at SEQ ID NO 27917
atgagattcgccgtttcttccgctatcatcgccgtcctcgctggactggccagcgccaaggtcgccctcaccaacagcgacttcagcggcatcgaggctggcaagccctttgagatcacttggtctggtgccaccggtcccgtcaccctgactctgaaggatggcgacaaggacgacctccagactgtcgatgtcatcaagtccggtctcagcggcgacagcttctcctggatcccgaccaaggacctgcccgacggccagtatgccatcgagatcagtgacggaaccgacaccaactactctcagcagtttcccatcactggcggttctgctgcctccagcacctctgctacccctagctccaccagcatgaccatcacttctacctccacctcctcggagaccacctcggagagcacttctagcagcgagaccacatctggcacctcgtcttcgtctgccaccaccaccaaatccagcactacttcggagagcacctctgccactaccacctcttcctctcctgcatcttccaccactgctgccgagacttctatccctaacaccaatggtgctcgtgctgctgccgcccctcttggcttcatcgccgctctcggcgccttgttgctgtaa

SEQ ID NO: 27917 - protein, 210 aa, Muscodor strobelii
  misc_feature: SGI Peptide ID NO. 569572
  misc_feature (1)..(108): NCBI GI: 39974653 Blast Desc: MGG_00527 [Magnaporthe grisea 70-15] gi|37992813|gb|AAR06609.1| extracellular matrix protein [Magnaporthe grisea] gi|145018573|gb|EDK02852.1| MGG_00527 grisea
  misc_feature (17)..(187): NCBI GI: 258575749 Blast Desc: [Uncinocarpus reesii 1704] gi|237902322|gb|EEP76723.1| [Uncinocarpus reesii 1704]
  misc_feature (21)..(108): NCBI GI: 154319131 Blast Desc: BC1G_02517 [Botryotinia fuckeliana B05.10] gi|150856948|gb|EDN32140.1| BC1G_02517 [Botryotinia fuckeliana B05.10]
  misc_feature (29)..(208): NCBI GI: 119188539 Blast Desc: [Coccidioides immitis RS]
  misc_feature (29)..(208): NCBI GI: 240111572 Blast Desc: conserved [Coccidioides posadasii C735 delta SOWgp]
  misc_feature (31)..(133): NCBI GI: 226278214 Blast Desc: PAAG_04829 [Paracoccidioides brasiliensis Pb01]
  misc_feature (29)..(187): NCBI GI: 76008496 Blast Desc: extracellular matrix protein [Coccidioides posadasii]
  misc_feature (1)..(114): NCBI GI: 85116972 Blast Desc: NCU00957 [Neurospora crassa OR74A] gi|28926954|gb|EAA35914.1| [Neurospora crassa OR74A] gi|38567029|emb|CAE76327.1| related to extracellular matrix
  misc_feature (21)..(108): NCBI GI: 156063466 Blast Desc: SS1G_01851 [Sclerotinia sclerotiorum 1980] gi|154697185|gb|EDN96923.1| SS1G_01851 [Sclerotinia sclerotiorum 1980]
  misc_feature (31)..(111): NCBI GI: 225679324 Blast Desc: PABG_00171 [Paracoccidioides brasiliensis Pb03]
MRFAVSSAIIAVLAGLASAKVALTNSDFSGIEAGKPFEITWSGATGPVTLTLKDGDKDDLQTVDVIKSGLSGDSFSWIPTKDLPDGQYAIEISDGTDTNYSQQFPITGGSAASSTSATPSSTSMTITSTSTSSETTSESTSSSETTSGTSSSSATTTKSSTTSESTSATTTSSSPASSTTAAETSIPNTNGARAAAAPLGFIAALGALLL

SEQ ID NO: 27918 - DNA, 1325 bp, Muscodor strobelii
  misc_feature: SGI EST ID NO. CUFF.66221.1
  misc_feature: Variant of the nucleotide sequence at SEQ ID NO 27916
ccgcactaccctcacagcttcttcacgacactcgttcaactacgatttctagcacgctatcaaaatgagattcgccgtttcttccgctatcatcgccgtcctcgctggactggccagcgccaaggtcgccctcaccaacagcgacttcagcggcatcgaggctggcaagccctttgagatcacttggtctggtgccaccggtcccgtcaccctgactctgaaggatggcgacaaggacgacctccagactgtcgatgtcatcaagtccggtctcagcggcgacagcttctcctggatcccgaccaaggacctgcccgacggccagtatgccatcgagatcagtgacggaaccgacaccaactactctcagcagtttcccatcactggcggttctgctgcctccagcacctctgctacccctagctccaccagcatgaccatcacttctacctccacctcctcggagaccacctcggagagcacttctagcagcgagaccacatctggcacctcgtcttcgtctgccaccaccaccaaatccagcactacttcggagagcacctctgccactaccacctcttcctctcctgcatcttccaccactgctgccgagacttctatccctaacaccaatggtgctcgtgctgctgccgcccctcttggcttcatcgccgctctcggcgccttgttgctgtaaatcaacaaggtagtgggttgagcagaggatatcattggactactagacctcggaccattcgcaggaacaggacaagaggacactatataaacatctcactttgggctcagtgtatactgatgtataattcgataattacttgtcgttcttcgacataaaaagatgcatataggagttacgcgaaatgatagatgtggagatgagctgtttgtgtctccatgtgaacacatcgtacgaggtggcccgcatggaaatcgattgtgaccgatcactcacggagagtcgttactactttctattcatgtggtgatgccgtttcgcttcgtgttcgctgcgccttgttggcatacagatgattgaaaacagtgattttcggactagtcccaacctgcttccttcactgatagtaaggcacttataagattatattacgggtggtcgttctatcccaattggtcctatagtcgctgctgtttcttaaatgcaattgtatcatgatgtaatgctcctgcttagtaggcagcaagtcaatgtcgagccttctatgtctatagtgtgctcttcctcaacgcgagatgcgtgggagatgcgtgcgcatccgaccctcccaataagtgcaatagttgag

SEQ ID NO: 27919 - DNA, 954 bp, Muscodor strobelii
  misc_feature: SGI cDNA ID NO. 569573
  misc_feature: Encodes the peptide sequence at SEQ ID NO 27920
atgacgaccaactccaacaacgccgaggggcagtatgaccccaccaagatatggacgacgctgcttaccaaccgcgcatattttggaggcttgttggtgttgaatcattctttgcgcaagactagtagcaagtatcagctcaaggttatggtgacgcgcgatgtcgagaaagatgaggagtatatgcgcgcctttgctgttgctggtattcccaccatcgtcgtcgacaagattgagccagcaccccgagatggcaaagtgaaccgcggcacatgggaaaagctagctccttggtccttcacagaatacaagcgagtcgtacttcttgatagcgaccaggttattctacagaacattgactatatgatggaaatggatcttcctgatggctggattgctagcactcatgcttgtacgtgcaatccgcggaagcttgcacattacagcaaggattggatacctgaaaactgcggattcaccgctgcaaatcaacaaacgggtgagccagcgccgatcaacgaatcatgtccgaacaaccaccatctcctcaacagcggcactgtggtcctagaaccttcaaaggcacagtacgatcacctcatcgacactatgaattcgcatccagatgtgcccaacatgttattcttcgatcaagatctcctggctatagtatataggggcaagtggaaagcattgccttacacgtacaacgccttgaagccaatgcgagactgccactcttcgctgtggaaagatgaagatataaaagtcctccatttcatcctgaacaagccatggaagagcaggacctataagaatgaccgcatcgagagcacacacaagatctggtgggatgagtatgctgaggttgagaaggagtgggcaaatagtgatagcgaggagaagagagaattgtggaagaatgttgttgtacctgttgttgctcaagaatag

SEQ ID NO: 27920 - protein, 317 aa, Muscodor strobelii
  misc_feature: SGI Peptide ID NO. 569573
  misc_feature (18)..(270): Pfam Id: PF01501 Pfam Desc: Glycosyl transferase family 8
  misc_feature (12)..(316): NCBI GI: 85086629 Blast Desc: NCU00244 [Neurospora crassa OR74A] gi|28918810|gb|EAA28479.1| [Neurospora crassa OR74A]
  misc_feature (18)..(310): NCBI GI: 242215438 Blast Desc: POSPLDRAFT_50787 [Postia placenta Mad-698-R] gi|220727320|gb|EED81242.1| POSPLDRAFT_50787 [Postia placenta Mad-698-R]
  misc_feature (18)..(310): NCBI GI: 242219788 Blast Desc: POSPLDRAFT_45203 [Postia placenta Mad-698-R] gi|220725136|gb|EED79138.1| POSPLDRAFT_45203 [Postia placenta Mad-698-R]
  misc_feature (18)..(298): NCBI GI: 169844216 Blast Desc: CC1G_03623 [Coprinopsis cinerea okayama7#130] gi|116509941|gb|EAU92836.1| CC1G_03623 [Coprinopsis cinerea okayama7#130]
  misc_feature (18)..(309): NCBI GI: 170085261 Blast Desc: glycosyltransferase family 8 protein [Laccaria bicolor S238N-H82] gi|164651406|gb|EDR15646.1| glycosyltransferase family 8 protein [Laccaria bicolor S238N-H82]
  misc_feature (17)..(299): NCBI GI: 119483812 Blast Desc: glycosyl transferase family protein [Neosartorya fischeri NRRL 181] gi|119409965|gb|EAW19912.1| glycosyl transferase family protein [Neosartorya fischeri NRRL 181]
  misc_feature (5)..(299): NCBI GI: 159123917 Blast Desc: glycosyl transferase family protein [Aspergillus fumigatus A1163]
  misc_feature (5)..(299): NCBI GI: 70983011 Blast Desc: glycosyl transferase family protein [Aspergillus fumigatus Af293] gi|66844658|gb|EAL84995.1| glycosyl transferase family protein [Aspergillus fumigatus Af293]
  misc_feature (13)..(266): NCBI GI: 121715009 Blast Desc: glycosyl transferase family protein [Aspergillus clavatus NRRL 1] gi|119403270|gb|EAW13688.1| glycosyl transferase family protein [Aspergillus clavatus NRRL 1]
  misc_feature (3)..(284): NCBI GI: 239610538 Blast Desc: glycosyl transferase [Ajellomyces dermatitidis ER-3]
  misc_feature (16)..(287): SWISSPROT Homolog: EC 2.4.1.186 Glycogenin glucosyltransferase
MTTNSNNAEGQYDPTKIWTTLLTNRAYFGGLLVLNHSLRKTSSKYQLKVMVTRDVEKDEEYMRAFAVAGIPTIVVDKIEPAPRDGKVNRGTWEKLAPWSFTEYKRVVLLDSDQVILQNIDYMMEMDLPDGWIASTHACTCNPRKLAHYSKDWIPENCGFTAANQQTGEPAPINESCPNNHHLLNSGTVVLEPSKAQYDHLIDTMNSHPDVPNMLFFDQDLLAIVYRGKWKALPYTYNALKPMRDCHSSLWKDEDIKVLHFILNKPWKSRTYKNDRIESTHKIWWDEYAEVEKEWANSDSEEKRELWKNVVVPVVAQE

SEQ ID NO: 27921 - DNA, 1756 bp, Muscodor strobelii
  misc_feature: SGI EST ID NO. CUFF.65835.0
  misc_feature: Variant of the nucleotide sequence at SEQ ID NO 27919
atagtatttgactagcttgatttgttttactaggtacattggatgaggtcagaggcccgttgaattggggttgaaaacgtcgtctataaagtgaacagcatattgcgtttctgaaagacaattcccatacatgtgttggcttcgtctaccaatatcctcctattcattgctagtctatctagcttcatgtttgtattacaggtttacgatacatcatttccgcctcctccctaaatcacgtctcgcctgatgcgtggtggggttccgcgtccatccgagcttgtctcggccttctcctggcgtatctctgtcggctgttgcgccaaatgcaagtcataagtgcaggtaagggaatgcgcacgttgcagattggttcggtgggtatcgtttgccaaatcgatggcgtcaacacgcgagaatctgttgctgttttcgcaatgttttactgccaaaccaaactcatcttgggtcatgttgtgtgctacctgcatcaccctggttgtaatataagagaagaggcgctcgacagagtcgtctataaaattctatctcaatgtctacctctttcttaaaaagcagattgttctcgactttggtgccaatcgccgcatttattatatatgccatcatgacgaccaactccaacaacgccgaggggcagtatgaccccaccaagatatggacgacgctgcttaccaaccgcgcatattttggaggcttgttggtgttgaatcattctttgcgcaagactagtagcaagtatcagctcaaggttatggtgacgcgcgatgtcgagaaagatgaggagtatatgcgcgcctttgctgttgctggtattcccaccatcgtcgtcgacaagattgagccagcaccccgagatggcaaagtgaaccgcggcacatgggaaaagctagctccttggtccttcacagaatacaagcgagtcgtacttcttgatagcgaccaggttattctacagaacattgactatatgatggaaatggatcttcctgatggctggattgctagcactcatgcttgtacgtgcaatccgcggaagcttgcacattacagcaaggattggatacctgaaaactgcggattcaccgctgcaaatcaacaaacgggtgagccagcgccgatcaacgaatcatgtccgaacaaccaccatctcctcaacagcggcactgtggtcctagaaccttcaaaggcacagtacgatcacctcatcgacactatgaattcgcatccagatgtgcccaacatgttattcttcgatcaagatctcctggctatagtatataggggcaagtggaaagcattgccttacacgtacaacgccttgaagccaatgcgagactgccactcttcgctgtggaaagatgaagatataaaagtcctccatttcatcctgaacaagccatggaagagcaggacctataagaatgaccgcatcgagagcacacacaagatctggtgggatgagtatgctgaggttgagaaggagtgggcaaatagtgatagcgaggagaagagagaattgtggaagaatgttgttgtacctgttgttgctcaagaatagggaattcgatatagaaagtaactatattctgtgctaaagcgagggcatatatatggatcagaggtctacagcgttggtgtttcggtaaccctgggtttcatatcttatattctatatagataggtgtctaacgctgaggcgagatgaatgatgattatgatgctagaagtagac

SEQ ID NO: 27922 - DNA, 1164 bp, Muscodor strobelii
  misc_feature: SGI cDNA ID NO. 569574
  misc_feature: Reduced expression when VOC is produced
  misc_feature: Encodes the peptide sequence at SEQ ID NO 27923
atgtcggatccattactgacatccctctgttccatctgccgtattcaagctcccaaatataagtgtccgagatgtgctgcgcggacgtgttctctcgcttgcgtgaagaagcacaagacgtggtcgacatgcgacggtgaacgcgatgcgacagtctatcgcccgcgggaggagcttaaaactgacgccggaatcgaccacgactacaacttcctcaccaagatcgagcattcggttgagcgcgcacatcgaatcttgcgaaatgacagaggtatcatgccagaggagagctccgaacagccaccgccacccaaaagagcgcgcctgggcaggggaggacgcttcaacaaaggccaaagccgaggaagaaccacacttgaggagggagacgggatacgaaaatgggatagggccgtcgtttcccgtttgaagaaactaggcatacatgtcacctctctgccctacggaatgtcacgttctaaggcgaataagacgagctttaaccgacgaacgggtacgatcaattggcaagtcgagtgggtgctgtacgaagaccagtccagtccgcagaccaccaaggtgatggctaaggctctcgataaagtctcactccacgttgctctcgctgaagctctggagtcgcaacgtacgcaccagctgacagaggacgagcttgctgagaagaagcaagccagccgagaacaaaggccctcaagacatgcgggccagaactactactcttctgcatggagtgctgcaccatgtctgaagcaaagtcaaacggagacgttctggagcttttccatcgaccacgacagcgcgaataggtaccagttcttctacttgaagccaaagacgccttcgagggagaagccgaggcttgtgccgcttgaggctacggacaagcttgcagaggtgctccctggacttgatgtcgtcgagttccctacgatatatgtttttcctgcgacgagtagtgttggagacggatttgtggtagaaaggaaagacggctggtccaaaaaacggaaggcgcctacctccacaccacttgcaggccatgaatccgattcggacgtcgaagaagatggcgaaatacaagaggaatcctctgatgagaccagcagctctggatccgattcggagatgtctgatgaggcgtga

SEQ ID NO: 27923 - protein, 387 aa, Muscodor strobelii
  misc_feature: SGI Peptide ID NO. 569574
  misc_feature (6)..(36): Pfam Id: PF04438 Pfam Desc: HIT zinc finger
  misc_feature (1)..(385): NCBI GI: 256732536 Blast Desc: NECHADRAFT_78821 [Nectria haematococca mpVI 77-13-4]
  misc_feature (1)..(385): NCBI GI: 46121603 Blast Desc: FG05180.1 [Gibberella zeae PH-1]
  misc_feature (1)..(335): NCBI GI: 156046803 Blast Desc: SS1G_09485 [Sclerotinia sclerotiorum 1980] gi|154693880|gb|EDN93618.1| SS1G_09485 [Sclerotinia sclerotiorum 1980]
  misc_feature (5)..(329): NCBI GI: 171688924 Blast Desc: protein product [Podospora anserina] gi|170944424|emb|CAP70535.1| protein product [Podospora anserina]
  misc_feature (1)..(333): NCBI GI: 116199935 Blast Desc: CHGG_08123 [Chaetomium globosum CBS 148.51] gi|88179402|gb|EAQ86870.1| CHGG_08123 [Chaetomium globosum CBS 148.51]
  misc_feature (1)..(335): NCBI GI: 154313974 Blast Desc: BC1G_04930 [Botryotinia fuckeliana B05.10] gi|150849076|gb|EDN24269.1| BC1G_04930 [Botryotinia fuckeliana B05.10]
  misc_feature (2)..(344): NCBI GI: 261352972 Blast Desc: conserved [Verticillium albo-atrum VaMs.102]
  misc_feature (1)..(331): NCBI GI: 164427361 Blast Desc: NCU03365 [Neurospora crassa OR74A] gi|157071711|gb|EAA27064.2| [Neurospora crassa OR74A]
  misc_feature (1)..(331): NCBI GI: 28881142 Blast Desc: conserved [Neurospora crassa]
  misc_feature (1)..(334): NCBI GI: 240106367 Blast Desc: HIT zinc finger family protein [Coccidioides posadasii C735 delta SOWgp]
  misc_feature: Useful for introducing or modulating the production of volatile compounds
MSDPLLTSLCSICRIQAPKYKCPRCAARTCSLACVKKHKTWSTCDGERDATVYRPREELKTDAGIDHDYNFLTKIEHSVERAHRILRNDRGIMPEESSEQPPPPKRARLGRGGRFNKGQSRGRTTLEEGDGIRKWDRAVVSRLKKLGIHVTSLPYGMSRSKANKTSFNRRTGTINWQVEWVLYEDQSSPQTTKVMAKALDKVSLHVALAEALESQRTHQLTEDELAEKKQASREQRPSRHAGQNYYSSAWSAAPCLKQSQTETFWSFSIDHDSANRYQFFYLKPKTPSREKPRLVPLEATDKLAEVLPGLDVVEFPTIYVFPATSSVGDGFVVERKDGWSKKRKAPTSTPLAGHESDSDVEEDGEIQEESSDETSSSGSDSEMSDEA

SEQ ID NO: 27924 - DNA, 1884 bp, Muscodor strobelii
  misc_feature: SGI EST ID NO. CUFF.65837.0
  misc_feature: Variant of the nucleotide sequence at SEQ ID NO 27922
gcctggaagactgccgtctgaaatcaattcaatattttgatcagaaatacatcatcaatcagaattcagatccaacaatcaccaagagttaaagcgagtaatcatatgcctccaagctgattggccatccgaggtgagagtacgtacatgtagctcatcccagcggcgatcttgatgactaagcctaattcgaatacatatcgataagaacactgaatttcaagatgctcatgatgatcctattgccttcgatagaaactgcctcactaccttagatttactcatgatgtctacttgaacccaatatcagttctctcttagacttacagccgaggcgcgcgctacaccaggccacccccgatcaccgctgatggcctagttggcctgcaatccgcggtccagcatgtcggatccattactgacatccctctgttccatctgccgtattcaagctcccaaatataagtgtccgagatgtgctgcgcggacgtgttctctcgcttgcgtgaagaagcacaagacgtggtcgacatgcgacggtgaacgcgatgcgacagtctatcgcccgcgggaggagcttaaaactgacgccggaatcgaccacgactacaacttcctcaccaagatcgagcattcggttgagcgcgcacatcgaatcttgcgaaatgacagaggtatcatgccagaggagagctccgaacagccaccgccacccaaaagagcgcgcctgggcaggggaggacgcttcaacaaaggccaaagccgaggaagaaccacacttgaggagggagacgggatacgaaaatgggatagggccgtcgtttcccgtttgaagaaactaggcatacatgtcacctctctgccctacggaatgtcacgttctaaggcgaataagacgagctttaaccgacgaacgggtacgatcaattggcaagtcgagtgggtgctgtacgaagaccagtccagtccgcagaccaccaaggtgatggctaaggctctcgataaagtctcactccacgttgctctcgctgaagctctggagtcgcaacgtacgcaccagctgacagaggacgagcttgctgagaagaagcaagccagccgagaacaaaggccctcaagacatgcgggccagaactactactcttctgcatggagtgctgcaccatgtctgaagcaaagtcaaacggagacgttctggagcttttccatcgaccacgacagcgcgaataggtaccagttcttctacttgaagccaaagacgccttcgagggagaagccgaggcttgtgccgcttgaggctacggacaagcttgcagaggtgctccctggacttgatgtcgtcgagttccctacgatatatgtttttcctgcgacgagtagtgttggagacggatttgtggtagaaaggaaagacggctggtccaaaaaacggaaggcgcctacctccacaccacttgcaggccatgaatccgattcggacgtcgaagaagatggcgaaatacaagaggaatcctctgatgagaccagcagctctggatccgattcggagatgtctgatgaggcgtgactactagctacctatgtatatacaatgatacccgtgctccgaatactgttccgaatactttctcgtatgcaatatacatcaatgcatagaatgaagatgtgtcaacaaacccaactaagcttgtgtgtttgtctcaacttgaggtagaacgacttgggcataaccgcttgaataatcacatgtatatcaaaacggcaaatctctagggtacacgaacggtaaaaatgcagctagcatcacaaaccaaatatcgatctattcatttcacttcctgggatagaaataatcgattgccaaacatcgcttgcctgcaacgc

SEQ ID NO: 27925 - DNA, 888 bp, Muscodor strobelii
  misc_feature: SGI cDNA ID NO. 569575
  misc_feature: Encodes the peptide sequence at SEQ ID NO 27926
atgccagaggagagctccgaacagccaccgccacccaaaagagcgcgcctgggcaggggaggacgcttcaacaaaggccaaagccgaggaagaaccacacttgaggagggagacgggatacgaaaatgggatagggccgtcgtttcccgtttgaagaaactaggcatacatgtcacctctctgccctacggaatgtcacgttctaaggcgaataagacgagctttaaccgacgaacgggtacgatcaattggcaagtcgagtgggtgctgtacgaagaccagtccagtccgcagaccaccaaggtgatggctaaggctctcgataaagtctcactccacgttgctctcgctgaagctctggagtcgcaacgtacgcaccagctgacagaggacgagcttgctgagaagaagcaagccagccgagaacaaaggccctcaagacatgcgggccagaactactactcttctgcatggagtgctgcaccatgtctgaagcaaagtcaaacggagacgttctggagcttttccatcgaccacgacagcgcgaataggtaccagttcttctacttgaagccaaagacgccttcgagggagaagccgaggcttgtgccgcttgaggctacggacaagcttgcagaggtgctccctggacttgatgtcgtcgagttccctacgatatatgtttttcctgcgacgagtagtgttggagacggatttgtggtagaaaggaaagacggctggtccaaaaaacggaaggcgcctacctccacaccacttgcaggccatgaatccgattcggacgtcgaagaagatggcgaaatacaagaggaatcctctgatgagaccagcagctctggatccgattcggagatgtctgatgaggcgtga

SEQ ID NO: 27926 - protein, 295 aa, Muscodor strobelii
  misc_feature: SGI Peptide ID NO. 569575
  misc_feature (18)..(263): NCBI GI: 256732536 Blast Desc: NECHADRAFT_78821 [Nectria haematococca mpVI 77-13-4]
  misc_feature (18)..(293): NCBI GI: 46121603 Blast Desc: FG05180.1 [Gibberella zeae PH-1]
  misc_feature (50)..(237): NCBI GI: 171688924 Blast Desc: protein product [Podospora anserina] gi|170944424|emb|CAP70535.1| protein product [Podospora anserina]
  misc_feature (40)..(241): NCBI GI: 116199935 Blast Desc: CHGG_08123 [Chaetomium globosum CBS 148.51] gi|88179402|gb|EAQ86870.1| CHGG_08123 [Chaetomium globosum CBS 148.51]
  misc_feature (35)..(239): NCBI GI: 28881142 Blast Desc: conserved [Neurospora crassa]
  misc_feature (35)..(239): NCBI GI: 164427361 Blast Desc: NCU03365 [Neurospora crassa OR74A] gi|157071711|gb|EAA27064.2| [Neurospora crassa OR74A]
  misc_feature (47)..(243): NCBI GI: 156046803 Blast Desc: SS1G_09485 [Sclerotinia sclerotiorum 1980] gi|154693880|gb|EDN93618.1| SS1G_09485 [Sclerotinia sclerotiorum 1980]
  misc_feature (51)..(243): NCBI GI: 154313974 Blast Desc: BC1G_04930 [Botryotinia fuckeliana B05.10] gi|150849076|gb|EDN24269.1| BC1G_04930 [Botryotinia fuckeliana B05.10]
  misc_feature (46)..(242): NCBI GI: 240106367 Blast Desc: HIT zinc finger family protein [Coccidioides posadasii C735 delta SOWgp]
  misc_feature (46)..(242): NCBI GI: 119191734 Blast Desc: CIMG_00244 [Coccidioides immitis RS]
MPEESSEQPPPPKRARLGRGGRFNKGQSRGRTTLEEGDGIRKWDRAVVSRLKKLGIHVTSLPYGMSRSKANKTSFNRRTGTINWQVEWVLYEDQSSPQTTKVMAKALDKVSLHVALAEALESQRTHQLTEDELAEKKQASREQRPSRHAGQNYYSSAWSAAPCLKQSQTETFWSFSIDHDSANRYQFFYLKPKTPSREKPRLVPLEATDKLAEVLPGLDVVEFPTIYVFPATSSVGDGFVVERKDGWSKKRKAPTSTPLAGHESDSDVEEDGEIQEESSDETSSSGSDSEMSDEA

SEQ ID NO: 27927 - DNA, 1884 bp, Muscodor strobelii; identical to SEQ ID NO: 27924
  misc_feature: SGI EST ID NO. CUFF.65837.0
  misc_feature: Variant of the nucleotide sequence at SEQ ID NO 27925

SEQ ID NO: 27928 - DNA, 1566 bp, Muscodor strobelii
  misc_feature: SGI cDNA ID NO. 569576
  misc_feature: Reduced expression when VOC is produced
  misc_feature: Encodes the peptide sequence at SEQ ID NO 27929
atgtctgaattccttggctcccggatatctctgatatccaagagcgacatccgttattccggtgttctccacgaaatcaacagtgaggaatcgacggtatcgcttgaaaatgtcaagtctttcggtaccgaaggccgacgcggcaaccccgccgacgaaatcgccccctcggaccagatctacgagtacatcgtcttccggggcagtgatgtgaaggacttgcgtatcgagcaggcccccgccgcgcccaaggagaaccagccgcccatgcccgacgaccctgccattgtcggtgctcgctcccgccctgctcctggtggtcaaggccctcctggcccgtccaaccaaggtcccccaggccctggccccgctggctttggtggccagaacgcctatcctcccaacttctaccccccgcctcccggtcaatggggacgcggtggccctccgcaaggcccaggcccaaaccagggcttcaacggaatgccctatcctcctccgcctggatggtttcctcctggccaaggcttcccgcccggtgctccaggtccctggaatcattttggctatcctcctggaccgcctggaccccatggtccacccggcgctcctggcgctcctccccagaacacggtcccgacgcctcagcaagagcagaagcccacacccatcggcgctggtgtcgacaagcagaagcccgtcggcagcacccctggcgcagaagaacccaagccatttgcacagctgcctaaaccggccgctgaagtagctccaacacctcctgtcgaatcgaagcccaccgctgccgaagtcaaagcaaccgccgagtcactcacagcaaagtctcccctccccaaatcgcaggcgaagaacgtccctaccggccctagaaataatcgcgtcacgcctgccgtgcctattcccacgactattctgcagaagtctgccccgcaagcttcggctgctgctgccactgtcaagctgggagagccgacaaatggcccgcctagcgctgctgccctcagggatgctactcaagctgcaaaggctgcggtagctgttgctatggcaaagctagataatccgaacgcggcggttggcccgtctgttcccgcgctagcaaatggcaatgctttggacaacctcacaaaaaaggtcaacgagatgagagtgaatgccactcgccccactgccggtcggggccgtggtcgcggcggacgctttccccagcagggcaaagtcgaggttcctgatgccgattttgatttccagacggctaatgccaaattcgacaagggggctctggcttcgcctggtgaaatttccaacggcgagatatctgagacgccagaacccgccgaagaccacgcctacaacaagaagaagtctttcttcgataacattggtagcgaagccaaggaccgtgccgacagtgcacaaaagcctgtgttggatggcggatatcgcggcggctatcgtggtcgtggccgaggtcgcggtcgtggcaacatgcgcgggcgcggtgtgccccgtggtggcttcccgcaacctccccttgcgcagtaa

SEQ ID NO: 27929 - protein, 521 aa, Muscodor strobelii
  misc_feature: SGI Peptide ID NO. 569576
  misc_feature (416)..(439): Pfam Id: PF09532 Pfam Desc: DFDF motif
  misc_feature (416)..(432): Pfam Id: PF09532 Pfam Desc: DFDF motif
  misc_feature (456)..(482): Pfam Id: PF09542 Pfam Desc: FFD and TFG box motifs
  misc_feature (1)..(501): NCBI GI: 28881143 Blast Desc: conserved [Neurospora crassa]
  misc_feature (1)..(501): NCBI GI: 85079189 Blast Desc: NCU03366 [Neurospora crassa OR74A] gi|28917359|gb|EAA27065.1| [Neurospora crassa OR74A]
  misc_feature (1)..(508): NCBI GI: 256729104 Blast Desc: NECHADRAFT_93315 [Nectria haematococca mpVI 77-13-4]
  misc_feature (1)..(501): NCBI GI: 121701513 Blast Desc: G2/M phase checkpoint control protein Sum2, [Aspergillus clavatus NRRL 1] gi|119397164|gb|EAW07595.1| G2/M phase checkpoint control protein Sum2, [Aspergillus clavatus NRRL
  misc_feature (1)..(501): NCBI GI: 119495478 Blast Desc: G2/M phase checkpoint control protein Sum2, [Neosartorya fischeri NRRL 181] gi|119412685|gb|EAW22626.1| G2/M phase checkpoint control protein Sum2, [Neosartorya fischeri NRRL
  misc_feature (1)..(495): NCBI GI: 115491791 Blast Desc: conserved [Aspergillus terreus NIH2624] gi|114197383|gb|EAU39083.1| conserved [Aspergillus terreus NIH2624]
  misc_feature (8)..(501): NCBI GI: 145239953 Blast Desc: An08g05060 [Aspergillus niger] gi|134077137|emb|CAK45478.1| protein product [Aspergillus niger]
  misc_feature (1)..(490): NCBI GI: 240276131 Blast Desc: G2/M phase checkpoint control protein Sum2 [Ajellomyces capsulatus H143]
  misc_feature (1)..(501): NCBI GI: 70995706 Blast Desc: G2/M phase checkpoint control protein Sum2 [Aspergillus fumigatus Af293] gi|19309417|emb|CAD27316.1| [Aspergillus fumigatus] gi|41581316|emb|CAE47965.1| , conserved
  misc_feature (1)..(490): NCBI GI: 225559998 Blast Desc: conserved [Ajellomyces capsulatus G186AR]
  misc_feature: Useful for introducing or modulating the production of volatile compounds
MSEFLGSRISLISKSDIRYSGVLHEINSEESTVSLENVKSFGTEGRRGNPADEIAPSDQIYEYIVFRGSDVKDLRIEQAPAAPKENQPPMPDDPAIVGARSRPAPGGQGPPGPSNQGPPGPGPAGFGGQNAYPPNFYPPPPGQWGRGGPPQGPGPNQGFNGMPYPPPPGWFPPGQGFPPGAPGPWNHFGYPPGPPGPHGPPGAPGAPPQNTVPTPQQEQKPTPIGAGVDKQKPVGSTPGAEEPKPFAQLPKPAAEVAPTPPVESKPTAAEVKATAESLTAKSPLPKSQAKNVPTGPRNNRVTPAVPIPTTILQKSAPQASAAAATVKLGEPTNGPPSAAALRDATQAAKAAVAVAMAKLDNPNAAVGPSVPALANGNALDNLTKKVNEMRVNATRPTAGRGRGRGGRFPQQGKVEVPDADFDFQTANAKFDKGALASPGEISNGEISETPEPAEDHAYNKKKSFFDNIGSEAKDRADSAQKPVLDGGYRGGYRGRGRGRGRGNMRGRGVPRGGFPQPPLAQ

SEQ ID NO: 27930 - DNA, 2822 bp, Muscodor strobelii
  misc_feature: SGI EST ID NO. CUFF.66155.1
  misc_feature: Variant of the nucleotide sequence at SEQ ID NO 27928
cggggaggcctgacctaaacttatatagtgcgtaggtgagcttagtgccttcggaaatagctttgtggatggatacatatacctagcaggcgaagcaaacgtttgtgccttccatacctcttattcgcaattttcagcctttcgcgccccaatcttccccaacctctcaccttcaaccttggccatcccacccacatcccgcatctttccaacactcgcatgcttcttccttcgtagcattggttggtgtttgcacctcgttcttccgcagctgcaaccaacacttttcgccccctcattcctttctttccatcataattcacatacccctcgcgctataagcgcacactttactagtcatgtctgaattccttggctcccggatatctctgatatccaagagcgacatccgttattccggtgttctccacgaaatcaacagtgaggaatcgacggtatcgcttgaaaatgtcaagtctttcggtaccgaaggccgacgcggcaaccccgccgacgaaatcgccccctcggaccagatctacgagtacatcgtcttccggggcagtgatgtgaaggacttgcgtatcgagcaggcccccgccgcgcccaaggagaaccagccgcccatgcccgacgaccctgccattgtcggtgtaagttgctcctgcttttgtcccttacaatatcctatatgacgaaacatttcggatgtaaaccattgtctttactgaaaagcgcaaaaaccccgtgttgatatttccgttgccttccttctgatcaaattggatccaaagccttgcttgattacgtgcaacactacgcctcgtcagcttgctaacagtccatttccccatctctaggctcgctcccgccctgctcctggtggtcaaggccctcctggcccgtccaaccaaggtcccccaggccctggccccgctggctttggtggccagaacgcctatcctcccaacttctaccccccgcctcccggtcaatggggacgcggtggccctccgcaaggcccaggcccaaaccagggcttcaacggaatgccctatcctcctccgcctggatggtttcctcctggccaaggcttcccgcccggtgctccaggtccctggaatcattttggctatcctcctggaccgcctggaccccatggtccacccggcgctcctggcgctcctccccagaacacggtcccgacgcctcagcaagagcagaagcccacacccatcggcgctggtgtcgacaagcagaagcccgtcggcagcacccctggcgcagaagaacccaagccatttgcacagctgcctaaaccggccgctgaagtagctccaacacctcctgtcgaatcgaagcccaccgctgccgaagtcaaagcaaccgccgagtcactcacagcaaagtctcccctccccaaatcgcaggcgaagaacgtccctaccggccctagaaataatcgcgtcacgcctgccgtgcctattcccacgactattctgcagaagtctgccccgcaagcttcggctgctgctgccactgtcaagctgggagagccgacaaatggcccgcctagcgctgctgccctcagggatgctactcaagctgcaaaggctgcggtagctgttgctatggcaaagctagataatccgaacgcggcggttggcccgtctgttcccgcgctagcaaatggcaatgctttggacaacctcacaaaaaaggtcaacgagatgagagtgaatgccactcgccccactgccggtcggggccgtggtcgcggcggacgctttccccagcagggcaaagtcgaggttcctgatgccgattttgatttccagacggctaatgccaaattcgacaagggggctctggcttcgcctggtgaaatttccaacggcgagatatctgagacgccagaacccgccgaagaccacgcctacaacaagaagaagtctttcttcgataacattggtagcgaagccaaggaccgtgccgacagtgcacaaaagcctggtggacgggagtggcgaggcgaagaacaacgcaagaatatggagacattcggccaaggcagtgttggatggcggatatcgcggcggctatcgtggtcgtggccgaggtcgcggtcgtggcaacatgcgcgggcgcggtgtgccccgtggtggcttcccgcaacctccccttgcgcagtaaactccctatctcccaaagacatccgtctcatatcggcacccgtcttgtccttgatttgggtcgtggttgacgagcatcttcgttcgaaaataccccgactatcttcatctgcgtacttgcaataattgtacagtgtatgagtatcacggcttcacaaatcatttttccttattttcgcggttcggagtcggttgtcgagcgagcggtatcttgcagcacttgaatgctggatcatgaggctcacatgtggcaaaaagaaattggcgtggtattcatttgcgccggcgttagatacccacttctctggcatgagttcgtggactgatcatcataaggaagccctgaatattcgatactcaggaacgagggagcccggttcggctctaggaaggatagtatcaggttgatgaagaagctcattcgattttgcgacgaatgctagcagatgagaagatgagaaacggatctaggtgataatcgatgcacagaaaacggaatgaaactacaataatgaagtgaggcttgaattcttgtctgcaggcgtcatatagttcaagcaggtcaacgaagataccgatcagatcgtatcatgaactatgctctcaatataagattcaatttgcctacaa

SEQ ID NO: 27931 - DNA, 897 bp, Muscodor strobelii
  misc_feature: SGI cDNA ID NO. 569577
  misc_feature: Encodes the peptide sequence at SEQ ID NO 27932
atggcatcagcaaagccgaagttccctatcccgcgtaccgctaatgccgaagagagataccagaaattgtacacccgcgcgaccagcttagtcgattacttcgtccagcaagatgtcttccagttcgtgcgaacatttcaagaggacgtcggcggtgtactattgatgaacgagtacgacaggaacaccggcttggaaaaaagaaagattgtactcaaacatgagattaaaagggcaggcgaggccactggtaggcttagagatgagtattatagacttaaggagctgaggaccgcaatgcatatttgtcaacttattgagttcaaaaatctgttgggcgatggcagaggcaaaaggattcgaagaagcctggataaagtcaagaacgtgattaagggggcgaagacgagactcacatggagcaagaaaggtgcatcacagtcaagttcggggagttcggggagtccagggggttcaggaggtggaagtaatggaaatggaggagatgatgacggcggtggaggtggagagggttcaggcagtggcttgcgcggaggtgccggcagtagcggaaacgaaaatgaaagcggaagcagtggaagcgggagtggaagtggaagcgggagtggaagtggaagcgggagtggaagcagtgaaagttttgaaggcattagtttcatcaatgatgatcgggcacagtacgatgttgaggtcgtcgacccagccaatgacggattccccaacgttctacccactggacaaaccttcattctcatggaatatatcagcggtccgacattaggagctctcatggagcaaaggaaaagagataatattcccttcactgaggatgaaatatggagctatttcttgtgctgtacgttgattctcacttag

SEQ ID NO: 27932 - protein, 298 aa, Muscodor strobelii
  misc_feature: SGI Peptide ID NO. 569577
MASAKPKFPIPRTANAEERYQKLYTRATSLVDYFVQQDVFQFVRTFQEDVGGVLLMNEYDRNTGLEKRKIVLKHEIKRAGEATGRLRDEYYRLKELRTAMHICQLIEFKNLLGDGRGKRIRRSLDKVKNVIKGAKTRLTWSKKGASQSSSGSSGSPGGSGGGSNGNGGDDDGGGGGEGSGSGLRGGAGSSGNENESGSSGSGSGSGSGSGSGSGSGSSESFEGISFINDDRAQYDVEVVDPANDGFPNVLPTGQTFILMEYISGPTLGALMEQRKRDNIPFTEDEIWSYFLCCTLILT

SEQ ID NO: 27933 - DNA, 159 bp, Muscodor strobelii
  misc_feature: SGI EST ID NO. CUFF.65828.0
  misc_feature: Variant of the nucleotide sequence at SEQ ID NO 27931
ggacaatctgttcaatctctaattttctggaagaatggtaggtagccagtggctcattggtcctggtatctatgcccttcctcaacgacttcgataacgagcacgcccatatgtcgcaggaagacaatggcatcagcaaagccgaagttccctatcccg

SEQ ID NO: 27934 - DNA, 2067 bp, Muscodor strobelii
  misc_feature: SGI cDNA ID NO. 569578
  misc_feature: Encodes the peptide sequence at SEQ ID NO 27935
atgtctcaaccgcagcccggcatggccccgaggcagttctctcctccccagggctcaccctcgcccaccaacaccacgccctacggcatgccgcccaacaagcgagccaagctctctccgcaggcgcccatccatcctgtctctccctaccagagcagccaaacccacgcctacgccggcagcccgtctactttgactcctggcccgcccacacccaccgctggcttgccatcgcccgtcactcaagcccccaacatgcccaacccaccccaggctccgcacaatgcctacacgatgtcgcatcagcaggccaacggtcgttcgccctccgtcggacaggcacacataccacaagtatcacataatgcccatagcggccagcacgtcgctcaacatcccacacaacacgcgagccaacctccgcattcgaattacacgtcgcatgcgcctgttgcgctgcagccggctcctccctctcaccagactcaaccctaccagagtccatcgcaccctcccacgcccatcacgaatcagcctcccgcccaatactccaatgcgactctgatgcccaacaatctgcctggagccggcaatatggggccgcccatgctataccccggcgactcgagacagaaccagaagccgcctcccaagacctcgtcgtacgatgtcaacgacatgctcgtgggcactggcatcgatctcgacgaagagttcgaatttcagaatgatccggatgcattgcggaggtctgtctaccctccccagggcagggacagcttctacggcgccggtcccgccaaccagccggctgaggacgtgaacgggatatcacaagatgcgtacgcggctcgacgagcagacgaaatttgggaaagggcggcacacgatcttgcagtcgtccggcaacaggaagtgagactaaacttcattgctcctggtgcgctgcacaaacgcatggccgaaactgcccagaagcacggccttggtctcaacaccgatctgaagcctgatgggaagagtctctacatgggcaagttcgtcccggccgctgatttccccaagcccgagatcaagatggtgaccaagaatgggccggacggtaaaattgttcagacgctcggttctttcatccccaaggaaagtttcctcgtggatcaaattgcgtttctctcgatagcagcgagagagcatatcaaagatctactgatagacgccaatgatgtcgccatatcccggcagacgagctcgcacggttttgttccctctgagtggatggatgtcgccgatgtaccagctcccaaagtcaatggctcaacaggcgaggatcaacgaacaggagcggaaagtgcagttagccctcgggctaatccgctcaagcgatcgtcggatcaaattagtagcggcaatccgcctgcgtcaggtacccctgacatcggcccaaaccatctcgttgactcagtggttggtgccggtaaacaagcacaagacggtgaagagggccgtctgaaaaagcggcaaaagaaaggcgaaaagggaacagacaaagagaaggagggaggcgaggccggttcccgaagcgcatccatcgcccctggcacccctggtggcctagagggtggcgaaacaaaatccatgaccaaaaaggagggtaaaaaggcggcagccaaggcggcagagaatgcaagcagtactaccgtgaacactactctcagcttgttcacaggtggaaagaagaagaaatattcatggatgacatctggagctgatgccggtagtggagcgagcacgcctaagggcccgggaaagccaggaattggcggatcaggagccgtcggcgcaaagactgctcgcggccctttgacaaaaccaagcgtttcgcatctcggacagtttcgagaggacggtgagaagggcaagaatattcagcttcgcgattgggttatcatccttgaagatcgcaaaaccgatccttacgtacttcaggccgcatacgatcggcttgataaatccgacactggcgacagagtggtccggccatcagacaacactcaacaggctgcatag

SEQ ID NO: 27935 - protein, 688 aa, Muscodor strobelii
  misc_feature: SGI Peptide ID NO. 569578
  misc_feature (182)..(676): NCBI GI: 116200033 Blast Desc: CHGG_08172 [Chaetomium globosum CBS 148.51] gi|88179451|gb|EAQ86919.1| CHGG_08172 [Chaetomium globosum CBS 148.51]
  misc_feature (11)..(672): NCBI GI: 256734635 Blast Desc: [Nectria haematococca mpVI 77-13-4]
  misc_feature (183)..(671): NCBI GI: 171689888 Blast Desc: protein product [Podospora anserina] gi|170944906|emb|CAP71017.1| protein product [Podospora anserina]
  misc_feature (1)..(671): NCBI GI: 39952325 Blast Desc: MGG_01805 [Magnaporthe grisea 70-15] gi|145020336|gb|EDK04465.1| MGG_01805 [Magnaporthe grisea 70-15]
  misc_feature (87)..(669): NCBI GI: 154322619 Blast Desc: BC1G_00652 [Botryotinia fuckeliana B05.10] gi|150847986|gb|EDN23179.1| BC1G_00652 [Botryotinia fuckeliana B05.10]
  misc_feature (197)..(670): NCBI GI: 156064887 Blast Desc: SS1G_00453 [Sclerotinia sclerotiorum 1980] gi|154691313|gb|EDN91051.1| SS1G_00453 [Sclerotinia sclerotiorum 1980]
  misc_feature (183)..(672): NCBI GI: 46107874 Blast Desc: FG00820.1 [Gibberella zeae PH-1]
  misc_feature (199)..(670): NCBI GI: 85079523 Blast Desc: NCU03480 [Neurospora crassa OR74A] gi|18376070|emb|CAD21098.1| related to tpa inducible protein [Neurospora crassa] gi|28917430|gb|EAA27133.1| [Neurospora crassa
  misc_feature (251)..(671): NCBI GI: 261356742 Blast Desc: conserved [Verticillium albo-atrum VaMs.102]
  misc_feature (254)..(675): NCBI GI: 145230251 Blast Desc: An01g10150 [Aspergillus niger] gi|134055551|emb|CAK37197.1| protein product [Aspergillus niger]
MSQPQPGMAPRQFSPPQGSPSPTNTTPYGMPPNKRAKLSPQAPIHPVSPYQSSQTHAYAGSPSTLTPGPPTPTAGLPSPVTQAPNMPNPPQAPHNAYTMSHQQANGRSPSVGQAHIPQVSHNAHSGQHVAQHPTQHASQPPHSNYTSHAPVALQPAPPSHQTQPYQSPSHPPTPITNQPPAQYSNATLMPNNLPGAGNMGPPMLYPGDSRQNQKPPPKTSSYDVNDMLVGTGIDLDEEFEFQNDPDALRRSVYPPQGRDSFYGAGPANQPAEDVNGISQDAYAARRADEIWERAAHDLAVVRQQEVRLNFIAPGALHKRMAETAQKHGLGLNTDLKPDGKSLYMGKFVPAADFPKPEIKMVTKNGPDGKIVQTLGSFIPKESFLVDQIAFLSIAAREHIKDLLIDANDVAISRQTSSHGFVPSEWMDVADVPAPKVNGSTGEDQRTGAESAVSPRANPLKRSSDQISSGNPPASGTPDIGPNHLVDSVVGAGKQAQDGEEGRLKKRQKKGEKGTDKEKEGGEAGSRSASIAPGTPGGLEGGETKSMTKKEGKKAAAKAAENASSTTVNTTLSLFTGGKKKKYSWMTSGADAGSGASTPKGPGKPGIGGSGAVGAKTARGPLTKPSVSHLGQFREDGEKGKNIQLRDWVIILEDRKTDPYVLQAAYDRLDKSDTGDRVVRPSDNTQQAA

SEQ ID NO: 27936 - DNA, 3728 bp, Muscodor strobelii
  misc_feature: SGI EST ID NO. CUFF.65851.0
  misc_feature: Variant of the nucleotide sequence at SEQ ID NO 27934
ggaggctcttgcaattgaagcgcgatagggcccgtgcaccagtgacaccaaagatttccagttggggggagctgtcccgagagcgactgcagaggtccagcaaagcaggagcgactcctcacattaaatagcttcttcatcacccacgacctgccaccgcatcccgtcggcctgcgcgacctctgctgcggacactgccgcgactgcctcacctccagattaattatttacggccagcgtaggagacccagtctcatgtctagattgcgacgacagctcaacacgtaggctgatcgttgtcgacggatgggtgtgaccgagtgcagagcgacaggctttgcgcctgccttggtgtggtgaatgactgcggctccgcaacctgcatcaacagcctaaggaaggcaccatcgattgtaggccttgcgcacctgcccagctagagtctctttcctgcagccaccgacacgcaagtctctgtcgctttcttcgccttcctcccaccgaacgtgaacatccattctccgtgtcccgtctgtcaacgaactctcgatcgcacccgcaacgttcttgacgtttaaccgcgcgcttgccaacaaaacagcagccatcacatcgtgcagcgattgccgacgccgataccgactctgacaagcacgacgacacaactgcactccagcgacatcgccatcgccatcgccatcgccatcgtaacggccgtcgccatgtctcaaccgcagcccggcatggccccgaggcagttctctcctccccagggctcaccctcgcccaccaacaccacgccctacggcatgccgcccaacaagcgagccaagctctctccgcaggcgcccatccatcctgtctctccctaccagagcagccaaacccacgcctacgccggcagcccgtctactttgactcctggcccgcccacacccaccgctggcttgccatcgcccgtcactcaagcccccaacatgcccaacccaccccaggctccgcacaatgcctacacgatgtcgcatcagcaggccaacggtcgttcgccctccgtcggacaggcacacataccacaagtatcacataatgcccatagcggccagcacgtcgctcaacatcccacacaacacgcgagccaacctccgcattcgaattacacgtcgcatgcgcctgttgcgctgcagccggctcctccctctcaccagactcaaccctaccagagtccatcgcaccctcccacgcccatcacgaatcagcctcccgcccaatactccaatgcgactctgatgcccaacaatctgcctggagccggcaatatggggccgcccatgctataccccggcgactcgagacagaaccagaagccgcctcccaagacctcgtcgtacgatgtcaacgacatgctcgtgggcactggcatcgatctcgacgaagagttcgaatttcagaatgatccggatgcattgcggaggtctgtctaccctccccagggcagggacagcttctacggcgccggtcccgccaaccagccggctgaggacgtgaacgggatatcacaagatgcgtacgcggctcgacgagcagacgaaatttgggaaagggcggcacacgatcttgcagtcgtccggcaacaggaagtgagactaaacttcattgctcctggtgcgctgcacaaacgcatggccgaaactgcccagaagcacggccttggtctcaacaccgatctgaagcctgatgggaagagtctctacatgggcaagttcgtcccggccgctgatttccccaagcccgagatcaagatggtgaccaagaatgggccggacggtaaaattgttcagacgctcggttctttcatccccaaggaaagtttcctcgtggatcaaattgcgtttctctcgatagcagcgagagagcatatcaaagatctactgatagacgccaatgatgtcgccatatcccggcagacgagctcgcacggttttgttccctctgagtggatggatgtcgccgatgtaccagctcccaaagtcaatggctcaacaggcgaggatcaacgaacaggagcggaaagtgcagttagccctcgggctaatccgctcaagcgatcgtcggatcaaattagtagcggcaatccgcctgcgtcaggtacccctgacatcggcccaaaccatctcgttgactcagtggttggtgccggtaaacaagcacaagacggtgaagagggccgtctgaaaaagcggcaaaagaaaggcgaaaagggaacagacaaagagaaggagggaggcgaggccggttcccgaagcgcatccatcgcccctggcacccctggtggcctagagggtggcgaaacaaaatccatgaccaaaaaggagggtaaaaaggcggcagccaaggcggcagagaatgcaagcagtactaccgtgaacactactctcagcttgttcacaggtggaaagaagaagaaatattcatggatgacatctggagctgatgccggtagtggagcgagcacgcctaagggcccgggaaagccaggaattggcggatcaggagccgtcggcgcaaagactgctcgcggccctttgacaaaaccaagcgtttcgcatctcggacagtttcgagaggacggtgagaagggcaagaatattcagcttcgcgattgggttatcatccttgaagatcgcaaaaccgatccttacgtacttcaggccgcatacgatcggcttgataaatccgacactggcgacagagtggtccggccatcagacaacactcaacaggctgcatagtctgggccactttgctctggggccaatccgcaaatggctcggaatgcgcaaagtattcgacaacgacgacgaagttagacgtctgacagaaccgcacatacatcaccatgacgagcagacggagtaccaggaagactccgttgatggaattgagaatgtgagtagtggcgttggtcctaccaatttccgcggctctgctcttggcctgtttgataaatcctatatttcctgcccgacgtcacgcccgcgaatcattgccctccgccattgcagagagtttgaagacgaagcttctcgaactggttgccggttccttcgccggaactgagaatgcagatagtgatattgggtcgactatcatcagtcattctgtctttattagcccagtttgtcagctcctcgaactggttgccggttccttcgccggaactgagaatgcagatagtgatattggatcgactatcatcagtcattctgtctttattagcccagttcgtcagctcctcgtctccatttcccaaacgcttctccaagtttgacggccgaacatgttttcgcaacatctccatcaacacctaaaattgtatgaatactttactttgctttccccagccaggcgttatcatcagagggcatggaggcattgttttgctgtctcgtgtacagcgggttgttttcacatcttcgagaacctttgaagagtctgcgcagtcgagagtggaaactcatccggagactgcttatggtttgtctcgcaggaaagtccgcaaaagggttttgtttttgggtaccacggggctagtggtggcattgagccggggataccgttataccaagctcagcgcccaggcaaagcgattgccttttcttctcagatagacgtgaaggataagaaacttagcaaatactaaacaaaagaacaaaatcatataccttgat

SEQ ID NO: 27937 - DNA, 2508 bp, Muscodor strobelii
  misc_feature: SGI cDNA ID NO. 569579
  misc_feature: Reduced expression when VOC is produced
  misc_feature: Encodes the peptide sequence at SEQ ID NO 27938
atggcgtcgaagcgcaaagcatcggccctggcggccactgtcacagacgaggctgttgacccggctgacgaacttatgttcctatgcttgggtggtggcaacgaggtcggtcggtcttgccacatcattcagtacaaaggaaagacggtcatgctcgatgctggtcaacacccggcatatgatggcctcgcctcccttcccttcttcgacgactttgacctaagcacggtagatgttctcttgatcagccactttcacatcgatcatgccgcatcattgccctatgtcttggccaaaaccaatttcaggggtagggtcttcatgacccatcctaccaaagctatctacaagtggttgatccaagatagtgtcagagtcggcaacacctcgtcgcacccgacgtcacagcccgtgtacaccgagcaagaccacctcaacacatttccccagatcgaggcaattgactaccacactacccataccatctcctccattcgtatcaccccctatcctgctggccacgtgctgggtgctgctatgtttctcatcgagatcgccggtctgaacatcttcttcaccggcgactactccagagagcaagatcgacatttgatttccgcggaggtgcctcggggagtcaaaattgatgtgctaattacagagtcgacgtacggcgtatccacacatgttccccgccttgagcgagagcaagctcttatgaagtcggtcaccaacatcttgaatcgtggcggccgcgtactcatgcctgtctttgcgctgggccgagctcaagagctgctgctgatccttgacgaatactggggtagacatgccgaataccagaaaatccccatttactacgcgagcaatcttgcacgtaaatgtatggtcgtataccagacttacgtcggcgcaatgaatgataatattaaacgcctcttccgagagcgcatggccgaggccgaggccgccggtgaagggggagctaaaggtggcccttgggatttcaagtatatcagatctcttaaaagtctggatagattcgatgatgttggtggatgcgttatgctggcgagtcctggtatgttacagagtggagttagccgagagctgttagagaggtgggcaccgagcgagaagaacggtgtcattattaccggttatagtgttgaaggaacgatggcaaagtatatcgttcaagaaccagaccagatacaagccgttatgtcccgcagtaccaatgccatcagaagggcaccaggcgcggagaacgagaaggtcatgataccccggaggtgcagcgtagcagagtactcctttgccgcccatgttgatgggacagaaaacaaggacttcatcgaagaagttggcgctcccgttgtgatcttggtgcacggagagcagcacaacatgatgcgattgaagtccaaacttctctccttgaacgcccagaaagccgagaaagtcaaagtctacagcccccggaactgtgacgaacttcgaattccgttcaaaaccgacaaggtggcaaaagttgtgggcaagctggcatcaataccccctccaagacaattgccgtcgccagactctgaaccggagcttattacaggcgttattgttcagaacgacttcaagatgtctttgatggacccggaggacctgcgagagtatgccggtctcacaacctccacgatcgcctgtcggcagaaatttgcactcagtgctgcgggggtcgatctgattaaatgggccctggagagtacgttcggaagtatcgaagagctaccagagactagcggattgaagaccagtgacagcacatctaatggcaatggcgagcagaatgatgctgatgaggaggtgtctcgtgttgttgccgcttacttagtcatgggctgcgtctccgttcgctgtcaaagcaatggagaggtagagttggagtgggagggcaacatgctcaatgacggaattgctgatgccgtcatgtcggtcctcctatccactgagagcagcccggccgctgtcaaacagtccgcaagcaagcactctcattcccacggccacgaccacgagctcccggcacgtaatccacatgccaacctaacccctcaagaacgattggagcgactcttcctctttcttgaggcgcaattcggcgccgatgccgttgcgccggtagctacgcccaagctccctcccttaccgcgagataagaaggtgaagaagtctactggagaagatggtgccgactcggatgcgtctatggagctatcagacgatggagaagaggaagaacgacttcttgaacaacgccagaagacggagatagagaggctccataaaattggcatccctgtgcctggcattacgatcaaggtggataagatgctggccacagtttggctggaagaccttgaggttgagtgcactcaaaaggtatttggggacagggtcaaggcggtgatcgaacgggcagttgaaattactgcgccgctttggtcgcaatga

SEQ ID NO: 27938 - protein, 835 aa, Muscodor strobelii
  misc_feature: SGI Peptide ID NO. 569579
  misc_feature (427)..(469): Pfam Id: PF07521 Pfam Desc: RNA-metabolising metallo-beta-lactamase
  misc_feature (37)..(229): Pfam Id: PF00753 Pfam Desc: Metallo-beta-lactamase superfamily
  misc_feature (1)..(833): NCBI GI: 171689890 Blast Desc: protein product [Podospora anserina] gi|170944907|emb|CAP71018.1| protein product [Podospora anserina]
  misc_feature (1)..(833): NCBI GI: 116200035 Blast Desc: CHGG_08173 [Chaetomium globosum CBS 148.51] gi|88179452|gb|EAQ86920.1| CHGG_08173 [Chaetomium globosum CBS 148.51]
  misc_feature (1)..(833): NCBI GI: 46107872 Blast Desc: FG00819.1 [Gibberella zeae PH-1] gi|110283025|sp|Q4IPN9.1|YSH1_GIBZE RecName: Full=Endoribonuclease YSH1; AltName: Full=mRNA 3'-end-processing
  misc_feature (1)..(833): NCBI GI: 85079519 Blast Desc: NCU03479 [Neurospora crassa OR74A] gi|74630409|sp|Q8WZS6.1|YSH1_NEUCR RecName: Full=Endoribonuclease ysh-1; AltName: Full=mRNA 3'-end-processing protein ysh-1 related
  misc_feature (1)..(833): NCBI GI: 156064885 Blast Desc: conserved [Sclerotinia sclerotiorum 1980] gi|154691312|gb|EDN91050.1| conserved [Sclerotinia sclerotiorum 1980]
  misc_feature (1)..(833): NCBI GI: 154322621 Blast Desc: BC1G_00653 [Botryotinia fuckeliana B05.10] gi|150847987|gb|EDN23180.1| BC1G_00653 [Botryotinia fuckeliana B05.10]
  misc_feature (1)..(835): NCBI GI: 115397403 Blast Desc: conserved [Aspergillus terreus NIH2624] gi|114192484|gb|EAU34184.1| conserved [Aspergillus terreus NIH2624]
  misc_feature (1)..(835): NCBI GI: 70996586 Blast Desc: cleavage and polyadenylation specifity factor, 73 kDa subunit, [Aspergillus fumigatus Af293] gi|74672067|sp|Q4WRC2.1|YSH1_ASPFU RecName: Full=Endoribonuclease
  misc_feature (1)..(833): NCBI GI: 121700651 Blast Desc: cleavage and polyadenylation specifity factor, 73 kDa subunit, [Aspergillus clavatus NRRL 1] gi|119396733|gb|EAW07164.1| cleavage and polyadenylation factor,
  misc_feature (80)..(833): NCBI GI: 145613207 Blast Desc: MGG_01804 [Magnaporthe grisea 70-15] gi|145020337|gb|EDK04466.1| MGG_01804 [Magnaporthe grisea 70-15]
  misc_feature: Useful for introducing or modulating the production of volatile compounds
MASKRKASALAATVTDEAVDPADELMFLCLGGGNEVGRSCHIIQYKGKTVMLDAGQHPAYDGLASLPFFDDFDLSTVDVLLISHFHIDHAASLPYVLAKTNFRGRVFMTHPTKAIYKWLIQDSVRVGNTSSHPTSQPVYTEQDHLNTFPQIEAIDYHTTHTISSIRITPYPAGHVLGAAMFLIEIAGLNIFFTGDYSREQDRHLISAEVPRGVKIDVLITESTYGVSTHVPRLEREQALMKSVTNILNRGGRVLMPVFALGRAQELLLILDEYWGRHAEYQKIPIYYASNLARKCMVVYQTYVGAMNDNIKRLFRERMAEAEAAGEGGAKGGPWDFKYIRSLKSLDRFDDVGGCVMLASPGMLQSGVSRELLERWAPSEKNGVIITGYSVEGTMAKYIVQEPDQIQAVMSRSTNAIRRAPGAENEKVMIPRRCSVAEYSFAAHVDGTENKDFIEEVGAPVVILVHGEQHNMMRLKSKLLSLNAQKAEKVKVYSPRNCDELRIPFKTDKVAKVVGKLASIPPPRQLPSPDSEPELITGVIVQNDFKMSLMDPEDLREYAGLTTSTIACRQKFALSAAGVDLIKWALESTFGSIEELPETSGLKTSDSTSNGNGEQNDADEEVSRVVAAYLVMGCVSVRCQSNGEVELEWEGNMLNDGIADAVMSVLLSTESSPAAVKQSASKHSHSHGHDHELPARNPHANLTPQERLERLFLFLEAQFGADAVAPVATPKLPPLPRDKKVKKSTGEDGADSDASMELSDDGEEEERLLEQRQKTEIERLHKIGIPVPGITIKVDKMLATVWLEDLEVECTQKVFGDRVKAVIERAVEITAPLWSQ

SEQ ID NO: 27939 - DNA, 3093 bp, Muscodor strobelii
  misc_feature: SGI EST ID NO. CUFF.65907.1
  misc_feature: Variant of the nucleotide sequence at SEQ ID NO 27937
caggcgtgcatcaccgtgtctcagctctgagacctgccatcaactgctcctttttcaaagtgcatcccttggggctcgctgtgattccctcatgattgattcgtttctcaattacccggactgactgccttctttgttagagctagttgatttgtagtggtttgcagcaggttctggactccctgcgcgcaacaccacacaatgcacaaggtgattcaacgacccaactgcctgtgatcgaacgacgctctccgccgccctcgacttttgatcccttgacgtcacctctctccagtcatcgccatcctcgtctgcgaccacttcgctatcagatttctgtatgagatagtatacgaaacaatggcgtcgaagcgcaaagcatcggccctggcggccactgtcacagacgaggctgttgacccggctgacgaacttatgttcctatgcttgggtggtggcaacgaggtcggtcggtcttgccacatcattcagtacaaaggaaagacggtcatgctcgatgctggtcaacacccggcatatgatggcctcgcctcccttcccttcttcgacgactttgacctaagcacggtagatgttctcttgatcagccactttcacatcgatcatgccgcatcattgccctatgtcttggccaaaaccaatttcaggggtagggtcttcatgacccatcctaccaaagctatctacaagtggttgatccaagatagtgtcagagtcggcaacacctcgtcgcacccgacgtcacagcccgtgtacaccgagcaagaccacctcaacacatttccccagatcgaggcaattgactaccacactacccataccatctcctccattcgtatcaccccctatcctgctggccacgtgctgggtgctgctatgtttctcatcgagatcgccggtctgaacatcttcttcaccggcgactactccagagagcaagatcgacatttgatttccgcggaggtgcctcggggagtcaaaattgatgtgctaattacagagtcgacgtacggcgtatccacacatgttccccgccttgagcgagagcaagctcttatgaagtcggtcaccaacatcttgaatcgtggcggccgcgtactcatgcctgtctttgcgctgggccgagctcaagagctgctgctgatccttgacgaatactggggtagacatgccgaataccagaaaatccccatttactacgcgagcaatcttgcacgtaaatgtatggtcgtataccagacttacgtcggcgcaatgaatgataatattaaacgcctcttccgagagcgcatggccgaggccgaggccgccggtgaagggggagctaaaggtggcccttgggatttcaagtatatcagatctcttaaaagtctggatagattcgatgatgttggtggatgcgttatgctggcgagtcctggtatgttacagagtggagttagccgagagctgttagagaggtgggcaccgagcgagaagaacggtgtcattattaccggttatagtgttgaaggaacgatggcaaagtatatcgttcaagaaccagaccagatacaagccgttatgtcccgcagtaccaatgccatcagaagggcaccaggcgcggagaacgagaaggtcatgataccccggaggtgcagcgtagcagagtactcctttgccgcccatgttgatgggacagaaaacaaggacttcatcgaagaagttggcgctcccgttgtgatcttggtgcacggagagcagcacaacatgatgcgattgaagtccaaacttctctccttgaacgcccagaaagccgagaaagtcaaagtctacagcccccggaactgtgacgaacttcgaattccgttcaaaaccgacaaggtggcaaaagttgtgggcaagctggcatcaataccccctccaagacaattgccgtcgccagactctgaaccggagcttattacaggcgttattgttcagaacgacttcaagatgtctttgatggacccggaggacctgcgagagtatgccggtctcacaacctccacgatcgcctgtcggcagaaatttgcactcagtgctgcgggggtcgatctgattaaatgggccctggagagtacgttcggaagtatcgaagagctaccagagactagcggattgaagaccagtgacagcacatctaatggcaatggcgagcagaatgatgctgatgaggaggtgtctcgtgttgttgccgcttacttagtcatgggctgcgtctccgttcgctgtcaaagcaatggagaggtagagttggagtgggagggcaacatgctcaatgacggaattgctgatgccgtcatgtcggtcctcctatccactgagagcagcccggccgctgtcaaacagtccgcaagcaagcactctcattcccacggccacgaccacgagctcccggcacgtaatccacatgccaacctaacccctcaagaacgattggagcgactcttcctctttcttgaggcgcaattcggcgccgatgccgttgcgccggtagctacgcccaagctccctcccttaccgcgagataagaaggtgaagaagtctactggagaagatggtgccgactcggatgcgtctatggagctatcagacgatggagaagaggaagaacgacttcttgaacaacgccagaagacggagatagagaggctccataaaattggcatccctgtgcctggcattacgatcaaggtggataagatgctggccacagtttggctggaagaccttgaggttgagtgcactcaaaaggtatttggggacagggtcaaggcggtgatcgaacgggcagttgaaattactgcgccgctttggtcgcaatgattctaaatatatgtgtattactactaatcctatgaaaatgtggtgatccctaggtatatcgtcgaagcatgtgggcatgttaggattttcaaccaacttgacagttgaagaggaaggcgctttagaatagccttatcttgtaaagaggcaagaaaaatcaaagaaattctctattgaaatcaagtcttgtctgcttcaccgtgtcagcctctaagcaaaaacaaa

SEQ ID NO: 27940 - DNA, 2250 bp, Muscodor strobelii
  misc_feature: SGI cDNA ID NO. 569580
  misc_feature: Encodes the peptide sequence at SEQ ID NO 27941
atgggggctaacaaagtgaatcgcagctccgactcgagcagtggaggcgcccctctgcactcgtcctttccacaagagacgagttgcccgaagcaggacgctacctctccagaggacgagcagacactgctgcgtgcctccacagacttcgccaacctcaacgtcagagaccctttttctgacgcgcctggcgtcccaagatctgtcccacccacttctttccacatcccatcgcagacttacccctacaatcaccctactcccacccgcgctggcaacgccatcattcgcccgggtacctcgcacggtgtaaaccgattccgtgctgctacttcaggtcgtaacgacgctcccaatcagtggtatcccaacatgaacggtggtggtgcacgccttaacggccctgccgagttcccttttgatgggactgagacggctcagacgtcacatctgtttcgtctgctcatgacggctagccagtatgcccgcgtctcaccaggcatgcccactccgacagcaaatgagcttgatcgcatcctcagagacatctcccaaggcctcagcagcgtcactgttaccttacgcaaacaacgtgacaatgccgaaaaagccaaggaccaagaagctggaaaggtcattgacgctcagaagtccatcaaagagcttcaaggcctcgtgcagcaagcacgcgaccgtgaatcacgtctgcgtactgagaatgacgagttgaaggacgagaacgtcgatttgaaagatgaacgtgacaatgtcatagcccagttgcactctctcgaggaacagaccaagctcttccaggagcatcatcagtcgaccattaagaagttccaagagcaggacgagaagcattttcttgctgtgactgcacttgaagacgagcttcgagctgcccgtcaagttcgccatggctctgttgatcgcatctccgtgtccaagcccggctctgtgaacaacgtcgaagagcgagatgaaatcagcaacagcccagccccaaagctgcgtgtcgctgataaggccacggcgacaaagcctggacagacttcgtctggacctggaaactcccagcggaaggatttcattcctaatccgagcgccccaagctgggcacctaccggaggcgccagactgcgccctgaaccaagttccgagagcgagagagagtcttcaaccagcaacagcactggttctggcgaggttattctctaccaaggacgaaacaaccaagggcagaatgggcagcgcagcagccaaagcatggccatgacgccataccagcagatgcagccacgcagcacgtcgctgactgtgcgcaccccctttggcatcatccatggtggctatcctactgtcgagcagaatgcacatctgcccggaggacatcctatccctcgcgacaaagaggaatgggcagcaactgacgtccagcgagccatggctcatatctatgcactttgccaaggctatattgtcacttgccacttgcaaggagactctcagaccccataccctttactcgccgagcagcagtctgacgtttggaagtatatgctccgtatggtgtacaaggataccaaccatgccagctcgcacatgcagtatctcttgtccaccaaagcctttattccctacatcttgcaacgcatgtgcgttgagtacgtcttgaagaaaatcatggcacctcagatctttatcgatttctcccccgagactgactctcacctgatcgctcttcaggacaagttggccgccatggctggcacaaaggaccgccagagccgaaatcgtcagcgaattatcgaggaccatgccaagctcatcaaggccatggctgcaacccctggaatcgaggtcttccgccagaacgttgcagatcgccatgctatcatccttggcaatcttcttgcccccctgagatctgagggcgtagagaaggagagtcttgtgaagtctcttcgcctcattatcgctgcctgctgggatatcagcatcaagatctggagcagtggtcagactcttcactacgtattccccgaatgtgccaacaagtacacatctagcaccatggaagccatgaacggccagatgattgcaaagacgcccgaagagctttgcaactcccagtgccgactttcattggttatcacgccaaccatgaccctccgtgacgaccgcgactcaaacaacctgcagtgccacggtatccataaggcacaggttctcgtcatgaagtaa

SEQ ID NO: 27941 - protein, 749 aa, Muscodor strobelii
  misc_feature: SGI Peptide ID NO. 569580
  misc_feature (479)..(748): NCBI GI: 156064245 Blast Desc: SS1G_00130 [Sclerotinia sclerotiorum 1980] gi|154690992|gb|EDN90730.1| SS1G_00130 [Sclerotinia sclerotiorum 1980]
  misc_feature (454)..(726): NCBI GI: 154312268 Blast Desc: BC1G_06167 [Botryotinia fuckeliana B05.10] gi|150850130|gb|EDN25323.1| BC1G_06167 [Botryotinia fuckeliana B05.10]
  misc_feature (511)..(748): NCBI GI: 18376337 Blast Desc: [Neurospora crassa]
  misc_feature (511)..(748): NCBI GI: 164427439 Blast Desc: NCU03490 [Neurospora crassa OR74A] gi|157071743|gb|EAA26641.2| [Neurospora crassa OR74A]
  misc_feature (515)..(749): NCBI GI: 256732527 Blast Desc: NECHADRAFT_92551 [Nectria haematococca mpVI 77-13-4]
  misc_feature (473)..(748): NCBI GI: 145607045 Blast Desc: MGG_03942 [Magnaporthe grisea 70-15] gi|145014650|gb|EDJ99218.1| MGG_03942 [Magnaporthe grisea 70-15]
  misc_feature (531)..(749): NCBI GI: 46121575 Blast Desc: FG05166.1 [Gibberella zeae PH-1]
  misc_feature (477)..(749): NCBI GI: 116200105 Blast Desc: CHGG_08208 [Chaetomium globosum CBS 148.51] gi|88179487|gb|EAQ86955.1| CHGG_08208 [Chaetomium globosum CBS 148.51]
  misc_feature (471)..(748): NCBI GI: 171690086 Blast Desc: protein product [Podospora anserina] gi|170944998|emb|CAP71109.1| protein product [Podospora anserina]
  misc_feature (592)..(749): NCBI GI: 261352980 Blast Desc: [Verticillium albo-atrum VaMs.102]
MGANKVNRSSDSSSGGAPLHSSFPQETSCPKQDATSPEDEQTLLRASTDFANLNVRDPFSDAPGVPRSVPPTSFHIPSQTYPYNHPTPTRAGNAIIRPGTSHGVNRFRAATSGRNDAPNQWYPNMNGGGARLNGPAEFPFDGTETAQTSHLFRLLMTASQYARVSPGMPTPTANELDRILRDISQGLSSVTVTLRKQRDNAEKAKDQEAGKVIDAQKSIKELQGLVQQARDRESRLRTENDELKDENVDLKDERDNVIAQLHSLEEQTKLFQEHHQSTIKKFQEQDEKHFLAVTALEDELRAARQVRHGSVDRISVSKPGSVNNVEERDEISNSPAPKLRVADKATATKPGQTSSGPGNSQRKDFIPNPSAPSWAPTGGARLRPEPSSESERESSTSNSTGSGEVILYQGRNNQGQNGQRSSQSMAMTPYQQMQPRSTSLTVRTPFGIIHGGYPTVEQNAHLPGGHPIPRDKEEWAATDVQRAMAHIYALCQGYIVTCHLQGDSQTPYPLLAEQQSDVWKYMLRMVYKDTNHASSHMQYLLSTKAFIPYILQRMCVEYVLKKIMAPQIFIDFSPETDSHLIALQDKLAAMAGTKDRQSRNRQRIIEDHAKLIKAMAATPGIEVFRQNVADRHAIILGNLLAPLRSEGVEKESLVKSLRLIIAACWDISIKIWSSGQTLHYVFPECANKYTSSTMEAMNGQMIAKTPEELCNSQCRLSLVITPTMTLRDDRDSNNLQCHGIHKAQVLVMK

SEQ ID NO: 27942 - DNA, 342 bp, Muscodor strobelii
  misc_feature: SGI cDNA ID NO. 569581
  misc_feature: Encodes the peptide sequence at SEQ ID NO 27943
atggagtaccaccctcccccaagagccgggcacagtcgccgcagagcgagaaccaacccgacccagtatgccatcccgaatccatactcgatgagaacaccacctatgatgtcctcgatggctttcggcacagggcccgcagggttccagaccccaatggcaggcaagaccccgatgtctgcccgccagatgctgaaacagtcatctggctatgaatcgagcccgaagaagaagaagaagcgagggggacgtggtggtcgctcaaggaacaagagaacaatggagatggcgtgggaagttccatccgatccccgaaaccagtcattcaatccagtcatctaa

SEQ ID NO: 27943 - protein, 113 aa, Muscodor strobelii
  misc_feature: SGI Peptide ID NO. 569581
MEYHPPPRAGHSRRRARTNPTQYAIPNPYSMRTPPMMSSMAFGTGPAGFQTPMAGKTPMSARQMLKQSSGYESSPKKKKKRGGRGGRSRNKRTMEMAWEVPSDPRNQSFNPVI

SEQ ID NO: 27944 - DNA, 1584 bp, Muscodor strobelii
  misc_feature: SGI cDNA ID NO. 569582
  misc_feature: Elevated expression when VOC is produced
  misc_feature: Encodes the peptide sequence at SEQ ID NO 27945
atgacaaaagaaccgcagaaacgtttgcccgtcacgctgctcagcggatttctaggggccggcaagacgactctcctcgagcgtatcttgaaggatgacaagcatggcatgcgcataggcgtcatcgtcaatgatgtcggcgctctgaacattgatgccgctctgctagctaaccacgatgtaacgcagaaggaggagcaagttgtcgccctgcagaacggctgtatctgctgtaccctgcgcggagatctactcgaggaggtcgttcggatcgctgagaccgggaaaattgactatcttgtcatcgagagctcgggcgtcagcgagcccatgcaggttgccgagacattctcagaggagtatatgcaagctcacgtgcaggccggcgaagaccttgaagccgacgaggaaaacgaaatgagccgagaaaagcgcatgagattagccgaaattctcaaaagtggcggaatgtcccgggtgtcgcgtcttgatacgtgtgttaccgttgtcgacgcagtgaactttatgcccgatttcgctacggagaaatttctaagggaacggcagactgatgtgcccgaagaagacgaccgccacatctcagagctccaggctcaacagatcgagtttgcagacgtcgttgtcataaataagtgcgatcttgtgtctgctgaggtcattgatgagataaaaggcaccgtatcgaatctcaatcatggtgttaagataatcactgccgtaaaaggggattttgcccttgaccagatactagatacgggcatgttctcgtacgaggaagcagcacttcgcgcagggtggttacggagtcttaatgaaaaagtcaacccagaaacggaagagtacggcatcgggaccttcgtttacagagctcgtcgacctttccatccagagaggctttgggacatgatcaggaatgtgtttgtcgtcaaccagctggagtatattatagacgagggcgaggatgaggacaatgatgacgccatggacgcgtctgaaggagaagaagacgaggatgaagatgaagaaatggatgatgacgacaacgagggtagtgaggacggtgaggatgaacagccacaactggatatgaaggcacgactggcttccaagctggctgacgcgacattcggtcctctcttgcgatcgaaaggtttcatgtggttggcgactagaccttcaatgtatggcgaatggtctcaagccggcatcatgctgacaataaatggcggtgatctatggcgctgcgagatgcccatgagcgagtggcccgagggcccggagggcaaacaggtcgtcttgaaagacttcgaaggtaaatggggggacaggagacaggagattgtcttcatagggcagcaaatgcgagaaggaggcgagacacgactccgcgcggcgcttgattcttgtctccttaacgatgccgagttcaaggactgggaaaaagctatgggggctaaaaacccccagaaggcacttgattggttgttcgttgacgggtttgaggattggatcgtggatgagcatgaccatgatcacgaccatggacatgaccataaccattga

SEQ ID NO: 27945 - protein, 527 aa, Muscodor strobelii
  misc_feature: SGI Peptide ID NO. 569582
  misc_feature (10)..(245): Pfam Id: PF02492 Pfam Desc: CobW/HypB/UreG, nucleotide-binding domain
  misc_feature (290)..(477): Pfam Id: PF07683 Pfam Desc: Cobalamin synthesis protein cobW C-terminal domain
  misc_feature (10)..(117): Pfam Id: PF02492 Pfam Desc: CobW/HypB/UreG, nucleotide-binding domain
  misc_feature (162)..(245): Pfam Id: PF02492 Pfam Desc: CobW/HypB/UreG, nucleotide-binding domain
  misc_feature (376)..(477): Pfam Id: PF07683 Pfam Desc: Cobalamin synthesis protein cobW C-terminal domain
  misc_feature (290)..(313): Pfam Id: PF07683 Pfam Desc: Cobalamin synthesis protein cobW C-terminal domain
  misc_feature (8)..(525): NCBI GI: 71003956 Blast Desc: UM00497.1 [Ustilago maydis 521] gi|46095716|gb|EAK80949.1| UM00497.1 [Ustilago maydis 521]
  misc_feature (6)..(514): NCBI GI: 164660338 Blast Desc: MGL_1475 [Malassezia globosa CBS 7966] gi|159105192|gb|EDP44078.1| MGL_1475 [Malassezia globosa CBS 7966]
  misc_feature (7)..(527): NCBI GI: 58267106 Blast Desc: cobalamin synthesis protein [Cryptococcus neoformans var. neoformans JEC21] gi|57226943|gb|AAW43402.1| cobalamin synthesis protein, [Cryptococcus neoformans var. neoformans
  misc_feature (7)..(527): NCBI GI: 134111507 Blast Desc: CNBE0080 [Cryptococcus neoformans var. neoformans B-3501A] gi|50258249|gb|EAL20941.1| CNBE0080 [Cryptococcus neoformans var. neoformans B-3501A]
  misc_feature (7)..(510): NCBI GI: 212546927 Blast Desc: CobW domain protein [Penicillium marneffei ATCC 18224] gi|210065137|gb|EEA19232.1| CobW domain protein [Penicillium marneffei ATCC 18224]
  misc_feature (6)..(510): NCBI GI: 50548973 Blast Desc: YALI0C17963p [Yarrowia lipolytica] gi|49647824|emb|CAG82277.1| YALI0C17963p [Yarrowia lipolytica]
  misc_feature (7)..(510): NCBI GI: 242822084 Blast Desc: CobW domain protein [Talaromyces stipitatus ATCC 10500] gi|218712732|gb|EED12157.1| CobW domain protein [Talaromyces stipitatus ATCC 10500]
  misc_feature (1)..(510): NCBI GI: 213405131 Blast Desc: cobW [Schizosaccharomyces japonicus yFS275] gi|212001384|gb|EEB07044.1| cobW [Schizosaccharomyces japonicus yFS275]
  misc_feature (7)..(510): NCBI GI: 259486263 Blast Desc: TPA: CobW domain protein (AFU_orthologue; AFUA_8G02620) [Aspergillus nidulans FGSC A4]
  misc_feature (7)..(510): NCBI GI: 240110854 Blast Desc: CobW/HypB/UreG, nucleotide-binding domain containing protein [Coccidioides posadasii C735 delta SOWgp]
  misc_feature: Useful for introducing or modulating the production of volatile compounds
MTKEPQKRLPVTLLSGFLGAGKTTLLERILKDDKHGMRIGVIVNDVGALNIDAALLANHDVTQKEEQVVALQNGCICCTLRGDLLEEVVRIAETGKIDYLVIESSGVSEPMQVAETFSEEYMQAHVQAGEDLEADEENEMSREKRMRLAEILKSGGMSRVSRLDTCVTVVDAVNFMPDFATEKFLRERQTDVPEEDDRHISELQAQQIEFADVVVINKCDLVSAEVIDEIKGTVSNLNHGVKIITAVKGDFALDQILDTGMFSYEEAALRAGWLRSLNEKVNPETEEYGIGTFVYRARRPFHPERLWDMIRNVFVVNQLEYIIDEGEDEDNDDAMDASEGEEDEDEDEEMDDDDNEGSEDGEDEQPQLDMKARLASKLADATFGPLLRSKGFMWLATRPSMYGEWSQAGIMLTINGGDLWRCEMPMSEWPEGPEGKQVVLKDFEGKWGDRRQEIVFIGQQMREGGETRLRAALDSCLLNDAEFKDWEKAMGAKNPQKALDWLFVDGFEDWIVDEHDHDHDHGHDHNH

SEQ ID NO: 27946 - DNA, 2001 bp, Muscodor strobelii
  misc_feature: SGI EST ID NO. CUFF.65869.0
  misc_feature: Variant of the nucleotide sequence at SEQ ID NO 27944
gtcggcctatgtaatgtcgcacattgctaagacgacgctggtcggccatcaaggtcctcatagctataatgctgaggtcgcaacctgcgtcgcttgcaaatcgccaaacttacatcaatatcggttgggaaaaggaacttaggttagggtttcactaaatgctgcgtatcgctcacagttccggcgaaaaaaatgttgtgggatatatattttgggccgggtggttttcttctgcccatgttctcgaatggctcttgtcttctcagcttcccatacaccaaaactggaatcctttagacgttgaaggcctacactacgcctatcatgacaaaagaaccgcagaaacgtttgcccgtcacgctgctcagcggatttctaggggccggcaagacgactctcctcgagcgtatcttgaaggatgacaagcatggcatgcgcataggcgtcatcgtcaatgatgtcggcgctctgaacattgatgccgctctgctagctaaccacgatgtaacgcagaaggaggagcaagttgtcgccctgcagaacggctgtatctgctgtaccctgcgcggagatctactcgaggaggtcgttcggatcgctgagaccgggaaaattgactatcttgtcatcgagagctcgggcgtcagcgagcccatgcaggttgccgagacattctcagaggagtatatgcaagctcacgtgcaggccggcgaagaccttgaagccgacgaggaaaacgaaatgagccgagaaaagcgcatgagattagccgaaattctcaaaagtggcggaatgtcccgggtgtcgcgtcttgatacgtgtgttaccgttgtcgacgcagtgaactttatgcccgatttcgctacggagaaatttctaagggaacggcagactgatgtgcccgaagaagacgaccgccacatctcagagctccaggctcaacagatcgagtttgcagacgtcgttgtcataaataagtgcgatcttgtgtctgctgaggtcattgatgagataaaaggcaccgtatcgaatctcaatcatggtgttaagataatcactgccgtaaaaggggattttgcccttgaccagatactagatacgggcatgttctcgtacgaggaagcagcacttcgcgcagggtggttacggagtcttaatgaaaaagtcaacccagaaacggaagagtacggcatcgggaccttcgtttacagagctcgtcgacctttccatccagagaggctttgggacatgatcaggaatgtgtttgtcgtcaaccagctggagtatattatagacgagggcgaggatgaggacaatgatgacgccatggacgcgtctgaaggagaagaagacgaggatgaagatgaagaaatggatgatgacgacaacgagggtagtgaggacggtgaggatgaacagccacaactggatatgaaggcacgactggcttccaagctggctgacgcgacattcggtcctctcttgcgatcgaaaggtttcatgtggttggcgactagaccttcaatgtatggcgaatggtctcaagccggcatcatgctgacaataaatggcggtgatctatggcgctgcgagatgcccatgagcgagtggcccgagggcccggagggcaaacaggtcgtcttgaaagacttcgaaggtaaatggggggacaggagacaggagattgtcttcatagggcagcaaatgcgagaaggaggcgagacacgactccgcgcggcgcttgattcttgtctccttaacgatgccgagttcaaggactgggaaaaagctatgggggctaaaaacccccagaaggcacttgattggttgttcgttgacgggtttgaggattggatcgtggatgagcatgaccatgatcacgaccatggacatgaccataaccattgagccgcacgtccgttttatgcgtacaacattacggttgactaagccatatattaaataaaaacaagtctttatcgaaacggaaatggaaattcg

SEQ ID NO: 27947 - DNA, 1407 bp, Muscodor strobelii
  misc_feature: SGI cDNA ID NO. 569583
  misc_feature: Encodes the peptide sequence at SEQ ID NO 27948
atgcaggactcagtgactataccttttacgggcggccgccgtcttcaccttcttctcccaggtttcgcctgcatcactggggccatctacaccaacattcgatatcagtcatgcgcaggtacagtaccgttcatcgcgattagcctcttcaggtacgttcgagttgttggaaacttcattggcttgctttcttacaaaccagcaatcacagatctcaacactgatatcattctcccagaaaatgtggcggtgttgatgcaaaccgtgggggacatggaggacgagttccgacactgcgtcctcagcatgataaatcagcgtcctaggatgattgttatttgcacaaccgaaagccatctcgaccgtttacaacgagcggcccggggaatggacttggcaaactcgggagttcccatccattgtattgcagtcagacagccaaaccgacgattgcagcttgtgcattcgctagaaacaccactgccctcgtctactggtcagaacaacaacggagtgagcattctttcggaccctcacattcgcgccatcgtaatgagtgacgaccacgtttttccacgagaaggatttctggagtttgcactggcaccactcaatgtcaagaacagcaaagcatctgttgtcaatgtcggaaaacgcgtcaggcggctccactcagcgagctggaaagaagacttcctcaactaccttgccactgtctatctcgaaagacacaataccgagtgcactgcaacatacgcaatcgacggcggccacttcgttgtatctggtcgttgcctaatcatgcgcaagtcactttgggaaaaagatgaggcaagacagagctaccttaatgaatactggggcggtagttcgcaagtgcttctacctgacgacgatgcctggataggtcgccactgccacaacatcggacaggaagttgccttccaaatccatcctgattatctactcgagacaaacctaggggatcacggatgggcaaagctttatggccaaatgcttcgctggggtcgaacatggttccgcactgggtggactgcactttggcatgatcgggtatgggctcacaagccatggactgcttatgccgtccatctgaccgggattctcaactttgcgcttcctcttgatttgctcctgttttataattggtggtatgctagtgcctggctgcatcgacttggtccatacctgttattcttttggttcctcactaagatatttgaaccaatgggccagtggagacgcgagccgcgagacttgatctacttgctccctggtatcctcttcgggtggtatcatagccttgtcaagatcatcgcgctctgcacggtttatgactttggttggacaggcaggaagcttgatatgggaaagaaagctgattag

SEQ ID NO: 27948 - protein, 468 aa, Muscodor strobelii
  misc_feature: SGI Peptide ID NO. 569583
  misc_feature (35)..(462): NCBI GI: 154322529 Blast Desc: BC1G_00607 [Botryotinia fuckeliana B05.10] gi|150847941|gb|EDN23134.1| BC1G_00607 [Botryotinia fuckeliana B05.10]
  misc_feature (44)..(466): NCBI GI: 115388749 Blast Desc: conserved [Aspergillus terreus NIH2624] gi|114195964|gb|EAU37664.1| conserved [Aspergillus terreus NIH2624]
  misc_feature (41)..(462): NCBI GI: 121714871 Blast Desc: capsule polysaccharide synthase Cps1, [Aspergillus clavatus NRRL 1] gi|119403201|gb|EAW13619.1| capsule polysaccharide synthase Cps1, [Aspergillus clavatus NRRL 1]
  misc_feature (15)..(462): NCBI GI: 212545693 Blast Desc: capsule polysaccharide synthase Cps1, [Penicillium marneffei ATCC 18224] gi|210064520|gb|EEA18615.1| capsule polysaccharide synthase Cps1, [Penicillium marneffei ATCC 18224]
  misc_feature (10)..(462): NCBI GI: 159123858 Blast Desc: capsule polysaccharide synthase Cps1, [Aspergillus fumigatus A1163]
  misc_feature (12)..(462): NCBI GI: 146324703 Blast Desc: capsule polysaccharide synthase Cps1 [Aspergillus fumigatus Af293] gi|129555460|gb|EBA27212.1| capsule polysaccharide synthase Cps1, [Aspergillus fumigatus Af293]
  misc_feature (25)..(468): NCBI GI: 85090906 Blast Desc: NCU09875 [Neurospora crassa OR74A] gi|28920020|gb|EAA29406.1| [Neurospora crassa OR74A]
  misc_feature (41)..(462): NCBI GI: 119483946 Blast Desc: capsule polysaccharide synthase Cps1, [Neosartorya fischeri NRRL 181] gi|119410032|gb|EAW19979.1| capsule polysaccharide synthase Cps1, [Neosartorya fischeri NRRL 181]
  misc_feature (44)..(460): NCBI GI: 242824380 Blast Desc: polysaccharide synthase Cps1, [Talaromyces stipitatus ATCC 10500] gi|242824390|ref|XP_002488248.1| polysaccharide synthase Cps1, [Talaromyces stipitatus ATCC 10500] polysaccharide
  misc_feature (44)..(461): NCBI GI: 171694570 Blast Desc: protein product [Podospora anserina] gi|170947527|emb|CAP59688.1| protein product [Podospora anserina]
MQDSVTIPFTGGRRLHLLLPGFACITGAIYTNIRYQSCAGTVPFIAISLFRYVRVVGNFIGLLSYKPAITDLNTDIILPENVAVLMQTVGDMEDEFRHCVLSMINQRPRMIVICTTESHLDRLQRAARGMDLANSGVPIHCIAVRQPNRRLQLVHSLETPLPSSTGQNNNGVSILSDPHIRAIVMSDDHVFPREGFLEFALAPLNVKNSKASVVNVGKRVRRLHSASWKEDFLNYLATVYLERHNTECTATYAIDGGHFVVSGRCLIMRKSLWEKDEARQSYLNEYWGGSSQVLLPDDDAWIGRHCHNIGQEVAFQIHPDYLLETNLGDHGWAKLYGQMLRWGRTWFRTGWTALWHDRVWAHKPWTAYAVHLTGILNFALPLDLLLFYNWWYASAWLHRLGPYLLFFWFLTKIFEPMGQWRREPRDLIYLLPGILFGWYHSLVKIIALCTVYDFGWTGRKLDMGKKAD

SEQ ID NO: 27949 - DNA, 205 bp, Muscodor strobelii
  misc_feature: SGI EST ID NO. CUFF.65874.0
  misc_feature: Variant of the nucleotide sequence at SEQ ID NO 27947
ccggggaatggacttggcaaactcgggagttcccatccattgtattgcagtcagacagccaaaccgacgattgcagcttgtgcattcgctagaaacaccactgccctcgtctactggtcagaacaacaacggagtgagcattctttcggaccctcacattcgcgccatcgtaatgagtgacgaccacgtttttccacgagaagga

SEQ ID NO: 27950 - DNA, 2616 bp, Muscodor strobelii
  misc_feature: SGI cDNA ID NO. 569584
  misc_feature: Encodes the peptide sequence at SEQ ID NO 27951
atggatccagtcgccacactttcgttagccagcaatatcctcagtgtcattgatatttcaagcaaggtgttgaaatcggcccacgaactctaccaaagtggcaatgacacgactgaagaagcagctcatatgggcttgatcgtagaagatctcctgaaggccgcccagtcaatcgaaaatggatatagtgaccggacaccgcatgatcaagcgctgaataatctcgctagaaagacgacggaattatctagagacatcaccgtcacaatatcctctatcaaaattcaaggggaaaagtcgatatggcgagccgttcaagctagtgtgagactctggatcaaatcaccgaagttggtcggcctgatgagacgagtccaggactgtcggtcagaaatcgtcttgagacttactttgatgctagtagaccaccgctcagaggtgaagcaatcaatacagaaactacacagccaaacacgcgagttgcgaaacgaagcacatatctgctttggccgaaccaatgagaagctcaaggaaatgttggaaaaagtacagtccagcgcaaaaaggaacgaggcaacacgatctgaatatctgtcttccatcaaggaaattcagaagctactcgagtcattgaaggttgctacagcttctgtcactcaccaaaatatgattctccgccttttatatttttccactattcattggcgggaagatacaatatcggacccagcctcatatacctttgagtggctcacgaatcctagcggtggaagcgcaccttcctgcagcttgcccgaaatgattaccgcgagaagaaacgagaaccatactacgcaacgtatcaagtacgaggaagaaatcgctgccgaggctctgaaacggggagaggtttcgcgaaactttgagcagttcttgactggcgacaatggagcattcttcattactggcaaagccggttgtggaaagtctacccttctgagggacaagctccagaggtcggttgaaggtttctaccgtaccctcttgtttcacttccttcgaaaacagcctgaagctatacagagtctgtttccccatttagaagccagattcgccgacgaagtgctgaaagaccatccaattagaataccagagatactcaaagctgtttcgcgcatgtcaacggccgacatttttgacgattatgctctgtgcatctttgttgatggcctggatgagtacgaaggagacaatgttgagcaccttgaaatggcgagatttctgaaaaactgggctcagcaccgaaacgttaaggttctctgtagcgctagaccttaccctgcgttttgcgatacgttccacgacatagcggccatagtccatcttcacgaccttacccgcgctgatatcgcattgtacgcatttgacatgctcagaaatgaacaacagctcctagctagacagagcaatcaatggacccctgagtatgacgaccttgtgacacgaatcgttcaactttctgaaggtgtgttcatttggtcgaaagcagttgtcagatttcttagtagcagaatcggacattcgacgacccaacaattgttcgcaatactgaacgatacccctacaacaatgaacgagctttacgagaaaatgctcatgaggcgaaagtcaatggcgataaagaaagggaacatgcttctcttcattgcgattgaattaccggacctcaagaatgcattctcactttcatggctcgatgagctgaaagaccacaacttccccatgaaccagacacctacatactatacggccgccgaagttgaccggaggctaaatgggctgcgaattgagttaagtgatgggactgcgggcctccttgaactacgacttagtagagcaccaaatatcacagaatacgagcactttttcggcaataggatcgattttatccatcgaactgcgagagacttcttgaaatatgagtggctcccgtccgtgcggcacactatcgagctacccatttcagttgagacgatttgccgaaaaatgtccttcgccgaagtcaatttctctatgcatgagcgttatagcaggaagcagtctcattcctacgatacatccagtcgtgagcggtttccgatactaaggaagacatactacgatgcgaccgccgcttcgctagctacggtgaaccaagaaaatatcacatttagattcgaagctacttcagagataccttgtgctgaaaatatgtttctcgaaaatgttttctcgtcttatgaacgcctcaacgatgaacaggggaggaagccgtcagcagcatctgcacaagaattctttatcagtgaaagatttggaggagaacatggtcttagagaactgtgccaggagccagcatccttcatccatcttgctctgtatcgtggccaaaccggctatgttcatttggtgaacagcgagaacacgcctatccagtatattgatctggtctcattcttgggactggcacctgcgaatctctttcgtcaatcagatatccgtgctgcgaaggagctggcactaggcccagcgctgcaagcgaacagagatcagaggacgcccaacggaacttggttaaaatttcgccaagctggctga

SEQ ID NO: 27951 - protein, 871 aa, Muscodor strobelii
  misc_feature: SGI Peptide ID NO. 569584
  misc_feature (1)..(651): NCBI GI: 212540446 Blast Desc: conserved [Penicillium marneffei ATCC 18224] gi|210067677|gb|EEA21769.1| conserved [Penicillium marneffei ATCC 18224]
  misc_feature (1)..(652): NCBI GI: 225684243 Blast Desc: conserved [Paracoccidioides brasiliensis Pb03]
  misc_feature (1)..(652): NCBI GI: 226293863 Blast Desc: conserved [Paracoccidioides brasiliensis Pb18]
  misc_feature (1)..(651): NCBI GI: 261190024 Blast Desc: conserved [Ajellomyces dermatitidis SLH14081] gi|239591250|gb|EEQ73831.1| conserved [Ajellomyces dermatitidis SLH14081]
  misc_feature (1)..(652): NCBI GI: 154293653 Blast Desc: BC1G_14084 [Botryotinia fuckeliana B05.10] gi|150845240|gb|EDN20433.1| BC1G_14084 [Botryotinia fuckeliana B05.10]
  misc_feature (2)..(689): NCBI GI: 255956529 Blast Desc: Pc21g20270 [Penicillium chrysogenum Wisconsin 54-1255] gi|211590728|emb|CAP96924.1| Pc21g20270 [Penicillium chrysogenum Wisconsin 54-1255]
  misc_feature (294)..(686): NCBI GI: 261351548 Blast Desc: conserved [Verticillium albo-atrum VaMs.102]
  misc_feature (1)..(651): NCBI GI: 156048628 Blast Desc: SS1G_09046 [Sclerotinia sclerotiorum 1980] gi|154693442|gb|EDN93180.1| SS1G_09046 [Sclerotinia sclerotiorum 1980]
  misc_feature (1)..(653): NCBI GI: 256725921 Blast Desc: NECHADRAFT_82115 [Nectria haematococca mpVI 77-13-4]
  misc_feature (7)..(652): NCBI GI: 256730066 Blast Desc: NECHADRAFT_82694 [Nectria haematococca mpVI 77-13-4]
MDPVATLSLASNILSVIDISSKVLKSAHELYQSGNDTTEEAAHMGLIVEDLLKAAQSIENGYSDRTPHDQALNNLARKTTELSRDITVTISSIKIQGEKSIWRAVQASVRLWIKSPKLVGLMRRVQDCRSEIVLRLTLMLVDHRSEVKQSIQKLHSQTRELRNEAHICFGRTNEKLKEMLEKVQSSAKRNEATRSEYLSSIKEIQKLLESLKVATASVTHQNMILRLLYFSTIHWREDTISDPASYTFEWLTNPSGGSAPSCSLPEMITARRNENHTTQRIKYEEEIAAEALKRGEVSRNFEQFLTGDNGAFFITGKAGCGKSTLLRDKLQRSVEGFYRTLLFHFLRKQPEAIQSLFPHLEARFADEVLKDHPIRIPEILKAVSRMSTADIFDDYALCIFVDGLDEYEGDNVEHLEMARFLKNWAQHRNVKVLCSARPYPAFCDTFHDIAAIVHLHDLTRADIALYAFDMLRNEQQLLARQSNQWTPEYDDLVTRIVQLSEGVFIWSKAVVRFLSSRIGHSTTQQLFAILNDTPTTMNELYEKMLMRRKSMAIKKGNMLLFIAIELPDLKNAFSLSWLDELKDHNFPMNQTPTYYTAAEVDRRLNGLRIELSDGTAGLLELRLSRAPNITEYEHFFGNRIDFIHRTARDFLKYEWLPSVRHTIELPISVETICRKMSFAEVNFSMHERYSRKQSHSYDTSSRERFPILRKTYYDATAASLATVNQENITFRFEATSEIPCAENMFLENVFSSYERLNDEQGRKPSAASAQEFFISERFGGEHGLRELCQEPASFIHLALYRGQTGYVHLVNSENTPIQYIDLVSFLGLAPANLFRQSDIRAAKELALGPALQANRDQRTPNGTWLKFRQAG

SEQ ID NO: 27952 - DNA, 1515 bp, Muscodor strobelii
  misc_feature: SGI cDNA ID NO. 569585
  misc_feature: Encodes the peptide sequence at SEQ ID NO 27953
atgccttcaataatacgtctcgctgctggcgtggccgtcgccgcgcagctcagtgttgcagctccattgaagcctgtgtcgagcactgacgccctttatcgatggtcctcgaagtctacacaaagtatcgtatgggggcaatgccctaatgagttcccagaaaacctcgaatgcgcaacttacaccgttccaatggactggaactgccctaatagcaacaaaaccgtggacttgggtatggtccgtttggcagcttccgacagcgccaatcgcattggctatatgttcgtcaatcccggtggtcctggtggtgctgcaacgagtctcgttgccgttgtggcgcaaggcggcttgttagccgatgagatttatgagaaattcgacattattggcctcgatcctcgtggtgtcggcattagcacgcctatacaatgcgatccagaattatacaataagcgtgtcaaatttgctccgaagactgaagccgaatttgaagcactcgtccaatacaataaggaccttggcgctagttgtcttgaaagaacaggccctctcgtcaattatgttgacactatcagtgcggccaaggatcatgaagctgttcgcttggctcttggcggcgaaaaggctacattcttaggcctctcctatggtacgcaactgttcagccaatatgcacagctctttccaaatagctttcgggcgatggcactcgatggcaacgtggtccactcgcagtcagaagcctcaaacttgttgacagagtcctcaacctacgaagcaacactaaggcaattctttgcttggtgtagtgggtcagatgattgtgcattgcaatccgaagacgtagaagagatctttacccaggtcagagacgcagcagctaaaagcccaattccggctcctggctgtgatgacgttgcatgccgatctgatatgaccgacgaagatatgctcttcacctttcagactggtctaatcgaagagagcaactggccagctttggctctcggtctctccgaggccagcaagggcaatgctacgataatatcatctagcaatacaatcgctgtgggtgacgcatatacagattcttccctgtacgctgggactgctattgcctgccaggactggacccatgattcctcctctatagtcgacatacaggagaaggagaacctagcccattcgttcagtccattaactcttggcttttgccaaacatacaagattcagacatcctgcatcggctggccagctcctatcagcaaccctcctacgcctatcaaatatagtggtgatgtcgagatacttctcataaattctctctacgatcctgcgacctcttatacatgggccgttggtctagagtctgagataaaaaacgcggctttattgactcgcaatggaagtggccatggaagctacgagttgggcggagaggcggcacaactgactaatgcctatttagtgaaccttgaggtgccagaggccggcacgattacatctacatga

SEQ ID NO: 27953 - protein, 504 aa, Muscodor strobelii
  misc_feature: SGI Peptide ID NO. 569585
  misc_feature (127)..(400): Pfam Id: PF00561 Pfam Desc: alpha/beta hydrolase fold
  misc_feature (399)..(502): Pfam Id: PF08386 Pfam Desc: TAP-like protein
  misc_feature (127)..(289): Pfam Id: PF00561 Pfam Desc: alpha/beta hydrolase fold
  misc_feature (399)..(500): Pfam Id: PF08386 Pfam Desc: TAP-like protein
  misc_feature (55)..(504): NCBI GI: 67903568 Blast Desc: AN8771.2 [Aspergillus nidulans FGSC A4] gi|40741374|gb|EAA60564.1| AN8771.2 [Aspergillus nidulans FGSC A4]
  misc_feature (55)..(504): NCBI GI: 259483025 Blast Desc: TPA: conserved [Aspergillus nidulans FGSC A4]
  misc_feature (1)..(500): NCBI GI: 256728785 Blast Desc: NECHADRAFT_72599 [Nectria haematococca mpVI 77-13-4]
  misc_feature (80)..(504): NCBI GI: 169619802 Blast Desc: SNOG_13098 [Phaeosphaeria nodorum SN15] gi|160703905|gb|EAT79425.2| SNOG_13098 [Phaeosphaeria nodorum SN15]
  misc_feature (39)..(504): NCBI GI: 46110451 Blast Desc: FG02107.1 [Gibberella zeae PH-1]
  misc_feature (1)..(500): NCBI GI: 256376849 Blast Desc: TAP domain protein [Actinosynnema mirum DSM 43827] gi|255921152|gb|ACU36663.1| TAP domain protein [Actinosynnema mirum DSM 43827]
  misc_feature (39)..(501): NCBI GI: 229864051 Blast Desc: hydrolase or acyltransferase of alpha/beta superfamily [Stackebrandtia nassauensis DSM 44728] gi|229749367|gb|EEP07161.1| hydrolase or acyltransferase of DSM
  misc_feature (42)..(499): NCBI GI: 229861446 Blast Desc: alpha/beta hydrolase family protein [Stackebrandtia nassauensis DSM 44728] gi|229750097|gb|EEP07889.1| alpha/beta hydrolase family protein [Stackebrandtia nassauensis DSM 44728]
  misc_feature (1)..(500): NCBI GI: 256379929 Blast Desc: TAP domain protein [Actinosynnema mirum DSM 43827] gi|255924232|gb|ACU39743.1| TAP domain protein [Actinosynnema mirum DSM 43827]
  misc_feature (39)..(500): NCBI GI: 282868225 Blast Desc: TAP domain protein [Streptomyces sp. ACT-1] gi|282578638|gb|EFB84049.1| TAP domain protein [Streptomyces sp. ACT-1]
MPSIIRLAAGVAVAAQLSVAAPLKPVSSTDALYRWSSKSTQSIVWGQCPNEFPENLECATYTVPMDWNCPNSNKTVDLGMVRLAASDSANRIGYMFVNPGGPGGAATSLVAVVAQGGLLADEIYEKFDIIGLDPRGVGISTPIQCDPELYNKRVKFAPKTEAEFEALVQYNKDLGASCLERTGPLVNYVDTISAAKDHEAVRLALGGEKATFLGLSYGTQLFSQYAQLFPNSFRAMALDGNVVHSQSEASNLLTESSTYEATLRQFFAWCSGSDDCALQSEDVEEIFTQVRDAAAKSPIPAPGCDDVACRSDMTDEDMLFTFQTGLIEESNWPALALGLSEASKGNATIISSSNTIAVGDAYTDSSLYAGTAIACQDWTHDSSSIVDIQEKENLAHSFSPLTLGFCQTYKIQTSCIGWPAPISNPPTPIKYSGDVEILLINSLYDPATSYTWAVGLESEIKNAALLTRNGSGHGSYELGGEAAQLTNAYLVNLEVPEAGTITST

SEQ ID NO: 27954 - DNA, 1752 bp, Muscodor strobelii
  misc_feature: SGI EST ID NO. CUFF.65886.0
  misc_feature: Variant of the nucleotide sequence at SEQ ID NO 27952
ataccctcgaatatgccttcaataatacgtctcgctgctggcgtggccgtcgccgcgcagctcagtgttgcagctccattgaagcctgtgtcgagcactgacgccctttatcgatggtcctcgaagtctacacaaagtatcgtatgggggcaatgccctaatgagttcccagaaaacctcgaatgcgcaacttacaccgttccaatggactggaactgccctaatagcaacaaaaccgtggacttgggtatggtccgtttggcagcttccgacagcgccaatcgcattggctatatgttcgtcaatcccggtggtcctggtggtgctgcaacgagtctcgttgccgttgtggcgcaaggcggcttgttagccgatgagatttatgagaaattcgacattattggcctcgatcctcgtggtgtcggcattagcacgcctatacaatgcgatccagaattatacaataagcgtgtcaaatttgctccgaagactgaagccgaatttgaagcactcgtccaatacaataaggaccttggcgctagttgtcttgaaagaacaggccctctcgtcaattatgttgacactatcagtgcggccaaggatcatgaagctgttcgcttggctcttggcggcgaaaaggctacattcttaggcctctcctatggtacgcaactgttcagccaatatgcacagctctttccaaatagctttcgggcgatggcactcgatggcaacgtggtccactcgcagtcagaagcctcaaacttgttgacagagtcctcaacctacgaagcaacactaaggcaattctttgcttggtgtagtgggtcagatgattgtgcattgcaatccgaagacgtagaagagatctttacccaggtcagagacgcagcagctaaaagcccaattccggctcctggctgtgatgacgttgcatgccgatctgatatgaccgacgaagatatgctcttcacctttcagactggtctaatcgaagagagcaactggccagctttggctctcggtctctccgaggccagcaagggcaatgctacgataatatcatctagcaatacaatcgctgtgggtgacgcatatacagattcttccctgtacgctgggactgctattgcctgccaggactggacccatgattcctcctctatagtcgacatacaggagaaggagaacctagcccattcgttcagtccattaactcttggcttttgccaaacatacaagattcagacatcctgcatcggctggccagctcctatcagcaaccctcctacgcctatcaaatatagtggtgatgtcgagatacttctcataaattctctctacgatcctgcgacctcttatacatgggccgttggtctagagtctgagataaaaaacgcggctttattgactcgcaatggaagtggccatggaagctacgagttgggcggagaggcggcacaactgactaatgcctatttagtgaaccttgaggtgccagaggccggcacgattacatctacatgaaacttccgctattatacttatgcaagcgttttgtaatatctgtacataaataccttttagaatatgtcacaaaggctcgcttattcgggttaccacccaaggtaatacggcatgctccagggagcataatacaggagttcaagtgcatacatgtatatatacgagtctgattcgccgttttattcgaagatagctaaagagcgatcctataataactattttcac

SEQ ID NO: 27955 - DNA, 1428 bp, Muscodor strobelii
  misc_feature: SGI cDNA ID NO. 569586
  misc_feature: Encodes the peptide sequence at SEQ ID NO 27956
atggggacacctggggcgttggaagagggcaaattgcccaagacgattctggatgctatcgctttgtcgaaagagttgggctttcgatacctatgggttgataggctgtgcgttgtccaggactcggaagccgataaggcagtgcagttaccgcagatggacaatgtctactcgtctgctgcactcaccatagttgctgcgagtgggacttcggaagatggactcgcgggggtttgcgacacgcccaggactgttgatcagcggactgctagagttgcggatgatctggctgtcatgagtgtgctgaggctcgacgaggcgtatcaagattgtctctggagaacacgaggctggacattccaagaaggtctttgttcgagacggagcgtcatattcacgaatgaccaagtcttctggtcttgttctacggctcagtgttgtgagagtattgcatttgaagatcatccgacgactgtcagacccggtgatatagtgtggaatgtcctatcgggacattccgtattcggagagtttggtggagcaaatctgagttataaggaacttgggtctatgatcgggacttattgcaagagacaacttggagaagaagaggatatcttgagtgcgtttgagggtgtgttgaatagggtcaggctcaccagtggacatgagttctattggggccactctataagcacgatgtttgagttgagtttggtctggctaaatattgtttggtgctatgatcgggatattccaatcactcccgttccagagcggagaaggggaggtcataatgtgattagggcggatggaacgagttacaaggtaccatttccgagttggagttggcttggatggagaaacttgaacggaatcacgagggttgtaccgaaacaagtcaatgttctacccgagctgaatatctggaaattggatgttaatggcaaggcgacaccagtgagagccgcagatgcgaagacattggagccgcaacatcctgtgaggtggaatgaggttgatgagaacatctcaaagcgatggaaagagggaactgatataccgaaggacatgctacatgaaggaggacacttcgaagattctgggagactggtcttttggacaagttgtgcggacttggaaaccaaagacggcaagatattggagtcgaatggggaaattggcgagctgctgccaatgtggccacatagggaaaaacctaaagggatccaaagcttcatcgtggtgagcaggaaacttaatgactactatggagattacgtgggggttgaaaagagactgtacgttcttatgatcgaatgggtcgatcgtgggaaaggcattgttgagaggatctgcgcaggagaggtcgatgaggcgggatgggttggtgttaagagggagtggaggttgatcatgctgcagtga

SEQ ID NO: 27956 - protein, 475 aa, Muscodor strobelii
  misc_feature: SGI Peptide ID NO. 569586
  misc_feature (2)..(122): Pfam Id: PF06985 Pfam Desc: Heterokaryon incompatibility protein (HET)
  misc_feature (12)..(122): Pfam Id: PF06985 Pfam Desc: Heterokaryon incompatibility protein (HET)
  misc_feature (1)..(462): NCBI GI: 256720431 Blast Desc: NECHADRAFT_82299 [Nectria haematococca mpVI 77-13-4]
  misc_feature (23)..(466): NCBI GI: 168042180 Blast Desc: [Physcomitrella patens subsp. patens] gi|162675106|gb|EDQ61605.1| [Physcomitrella patens subsp. patens]
  misc_feature (12)..(472): NCBI GI: 156053255 Blast Desc: SS1G_06795 [Sclerotinia sclerotiorum 1980] gi|154704573|gb|EDO04312.1| SS1G_06795 [Sclerotinia sclerotiorum 1980]
  misc_feature (6)..(468): NCBI GI: 256724888 Blast Desc: NECHADRAFT_77040 [Nectria haematococca mpVI 77-13-4]
  misc_feature (1)..(458): NCBI GI: 154296357 Blast Desc: BC1G_13005 [Botryotinia fuckeliana B05.10] gi|150843463|gb|EDN18656.1| BC1G_13005 [Botryotinia fuckeliana B05.10]
  misc_feature (12)..(474): NCBI GI: 168042178 Blast Desc: [Physcomitrella patens subsp. patens] gi|162675105|gb|EDQ61604.1| [Physcomitrella patens subsp. patens]
  misc_feature (4)..(474): NCBI GI: 226294699 Blast Desc: conserved [Paracoccidioides brasiliensis Pb18]
  misc_feature (10)..(287): NCBI GI: 85090211 Blast Desc: NCU09910 [Neurospora crassa OR74A] gi|28919658|gb|EAA29073.1| [Neurospora crassa OR74A]
  misc_feature (1)..(288): NCBI GI: 39979184 Blast Desc: related to tol protein [Neurospora crassa]
  misc_feature (9)..(296): NCBI GI: 115433588 Blast Desc: [Aspergillus terreus NIH2624] gi|114189783|gb|EAU31483.1| [Aspergillus terreus NIH2624]
MGTPGALEEGKLPKTILDAIALSKELGFRYLWVDRLCVVQDSEADKAVQLPQMDNVYSSAALTIVAASGTSEDGLAGVCDTPRTVDQRTARVADDLAVMSVLRLDEAYQDCLWRTRGWTFQEGLCSRRSVIFTNDQVFWSCSTAQCCESIAFEDHPTTVRPGDIVWNVLSGHSVFGEFGGANLSYKELGSMIGTYCKRQLGEEEDILSAFEGVLNRVRLTSGHEFYWGHSISTMFELSLVWLNIVWCYDRDIPITPVPERRRGGHNVIRADGTSYKVPFPSWSWLGWRNLNGITRVVPKQVNVLPELNIWKLDVNGKATPVRAADAKTLEPQHPVRWNEVDENISKRWKEGTDIPKDMLHEGGHFEDSGRLVFWTSCADLETKDGKILESNGEIGELLPMWPHREKPKGIQSFIVVSRKLNDYYGDYVGVEKRLYVLMIEWVDRGKGIVERICAGEVDEAGWVGVKREWRLIMLQ

SEQ ID NO: 27957 - DNA, 463 bp, Muscodor strobelii
  misc_feature: SGI EST ID NO. CUFF.65895.0
  misc_feature: Variant of the nucleotide sequence at SEQ ID NO 27955
atagtgtggaatgtcctatcgggacattccgtattcggagagtttggtggagcaaatctgagttataaggaacttgggtctatgatcgggacttattgcaagagacaacttggagaagaagaggatatcttgagtgcgtttgagggtgtgttgaatagggtcaggctcaccagtggacatgagttctattggggccactctataagcacgatgtttgagttgagtttggtctggctaaatattgtttggtgctatgatcgggatattccaatcactcccgttccagagcggagaaggggaggtcataatgtgattagggcggatggaacgagttacaaggtaccatttccgagttggagttggcttggatggagaaacttgaacggaatcacgagggttgtaccgaaacaagtcaatgttctacccgagctgaatatctggaaattggatgttaatggcaagg

SEQ ID NO: 27958 - DNA, 2136 bp, Muscodor strobelii
  misc_feature: SGI cDNA ID NO. 569587
  misc_feature: Encodes the peptide sequence at SEQ ID NO 27959
atgggaaaaggaaacagactcaagcatcagggcattcccgaacccctgtccgatgaccattttacgaaactcaagcgaaaagctggtcttcccgttgacgatgtcccaagcaagaagacgagaacgaatgcgcccaccaatggcaaggctaagtttaaggcaaatggtgccaaagcctctaccattcctccgaagagcaatggcaaggctgcgccgttaaaagcgaagaaatcgaagaagccagagcccgaactcgattcagatgatattagcgatggcatcggaggaggcttttccgatgccgagatggacgacgatgatctgatagacggcgaaggcggtcttggagatgacttcttaggctccgacgactctgtatatgactcagacgacggtgcgccggagcgcagagctatgttctccgaggacgaagatgacgactcggatgccgaggagaggttgaccgctgccaatattgtcggtctttctcgcaaactagacgaagagaaggcacaagaagaggctgacgccgaggcggaaatgaaaggaactggtatggagcttaacctcgacataccccatgttctcgacgatgaagatgaggatgggctccagaacaaagctctgcttgcgcccgatctccagcttctgcgtacgagaatatcggataccgtccgtgttctggatgattttgcgaagttatctgagcctggtcggtcaagatctgagtacacagcccagttgattaaggatatttgcgcatactacggctactctgaattcctcgctgagaagctattcaacctattccctcccaaagaagcccttgcgttcttcgacgccaacgagactgctcgtccagtcgtcatacgtacgaataccttaaaaactagtcgcagagagttggcctcggctttgatagcgagaggtgtcacgctcgagcctgtcgggaaatggtcaaaagtcggactgcagatcttcgagtccaacgttcctctcggcgcgactccagagtacctcgcgggacaatacattctccaagcggctagttcctttctcccttgtatgtcacttgcccctcagccgggtgagcgagtactggacatggcctcggctccgggaggtaagactacctacctcgctgcgatgatgaagaaccaaggatgcatcgtcgccaatgatcccagtaaggcccgttccaagggtctcatcggtaacattcacagattgggtgtaaggaatgtcatggtctgcaactacgacgcgcgagagttcccgagagttatgggtggcttcgacagagtgcttctcgatgcgccgtgtactggcacaggcgtcgtggccaaggatgccagcgttaagaccaataagacggagaaggacttccagacgttaccgcatacgcaaaaacagctattattgtgtgcgatcgattcggtgaatcatgctagttcgacgggtggtttcattgcgtactcgacttgctcggtcagcattgaggaaaatgagatggttgtacaatatgcgttgaagaagcgtccgaatgtcaagttagtcgatactgagttgccgttcggtaaggaaggttttacgagctatcagggcaagaactttgacaaatcattaagtcttacacgacggttttacccgcatacgttgaatatggacggtttctacgtcgccaaatttcaaaagatcggcccaacacccgccaacctcgtcaaagataagggcgccccctcaatgaaagcagacacagagatcttcgacaagacgcctatatcagcggacgaaaaagtaccatctcatctggtgcaagacgacgattttggtggattcgatgacgaagaggatgaggagtacatggagcgctcaaagagaaatgcaatgaggaaacgtggtcttgatcctaaggctctcgataaaccgaaggccagtagtaaaaaggaggagcctaagagtgaggagcccaaggtgaaaagtaaaaagtcaaaggaggaccttacaggagagagcaagaaggcagaaagcccgaagttaaagagcaaggtgtccaaggagcagttgacgatagaggaaccgaaagtgaagagtaaaacgaaactcgcgaagcgagataagaagagcagaacgtag

SEQ ID NO: 27959 - protein, 711 aa, Muscodor strobelii
  misc_feature: SGI Peptide ID NO. 569587
  misc_feature (278)..(564): Pfam Id: PF01189 Pfam Desc: NOL1/NOP2/sun family
  misc_feature (1)..(639): NCBI GI: 46123731 Blast Desc: FG06243.1 [Gibberella zeae PH-1]
  misc_feature (1)..(637): NCBI GI: 256732508 Blast Desc: NECHADRAFT_38896 [Nectria haematococca mpVI 77-13-4]
  misc_feature (1)..(693): NCBI GI: 85119485 Blast Desc: NCU02511 [Neurospora crassa OR74A] gi|28927454|gb|EAA36406.1| NCU02511 [Neurospora crassa OR74A]
  misc_feature (1)..(656): NCBI GI: 154303546 Blast Desc: BC1G_09344 [Botryotinia fuckeliana B05.10] gi|150854655|gb|EDN29847.1| BC1G_09344 [Botryotinia fuckeliana B05.10]
  misc_feature (1)..(701): NCBI GI: 116181006 Blast Desc: CHGG_01131 [Chaetomium globosum CBS 148.51] gi|88185428|gb|EAQ92896.1| CHGG_01131 [Chaetomium globosum CBS 148.51]
  misc_feature (1)..(640): NCBI GI: 171696268 Blast Desc: protein product [Podospora anserina] gi|170948376|emb|CAP60540.1| protein product [Podospora anserina]
  misc_feature (1)..(645): NCBI GI: 156063948 Blast Desc: SS1G_02092 [Sclerotinia sclerotiorum 1980] gi|154697426|gb|EDN97164.1| SS1G_02092 [Sclerotinia sclerotiorum 1980]
  misc_feature (1)..(662): NCBI GI: 119182737 Blast Desc: CIMG_06380 [Coccidioides immitis RS]
  misc_feature (1)..(662): NCBI GI: 240109380 Blast Desc: Nucleolar protein NOP2, [Coccidioides posadasii C735 delta SOWgp]
  misc_feature (1)..(708): NCBI GI: 189190438 Blast Desc: tRNA (cytosine-5-)-methyltransferase NCL1 [Pyrenophora tritici-repentis Pt-1C-BFP] gi|187973164|gb|EDU40663.1| tRNA (cytosine-5-)-methyltransferase NCL1 [Pyrenophora Pt-1C-BFP]
MGKGNRLKHQGIPEPLSDDHFTKLKRKAGLPVDDVPSKKTRTNAPTNGKAKFKANGAKASTIPPKSNGKAAPLKAKKSKKPEPELDSDDISDGIGGGFSDAEMDDDDLIDGEGGLGDDFLGSDDSVYDSDDGAPERRAMFSEDEDDDSDAEERLTAANIVGLSRKLDEEKAQEEADAEAEMKGTGMELNLDIPHVLDDEDEDGLQNKALLAPDLQLLRTRISDTVRVLDDFAKLSEPGRSRSEYTAQLIKDICAYYGYSEFLAEKLFNLFPPKEALAFFDANETARPVVIRTNTLKTSRRELASALIARGVTLEPVGKWSKVGLQIFESNVPLGATPEYLAGQYILQAASSFLPCMSLAPQPGERVLDMASAPGGKTTYLAAMMKNQGCIVANDPSKARSKGLIGNIHRLGVRNVMVCNYDAREFPRVMGGFDRVLLDAPCTGTGVVAKDASVKTNKTEKDFQTLPHTQKQLLLCAIDSVNHASSTGGFIAYSTCSVSIEENEMVVQYALKKRPNVKLVDTELPFGKEGFTSYQGKNFDKSLSLTRRFYPHTLNMDGFYVAKFQKIGPTPANLVKDKGAPSMKADTEIFDKTPISADEKVPSHLVQDDDFGGFDDEEDEEYMERSKRNAMRKRGLDPKALDKPKASSKKEEPKSEEPKVKSKKSKEDLTGESKKAESPKLKSKVSKEQLTIEEPKVKSKTKLAKRDKKSRT

SEQ ID NO: 27960 - DNA, 2469 bp, Muscodor strobelii
  misc_feature: SGI EST ID NO. CUFF.65959.0
  misc_feature: Variant of the nucleotide sequence at SEQ ID NO 27958
tgcgacttttacttctctcttttcgcttctcctgtacatactcgcataaataccaaaatgggaaaaggaaacagactcaagcatcagggcattcccgaacccctgtccgatgaccattttacgaaactcaagcgaaaagctggtcttcccgttgacgatgtcccaagcaagaagacgagaacgaatgcgcccaccaatggcaaggctaagtttaaggcaaatggtgccaaagcctctaccattcctccgaagagcaatggcaaggctgcgccgttaaaagcgaagaaatcgaagaagccagagcccgaactcgattcagatgatattagcgatggcatcggaggaggcttttccgatgccgagatggacgacgatgatctgatagacggcgaaggcggtcttggagatgacttcttaggctccgacgactctgtatatgactcagacgacggtgcgccggagcgcagagctatgttctccgaggacgaagatgacgactcggatgccgaggagaggttgaccgctgccaatattgtcggtctttctcgcaaactagacgaagagaaggcacaagaagaggctgacgccgaggcggaaatgaaaggaactggtatggagcttaacctcgacataccccatgttctcgacgatgaagatgaggatgggctccagaacaaagctctgcttgcgcccgatctccagcttctgcgtacgagaatatcggataccgtccgtgttctggatgattttgcgaagttatctgagcctggtcggtcaagatctgagtacacagcccagttgattaaggatatttgcgcatactacggctactctgaattcctcgctgagaagctattcaacctattccctcccaaagaagcccttgcgttcttcgacgccaacgagactgctcgtccagtcgtcatacgtacgaataccttaaaaactagtcgcagagagttggcctcggctttgatagcgagaggtgtcacgctcgagcctgtcgggaaatggtcaaaagtcggactgcagatcttcgagtccaacgttcctctcggcgcgactccagagtacctcgcgggacaatacattctccaagcggctagttcctttctcccttgtatgtcacttgcccctcagccgggtgagcgagtactggacatggcctcggctccgggaggtaagactacctacctcgctgcgatgatgaagaaccaaggatgcatcgtcgccaatgatcccagtaaggcccgttccaagggtctcatcggtaacattcacagattgggtgtaaggaatgtcatggtctgcaactacgacgcgcgagagttcccgagagttatgggtggcttcgacagagtgcttctcgatgcgccgtgtactggcacaggcgtcgtggccaaggatgccagcgttaagaccaataagacggagaaggacttccagacgttaccgcatacgcaaaaacagctattattgtgtgcgatcgattcggtgaatcatgctagttcgacgggtggtttcattgcgtactcgacttgctcggtcagcattgaggaaaatgagatggttgtacaatatgcgttgaagaagcgtccgaatgtcaagttagtcgatactgagttgccgttcggtaaggaaggttttacgagctatcagggcaagaactttgacaaatcattaagtcttacacgacggttttacccgcatacgttgaatatggacggtttctacgtcgccaaatttcaaaagatcggcccaacacccgccaacctcgtcaaagataagggcgccccctcaatgaaagcagacacagagatcttcgacaagacgcctatatcagcggacgaaaaagtaccatctcatctggtgcaagacgacgattttggtggattcgatgacgaagaggatgaggagtacatggagcgctcaaagagaaatgcaatgaggaaacgtggtcttgatcctaaggctctcgataaaccgaaggccagtagtaaaaaggaggagcctaagagtgaggagcccaaggtgaaaagtaaaaagtcaaaggaggaccttacaggagagagcaagaaggcagaaagcccgaagttaaagagcaaggtgtccaaggagcagttgacgatagaggaaccgaaagtgaagagtaaaacgaaactcgcgaagcgagataagaagagcagaacgtagatatggcggataataaaactctggggaagggaaaatctcacttcaacatgtcttcgtcatttgctcttcttaaatgcctggcagttcatactccaagactctaaagtcggatttagatcccaatgtagccatatgcccactttctactatatatcctcagccgcagctggaatatggagcaccttggcatcaatagagtccattcttcaaccccatcagacgatgcaacttataacaaacctaccttgtcctcatcacgttttaccccttcctcaa

SEQ ID NO: 27961 - DNA, 618 bp, Muscodor strobelii
  misc_feature: SGI cDNA ID NO. 569588
  misc_feature: Encodes the peptide sequence at SEQ ID NO 27962
atgaccgaagtatccttcgccaaatccttcctggccgcgctggacggccggcccatcaagctctcgcccgaccatgtcgaagatcccaagacataccaggcgcgcagtgcctacaccctctcaaaaatgcccaaagcaatgagcaaacgcaaatccaccaccacagcaccaggccaagaacgcagtctcaccgtaaccgtaaagtccctgcgaaatccacccctcgatctacgcttctcctcccaacccctcaacacctccatactcgacgtcaaggcctcgatatccaaggaaaccggcatcgccgagaacaagatcaaggttttgcataagaagaagcccgtcgcagatagcaaggtgctgaaggatctggccactgatgatgagactgtcgtggagttctccgtcatggtcatgggtggtgcggcggctttgcctaagacggatgcacagaaggatgttgctcagggcacgagcgggacagaggtgctagagggccaggatttctgggacgatctgaaagggttcctcttgcagcgcatacgggacgagcaggtggctacagatctcacgagtacctttcaaacggcgtggaaggtcaagcgatcaatgtcatga

SEQ ID NO: 27962 - protein, 205 aa, Muscodor strobelii
  misc_feature: SGI Peptide ID NO. 569588
  misc_feature (1)..(199): NCBI GI: 46123733 Blast Desc: FG06244.1 [Gibberella zeae PH-1]
  misc_feature (1)..(199): NCBI GI: 156063946 Blast Desc: SS1G_02091 [Sclerotinia sclerotiorum 1980] gi|154697425|gb|EDN97163.1| SS1G_02091 [Sclerotinia sclerotiorum 1980]
  misc_feature (1)..(202): NCBI GI: 261356673 Blast Desc: conserved [Verticillium albo-atrum VaMs.102]
  misc_feature (1)..(199): NCBI GI: 154303544 Blast Desc: BC1G_09343 [Botryotinia fuckeliana B05.10] gi|150854654|gb|EDN29846.1| BC1G_09343 [Botryotinia fuckeliana B05.10]
  misc_feature (2)..(201): NCBI GI: 39942166 Blast Desc: MGG_03163 [Magnaporthe grisea 70-15] gi|145015856|gb|EDK00346.1| MGG_03163 [Magnaporthe grisea 70-15]
  misc_feature (2)..(199): NCBI GI: 116204697 Blast Desc: CHGG_10232 [Chaetomium globosum CBS 148.51] gi|88176360|gb|EAQ83828.1| CHGG_10232 [Chaetomium globosum CBS 148.51]
  misc_feature (1)..(199): NCBI GI: 171690288 Blast Desc: protein product [Podospora anserina] gi|170945092|emb|CAP71203.1| protein product [Podospora anserina]
  misc_feature (1)..(202): NCBI GI: 169771879 Blast Desc: [Aspergillus oryzae RIB40] gi|83768268|dbj|BAE58407.1| protein product [Aspergillus oryzae]
  misc_feature (1)..(202): NCBI GI: 238485522 Blast Desc: conserved [Aspergillus flavus NRRL3357] gi|220698878|gb|EED55217.1| conserved [Aspergillus flavus NRRL3357]
  misc_feature (1)..(198): NCBI GI: 255955393 Blast Desc: Pc21g14340 [Penicillium chrysogenum Wisconsin 54-1255] gi|211590160|emb|CAP96331.1| Pc21g14340 [Penicillium chrysogenum Wisconsin 54-1255]
MTEVSFAKSFLAALDGRPIKLSPDHVEDPKTYQARSAYTLSKMPKAMSKRKSTTTAPGQERSLTVTVKSLRNPPLDLRFSSQPLNTSILDVKASISKETGIAENKIKVLHKKKPVADSKVLKDLATDDETVVEFSVMVMGGAAALPKTDAQKDVAQGTSGTEVLEGQDFWDDLKGFLLQRIRDEQVATDLTSTFQTAWKVKRSMS

SEQ ID NO: 27963 - DNA, 1365 bp, Muscodor strobelii
  misc_feature: SGI EST ID NO. CUFF.66678.0
  misc_feature: Variant of the nucleotide sequence at SEQ ID NO 27961
ccacgattgaggtgggatgttctgcaacgccacagttgaatgcgggacacacctcgccgtgcctcattcaccttcggttccttcagtgaagagcgacgagtgtttgcgtgtgacagtttgatacatttgacattccctattcacgcattgcccataaatatacatagttcgtgagagacaagagacatatcaccatgaccgaagtatccttcgccaaatccttcctggccgcgctggacggccggcccatcaagctctcgcccgaccatgtcgaagatcccaagacataccaggcgcgcagtgcctacaccctctcaaaaatgcccaaagcaatgagcaaacgcaaatccaccaccacagcaccaggccaagaacgcagtctcaccgtaaccgtaaagtccctgcgaaatccacccctcgatctacgcttctcctcccaacccctcaacacctccatactcgacgtcaaggcctcgatatccaaggaaaccggcatcgccgagaacaagatcaaggttttgcataagaagaagcccgtcgcagatagcaaggtgctgaaggatctggccactgatgatgagactgtcgtggagttctccgtcatggtcatgggtggtgcggcggctttgcctaagacggatgcacagaaggatgttgctcagggcacgagcgggacagaggtgctagagggccaggatttctgggacgatctgaaagggttcctcttgcagcgcatacgggacgagcaggtggctacagatctcacgagtacctttcaaacggcgtggaaggtcaagcgatcaatgtcatgatagggtcaggggcttgaggctgtcttacaaagtataaaggctgtcttcgagagatttatgagatacgtgtctgacgaatgaatcacattatgggtgggacaaaaacacgatagagcaccgtggtgaagacagcgtgtgactgagtccaaatatggcatgggattagtgtggcgccatcgttggctgacatcaaatctggtattgctgtgtagactatctccccacgccaggtcgtcacgtcgccaaaccgctctctttcttttctaccatattctcgctgtggttcagccatcttcccatcatccggtgtcgttagcgtcgtggaccaaggctagccagcctctagtcgttctgtatcttttggtagagcgtctcttgaatacgtccaagcggcgtgtccaagtagaaagaatttagatggcgttcttgtcgacctgcttcagcactacctggtactcgagctcctcgctgtccgcggccttgatgtccgcggcgatgccgttgaatgagcgcaggagagcctgcttggacgaggcgtataccatcttggcct

SEQ ID NO: 27964 - DNA, 477 bp, Muscodor strobelii
  misc_feature: SGI cDNA ID NO. 569589
  misc_feature: Encodes the peptide sequence at SEQ ID NO 27965
atgtctcaatcaggagccggcatcgcggaggagtgcatactgaagttcaacgaactcaagctcaacaagaagtggaagtatgtcatctacaagctgtccgacgacaacaagcaattcgtggtcgaggacgctggcgaggcctcgggctctgatgctgaggccaactgggaggtcctgaaggagaagctcctcgctgccaagacaaagagcaagacgggtcaagtcggtgatggtcctcgatacgctatctacgacttcgactaccagcttgctcccggagagggttcccgaagcaaggttgtcttcatctcctgggtccccgactctgccggtgtcatggccaagatggtatacgcctcgtccaagcaggctctcctgcgctcattcaacggcatcgccgcggacatcaaggccgcggacagcgaggagctcgagtaccaggtagtgctgaagcaggtcgacaagaacgccatctaa

SEQ ID NO: 27965 - protein, 158 aa, Muscodor strobelii
  misc_feature: SGI Peptide ID NO. 569589
  misc_feature (10)..(154): Pfam Id: PF00241 Pfam Desc: Cofilin/tropomyosin-type actin-binding protein
  misc_feature (1)..(155): NCBI GI: 171690290 Blast Desc: protein product [Podospora anserina] gi|170945093|emb|CAP71204.1| protein product [Podospora anserina]
  misc_feature (1)..(155): NCBI GI: 256732507 Blast Desc: NECHADRAFT_78771 [Nectria haematococca mpVI 77-13-4]
  misc_feature (1)..(155): NCBI GI: 39942168 Blast Desc: cofilin, [Magnaporthe grisea 70-15] gi|145015855|gb|EDK00345.1| cofilin, [Magnaporthe grisea 70-15]
  misc_feature (11)..(155): NCBI GI: 46123735 Blast Desc: FG06245.1 [Gibberella zeae PH-1] gi|118601091|sp|Q4I963.1|COFI_GIBZE RecName: Full=Cofilin; AltName: Full=Actin-depolymerizing factor 1
  misc_feature (4)..(155): NCBI GI: 116204699 Blast Desc: CHGG_10233 [Chaetomium globosum CBS 148.51] gi|88176361|gb|EAQ83829.1| CHGG_10233 [Chaetomium globosum CBS 148.51]
  misc_feature (1)..(155): NCBI GI: 164428037 Blast Desc: NCU01587 [Neurospora crassa OR74A] gi|16416030|emb|CAB91380.2| related to cofilin [Neurospora crassa] gi|157071984|gb|EAA27262.2| [Neurospora crassa OR74A]
  misc_feature (1)..(155): NCBI GI: 189190434 Blast Desc: cofilin [Pyrenophora tritici-repentis Pt-1C-BFP] gi|187973162|gb|EDU40661.1| cofilin [Pyrenophora tritici-repentis Pt-1C-BFP]
  misc_feature (1)..(155): NCBI GI: 156063944 Blast Desc: SS1G_02090 [Sclerotinia sclerotiorum 1980] gi|154697424|gb|EDN97162.1| SS1G_02090 [Sclerotinia sclerotiorum 1980]
  misc_feature (1)..(157): NCBI GI: 126139667 Blast Desc: PICST_73864 [Pichia stipitis CBS 6054] gi|126093638|gb|ABN68327.1| [Pichia stipitis CBS 6054]
  misc_feature (1)..(155): NCBI GI: 241955249 Blast Desc: actin-depolymerizing factor, ; cofilin, [Candida dubliniensis CD36] gi|223643687|emb|CAX41420.1| actin-depolymerizing factor, ; cofilin, [Candida dubliniensis
MSQSGAGIAEECILKFNELKLNKKWKYVIYKLSDDNKQFVVEDAGEASGSDAEANWEVLKEKLLAAKTKSKTGQVGDGPRYAIYDFDYQLAPGEGSRSKVVFISWVPDSAGVMAKMVYASSKQALLRSFNGIAADIKAADSEELEYQVVLKQVDKNAI

SEQ ID NO: 27966 - DNA, 2562 bp, Muscodor strobelii
  misc_feature: SGI EST ID NO. CUFF.66679.2
  misc_feature: Variant of the nucleotide sequence at SEQ ID NO 27964
cccttcaatctcacggccaaccagctcagccccaccatagccgtcatcccctggacctcactcacaggctcccaacttgtcgcagcattatttcgtctgcctgataggtagctttagcttaacaacaacaacaaataacaatagaattagctgcgttgatacctgatgttcactccgtgcgtttcacaagctgacaattcactgaacgtgcgtatttgctgtggctgagtagtagtgttctgaatttggcatcagcccatccaagcaagttggaactcccatcgatttgtttccccccctccattgcgacagcccctcgcgctgggtccccaccagtagcctggctagagcaccaccatcccgcatctctttcgactgcgtctcgccgttgacactcacctccttcccattttctctacagaccatcgccgttttgtatttcggcctcgcgcactgacttttgtcatccgtagctattgcagttaatctctttgactgcacgccttactattcctcctgttagttctgcctagcctcatcgaccgattctatatctgccgacactcccccgcctctttcgacactatcgcgctgaccttgaacgacgactcgtagcttccccccaaacacctcgctcacaaccaccatgtctcaatcagggttcgtacttcccaccagatccctcgctccccgtagcgcccgcgtccccacgaatccgtcgtcgcatcgcgtgctctgagggaggttgaaagctcatctggtaacaaatgactgatcgtattcaatacttgcagagccggcatcgcggaggagtgcatactgaagttcaacgaactcaagctcaacaagaagtggaagtatgtcatctacaagctgtccgacgacaacaagcaattcgtggtcgaggacgctggcgaggcctcgggctctgatgctgaggccaactgggaggtcctgaaggagaagctcctcgctgccaagacaaagagcaagacgggtcaagtcggtgatggtcctcgatacgctatctacgacttcgactaccagcttgctcccggagagggttcccgaagcaaggttgtcttcatctcctgggtccccgactctgccggtgtcatggccaagatggtatacgcctcgtccaagcaggctctcctgcgctcattcaacggcatcgccgcggacatcaaggccgcggacagcgaggagctcgagtaccaggtagtgctgaagcaggtcgacaagaacgccatctaaattctttctacttggacacgccgcttggacgtattcaagagacgctctaccaaaagatacagaacgactagaggctggctagccttggtccacgacgctaacgacaccggatgatgggaagatggctgaaccacagcgagaatatggtagaaaagaaagagagcggtttggcgacgtgacgacctggcgtggggagatagtctacacagcaataccagatttgatgtcagccaacgatggcgccacactaatcccatgccatatttggactcagtcacacgctgtcttcaccacggtgctctatcgtgtttttgtcccacccataatgtgattcattcgtcagacacgtatctcataaatctctcgaagacagcctttatactttgtaagacagcctcaagcccctgaccctatcatgacattgatcgcttgaccttccacgccgtttgaaaggtactcgtgagatctgtagccacctgctcgtcccgtatgcgctgcaagaggaaccctttcagatcgtcccagaaatcctggccctctagcacctctgtcccgctcgtgccctgagcaacatccttctgtgcatccgtcttaggcaaagccgccgcaccacccatgaccatgacggagaactccacgacagtctcatcatcagtggccagatccttcagcaccttgctatctgcgacgggcttcttcttatgcaaaaccttgatcttgttctcggcgatgccggtttccttggatatcgaggccttgacgtcgagtatggaggtgttgaggggttgggaggagaagcgtagatcgaggggtggatttcgcagggactttacggttacggtgagactgcgttcttggcctggtgctgtggtggtggatttgcgtttgctcattgctttgggcatttttgagagggtgtactgtttctcatcttagccattaaacagcacgactagggcgccctctaaatgaggaagatatagggaaaagagaggcttacggcactgcgcgcctggtatgtcttgggatcttcgacatggtcgggcgagagcttgatgggccggccgtccagcgcggccaggaaggatttggcgaaggatacttcggtcatggtgatatgtctcttgtctctcacgaactatgtatatttatgggcaatgcgtgaatagggaatgtcaaatgtatcaaactgtcacacgcaaacactcgtcgctcttcactgaaggaaccgaaggtgaatgaggcacggcgaggtgtgtcccgcattcaactgtggcgttgcagaacatcccacctcaatcgtgg

SEQ ID NO: 27967 - DNA, 537 bp, Muscodor strobelii
  misc_feature: SGI cDNA ID NO. 569590
  misc_feature: Encodes the peptide sequence at SEQ ID NO 27968
atgtctcaatcaggagccggcatcgcggaggagtgcatactgaagttcaacgaactcaagctcaacaagaagtggaagtatgtcatctacaagctgtccgacgacaacaagcaattcgtggtcgaggacgctggcgaggcctcgggctctgatgctgaggccaactgggaggtcctgaaggagaagctcctcgctgccaagacaaagagcaagacgggtcaagtcggtgatggtcctcgatacgctatctacgacttcgactaccagcttgctcccggagagggttcccgaagcaaggttgtcttcatctcctgggtccccgactctgccggtgtcatggttagtagagttccgtcccggcgcatcttgccacttgaaagattgctgaccatattccaggccaagatggtatacgcctcgtccaagcaggctctcctgcgctcattcaacggcatcgccgcggacatcaaggccgcggacagcgaggagctcgagtaccaggtagtgctgaagcaggtcgacaagaacgccatctaa

SEQ ID NO: 27968 - protein, 178 aa, Muscodor strobelii
  misc_feature: SGI Peptide ID NO. 569590
  misc_feature (10)..(174): Pfam Id: PF00241 Pfam Desc: Cofilin/tropomyosin-type actin-binding protein
  misc_feature (10)..(110): Pfam Id: PF00241 Pfam Desc: Cofilin/tropomyosin-type actin-binding protein
  misc_feature (134)..(174): Pfam Id: PF00241 Pfam Desc: Cofilin/tropomyosin-type actin-binding protein
  misc_feature (1)..(175): NCBI GI: 171690290 Blast Desc: protein product [Podospora anserina] gi|170945093|emb|CAP71204.1| protein product [Podospora anserina]
  misc_feature (1)..(175): NCBI GI: 256732507 Blast Desc: NECHADRAFT_78771 [Nectria haematococca mpVI 77-13-4]
  misc_feature (1)..(175): NCBI GI: 39942168 Blast Desc: cofilin, [Magnaporthe grisea 70-15] gi|145015855|gb|EDK00345.1| cofilin, [Magnaporthe grisea 70-15]
  misc_feature (11)..(175): NCBI GI: 46123735 Blast Desc: FG06245.1 [Gibberella zeae PH-1] gi|118601091|sp|Q4I963.1|COFI_GIBZE RecName: Full=Cofilin; AltName: Full=Actin-depolymerizing factor 1
  misc_feature (4)..(175): NCBI GI: 116204699 Blast Desc: CHGG_10233 [Chaetomium globosum CBS 148.51] gi|88176361|gb|EAQ83829.1| CHGG_10233 [Chaetomium globosum CBS 148.51]
  misc_feature (1)..(175): NCBI GI: 164428037 Blast Desc: NCU01587 [Neurospora crassa OR74A] gi|16416030|emb|CAB91380.2| related to cofilin [Neurospora crassa] gi|157071984|gb|EAA27262.2| [Neurospora crassa OR74A]
  misc_feature (1)..(175): NCBI GI: 189190434 Blast Desc: cofilin [Pyrenophora tritici-repentis Pt-1C-BFP] gi|187973162|gb|EDU40661.1| cofilin [Pyrenophora tritici-repentis Pt-1C-BFP]
  misc_feature (1)..(175): NCBI GI: 156063944 Blast Desc: SS1G_02090 [Sclerotinia sclerotiorum 1980] gi|154697424|gb|EDN97162.1| SS1G_02090 [Sclerotinia sclerotiorum 1980]
  misc_feature (1)..(177): NCBI GI: 126139667 Blast Desc: PICST_73864 [Pichia stipitis CBS 6054] gi|126093638|gb|ABN68327.1| [Pichia stipitis CBS 6054]
  misc_feature (1)..(175): NCBI GI: 241955249 Blast Desc: actin-depolymerizing factor, ; cofilin, [Candida dubliniensis CD36] gi|223643687|emb|CAX41420.1| actin-depolymerizing factor, ; cofilin, [Candida dubliniensis
MSQSGAGIAEECILKFNELKLNKKWKYVIYKLSDDNKQFVVEDAGEASGSDAEANWEVLKEKLLAAKTKSKTGQVGDGPRYAIYDFDYQLAPGEGSRSKVVFISWVPDSAGVMVSRVPSRRILPLERLLTIFQAKMVYASSKQALLRSFNGIAADIKAADSEELEYQVVLKQVDKNAI

SEQ ID NO: 27969 - DNA, 2562 bp, Muscodor strobelii; identical to SEQ ID NO: 27966
  misc_feature: SGI EST ID NO. CUFF.66679.2
  misc_feature: Variant of the nucleotide sequence at SEQ ID NO 27967

SEQ ID NO: 27970 - DNA, 1758 bp, Muscodor strobelii
  misc_feature: SGI cDNA ID NO. 569591
  misc_feature: Reduced expression when VOC is produced
  misc_feature: Encodes the peptide sequence at SEQ ID NO 27971
atgcagcgcgctctctcctcacgcgctagggcttcggccgtctcctctgccatgaccaagtaccgtggcgccggtgttggtcagcaggttcgcttcgctcacaaggagttgaagttcggtgtagagggccgcgccgcgctgctcgctggtgtcgagactcttgccaaagccgttgccaccacattaggtcccaagggccgtaatgtgctgattgagtccagctatggctctcccaaaatcacaaaggatggtgtaaccgtcgcaaaagccatctctctacaggataagttcgagaacctcggtgctcgcctcctccaagatgtcgcctccaagaccaacgagtctgccggtgacggtaccaccagtgccaccgtcctggcccgtgccatcttctccgagaccgtcaagaacgtcgccgccggctgcaaccccatggatctgcgccgtggtacccaggctgccgtcgatgccgtagtcgacttcctccacaagaacaagaaggacatcactaccagcgccgagattgcccaggtcgccaccatcagtgctaacggagacacccatattggtgagctcattgctaaggctatggagaaggtcggcaaggagggtgtcatcaccgtcaaggagggcaagaccatgaacgacgagctcgaggtcactgagggtatgcgcttcgaccgtggtttcgtctctccctacttcatcaccgacgccaaggcccagaaggtcgagttcgagaagcctttgatcctcctctccgagaagaagatctcggctgttcaggatatcatccccgctctcgaggcctccacccagcagcgacgacccctggtcatcattgctgaggacattgatggcgaggctctcgctgtctgcattctcaacaagctccgtggccagctccaagtggctgccgtcaaggcccccggcttcggtgacaaccgcaagtccatccttggcgatctcggtgtcctgaccaacggtaccgtcttcaccgacgagctcgacatcaagcttgagaaggctacacctgagttgctcggctccaccggctccattaccatcaccaaggaggacaccatcattctgaacggcgaaggcagcaaggacgctattgctcagcgctgcgagcagatccgtggtgtcatggctgaccccactacttccgagtacgagaaggagaagctccaggagcgtcttgccaagctctctggcggtgttgctgtcatcaaggttggtggctcttccgaggttgaggtcggtgagaagaaggaccgcttcgttgatgctcttaacgctactcgcgccgctgttgaggagggtattctgcctggtggcggcactgctctcatcaaggctgccagccaggccctgaaggatgtcaagaccaccaacttcgaccagcagcttggtgttagcatcatcaagaatgccatcacccgtcctgctcgcaccattgtcgagaacgctggtcttgagggctccgtcgttgtcggtaagctaatggatgagttcgccacggacttcaacaagggcttcgacagctccaagggcgagtacgtcgacatgatcaaagccggtattctcgatcccctcaaggtcgtccgcactggtctccgggacgctagtggtgttgcctctctgcttggtaccaccgaggtcgccattgtcgaggctcctgaagagaagtctgctcctcccatgggtggcatgggcggcatgggaggaatgggtggtatgggtggcatgatgtga

SEQ ID NO: 27971 - protein, 585 aa, Muscodor strobelii
  misc_feature: SGI Peptide ID NO. 569591
  misc_feature (54)..(561): Pfam Id: PF00118 Pfam Desc: TCP-1/cpn60 chaperonin family
  misc_feature (1)..(564): NCBI GI: 261356671 Blast Desc: heat shock protein [Verticillium albo-atrum VaMs.102]
  misc_feature (1)..(564): NCBI GI: 145608376 Blast Desc: heat shock protein 60, mitochondrial precursor [Magnaporthe grisea 70-15] gi|145015854|gb|EDK00344.1| heat shock protein 60, mitochondrial precursor [Magnaporthe grisea 70-15]
  misc_feature (1)..(566): NCBI GI: 46123737 Blast Desc: HS60_AJECA Heat shock protein 60, mitochondrial precursor (Antigen HIS-62) [Gibberella zeae PH-1]
  misc_feature (1)..(564): NCBI GI: 154277022 Blast Desc: heat shock protein 60, mitochondrial precursor [Ajellomyces capsulatus NAm1] gi|150414429|gb|EDN09794.1| heat shock protein 60, mitochondrial precursor [Ajellomyces capsulatus
  misc_feature (1)..(564): NCBI GI: 240276977 Blast Desc: hsp60-like protein [Ajellomyces capsulatus H143]
  misc_feature (1)..(564): NCBI GI: 225554633 Blast Desc: hsp60-like protein [Ajellomyces capsulatus G186AR]
  misc_feature (1)..(564): NCBI GI: 261194577 Blast Desc: chaperonin GroL [Ajellomyces dermatitidis SLH14081] gi|239588231|gb|EEQ70874.1| chaperonin GroL [Ajellomyces dermatitidis SLH14081]
  misc_feature (1)..(567): NCBI GI: 119480793 Blast Desc: antigenic mitochondrial protein HSP60, [Neosartorya fischeri NRRL 181] gi|119408579|gb|EAW18528.1| antigenic mitochondrial protein HSP60, [Neosartorya fischeri NRRL 181]
  misc_feature (1)..(567): NCBI GI: 71001164 Blast Desc: antigenic mitochondrial protein HSP60 [Aspergillus fumigatus Af293] gi|66852901|gb|EAL93225.1| antigenic mitochondrial protein HSP60, [Aspergillus fumigatus Af293] HSP60,
  misc_feature (1)..(565): NCBI GI: 169626377 Blast Desc: SNOG_16475 [Phaeosphaeria nodorum SN15] gi|111055053|gb|EAT76173.1| SNOG_16475 [Phaeosphaeria nodorum SN15]
  misc_feature: Useful for introducing or modulating the production of volatile compounds
MQRALSSRARASAVSSAMTKYRGAGVGQQVRFAHKELKFGVEGRAALLAGVETLAKAVATTLGPKGRNVLIESSYGSPKITKDGVTVAKAISLQDKFENLGARLLQDVASKTNESAGDGTTSATVLARAIFSETVKNVAAGCNPMDLRRGTQAAVDAVVDFLHKNKKDITTSAEIAQVATISANGDTHIGELIAKAMEKVGKEGVITVKEGKTMNDELEVTEGMRFDRGFVSPYFITDAKAQKVEFEKPLILLSEKKISAVQDIIPALEASTQQRRPLVIIAEDIDGEALAVCILNKLRGQLQVAAVKAPGFGDNRKSILGDLGVLTNGTVFTDELDIKLEKATPELLGSTGSITITKEDTIILNGEGSKDAIAQRCEQIRGVMADPTTSEYEKEKLQERLAKLSGGVAVIKVGGSSEVEVGEKKDRFVDALNATRAAVEEGILPGGGTALIKAASQALKDVKTTNFDQQLGVSIIKNAITRPARTIVENAGLEGSVVVGKLMDEFATDFNKGFDSSKGEYVDMIKAGILDPLKVVRTGLRDASGVASLLGTTEVAIVEAPEEKSAPPMGGMGGMGGMGGMGGMM

SEQ ID NO: 27972 - DNA, 2303 bp, Muscodor strobelii
  misc_feature: SGI EST ID NO. CUFF.65905.0
  misc_feature: Variant of the nucleotide sequence at SEQ ID NO 27970
cgaaaactgcggcgccaaattttttgaaaagctcccccagattctccaaatccatcctccaaacattcttctctccatcctcactatcgccgtccatccttcctctcttcccttgtacttattaatcttgtgcgatatttcctctcatcccgtctccctttgtaatatcacatcacatcacatctttcacaatgcagcgcgctctctcctcacgcgctagggcttcggccgtctcctctgccatgaccaagtaccgtggcgccggtgttggtcagcaggttcgcttcgctcacaaggagttgaagttcggtgtagagggccgcgccgcgctgctcgctggtgtcgagactcttgccaaagccgttgccaccacattaggtcccaagggccgtaatgtgctgattgagtccagctatggctctcccaaaatcacaaaggatggtgtaaccgtcgcaaaagccatctctctacaggataagttcgagaacctcggtgctcgcctcctccaagatgtcgcctccaagaccaacgagtctgccggtgacggtaccaccagtgccaccgtcctggcccgtgccatcttctccgagaccgtcaagaacgtcgccgccggctgcaaccccatggatctgcgccgtggtacccaggctgccgtcgatgccgtagtcgacttcctccacaagaacaagaaggacatcactaccagcgccgagattgcccaggtcgccaccatcagtgctaacggagacacccatattggtgagctcattgctaaggctatggagaaggtcggcaaggagggtgtcatcaccgtcaaggagggcaagaccatgaacgacgagctcgaggtcactgagggtatgcgcttcgaccgtggtttcgtctctccctacttcatcaccgacgccaaggcccagaaggtcgagttcgagaagcctttgatcctcctctccgagaagaagatctcggctgttcaggatatcatccccgctctcgaggcctccacccagcagcgacgacccctggtcatcattgctgaggacattgatggcgaggctctcgctgtctgcattctcaacaagctccgtggccagctccaagtggctgccgtcaaggcccccggcttcggtgacaaccgcaagtccatccttggcgatctcggtgtcctgaccaacggtaccgtcttcaccgacgagctcgacatcaagcttgagaaggctacacctgagttgctcggctccaccggctccattaccatcaccaaggaggacaccatcattctgaacggcgaaggcagcaaggacgctattgctcagcgctgcgagcagatccgtggtgtcatggctgaccccactacttccgagtacgagaaggagaagctccaggagcgtcttgccaagctctctggcggtgttgctgtcatcaaggttggtggctcttccgaggttgaggtcggtgagaagaaggaccgcttcgttgatgctcttaacgctactcgcgccgctgttgaggagggtattctgcctggtggcggcactgctctcatcaaggctgccagccaggccctgaaggatgtcaagaccaccaacttcgaccagcagcttggtgttagcatcatcaagaatgccatcacccgtcctgctcgcaccattgtcgagaacgctggtcttgagggctccgtcgttgtcggtaagctaatggatgagttcgccacggacttcaacaagggcttcgacagctccaagggcgagtacgtcgacatgatcaaagccggtattctcgatcccctcaaggtcgtccgcactggtctccgggacgctagtggtgttgcctctctgcttggtaccaccgaggtcgccattgtcgaggctcctgaagagaagtctgctcctcccatgggtggcatgggcggcatgggaggaatgggtggtatgggtggcatgatgtgaaaagctgattgaggcagatctctttctcttttcctgtatcaaaagcaaaaaatgtctgggctaaaaaggggagcattgaatttggtgttcggatggaattttctcatcttacgcggccatgtaatcactcctccctctcccctccaccgtgtatattgttcatacgtccttctactactgatatcccgagcggcgttgtaaagagttgtatactagaatctaccaagctacccttgggaggtctgccgctgctattgcgtagttggcatcatcaatcaaatttgacaatcaaccatgctttccaggctgcagtgtgactgaattctcctacaactaatagtgaatggatccgaa

SEQ ID NO: 27973 - DNA, 885 bp, Muscodor strobelii
  misc_feature: SGI cDNA ID NO. 569592
  misc_feature: Encodes the peptide sequence at SEQ ID NO 27974
atgtcggctatcgcaaaaaccatagttgcgactggtgcaacttctggcatcggtttcgagctcatcaaacagttgcttggccagacacagccttataagttgatcctgggtgctcgtgacataccaagaacacaagctgcatacgacgagatcaaatacgacaataccaagcatgacctgactattgttcctctagagttgaacaatatgacctctgtcaaagggtttgctaagcagactcttgagaagcttggcaaaagtcccatagatgttctagtcctcaatgctgcaacaggcatggctaagcagaaagctgaaaagggacccttcggctctaagtggactgaggcctatctcgtcaatcatctttcgcaacattatttgcttcatctgcttcgccctaagttggaggaatccagggcccgcgtggtagtggtatcatctggcgctatccgtcaagtgactgacgccagcactctcgagcacgaaatgctgtctgccacagaatcgaaagaagcctggatttatcctgctactaaattcattcagtttgtcaatgcgcaatggtggcggcgccaattgttgggcaaatgcgacgtagtcagtgtgtcgcctggcttaattcctcacacaggtctaggtcgtggatcgggaatgaccataccggccaatcttcccgatgctaagagcatccctgaaggtgcccaaagtatctacagagcttttgccgagcctgttcccaaagaccctgagcagatcttcctcacgagttggggcgaatggtggccgaaggatgtctatgagctttcacttgaccagaagctccaggacaagtggtcaccaacgcaagaagaaatcgagacggaggaaggtgtgactgcttaa

SEQ ID NO: 27974 - protein, 294 aa, Muscodor strobelii
  misc_feature: SGI Peptide ID NO. 569592
  misc_feature (1)..(294): NCBI GI: 256729059 Blast Desc: NECHADRAFT_104309 [Nectria haematococca mpVI 77-13-4]
  misc_feature (1)..(294): NCBI GI: 261354334 Blast Desc: conserved [Verticillium albo-atrum VaMs.102]
  misc_feature (6)..(292): NCBI GI: 39969575 Blast Desc: MGG_10397 [Magnaporthe grisea 70-15] gi|145015133|gb|EDJ99701.1| MGG_10397 [Magnaporthe grisea 70-15]
  misc_feature (1)..(292): NCBI GI: 255933788 Blast Desc: Pc12g14690 [Penicillium chrysogenum Wisconsin 54-1255] gi|211582892|emb|CAP81096.1| Pc12g14690 [Penicillium chrysogenum Wisconsin 54-1255]
  misc_feature (1)..(292): NCBI GI: 85097684 Blast Desc: NCU05535 [Neurospora crassa OR74A] gi|28921989|gb|EAA31261.1| conserved [Neurospora crassa OR74A]
  misc_feature (4)..(292): NCBI GI: 145250507 Blast Desc: An15g02280 [Aspergillus niger] gi|134082287|emb|CAK42331.1| protein product [Aspergillus niger]
  misc_feature (22)..(293): NCBI GI: 46138819 Blast Desc: FG10924.1 [Gibberella zeae PH-1]
  misc_feature (4)..(292): NCBI GI: 169781040 Blast Desc: [Aspergillus oryzae RIB40] gi|83773724|dbj|BAE63851.1| protein product [Aspergillus oryzae]
  misc_feature (4)..(292): NCBI GI: 238504725 Blast Desc: short-chain dehydrogenases/reductase, [Aspergillus flavus NRRL3357] gi|220689707|gb|EED46057.1| short-chain dehydrogenases/reductase, [Aspergillus flavus NRRL3357]
  misc_feature (6)..(293): NCBI GI: 171681594 Blast Desc: protein product [Podospora anserina] gi|170940756|emb|CAP66405.1| protein product [Podospora anserina]
  misc_feature (7)..(215): SWISSPROT Homolog: EC 1.3.1.33 Protochlorophyllide reductase
MSAIAKTIVATGATSGIGFELIKQLLGQTQPYKLILGARDIPRTQAAYDEIKYDNTKHDLTIVPLELNNMTSVKGFAKQTLEKLGKSPIDVLVLNAATGMAKQKAEKGPFGSKWTEAYLVNHLSQHYLLHLLRPKLEESRARVVVVSSGAIRQVTDASTLEHEMLSATESKEAWIYPATKFIQFVNAQWWRRQLLGKCDVVSVSPGLIPHTGLGRGSGMTIPANLPDAKSIPEGAQSIYRAFAEPVPKDPEQIFLTSWGEWWPKDVYELSLDQKLQDKWSPTQEEIETEEGVTA

SEQ ID NO: 27975 - DNA, 4396 bp, Muscodor strobelii
  misc_feature: SGI EST ID NO. CUFF.65973.0
  misc_feature: Variant of the nucleotide sequence at SEQ ID NO 27973
cggacatactgcttgtagaaattcttctaggtgcatataaagaacctattccttcttgtgaaatcgaaacactctcttgctattgcaacattgtcctcaagtcaacataactacgacttagtaacctataattaatctcatcgtcatcatgtcggctatcgcaaaaaccatagttgcgactggtgcaacttctggcatcggtttcgagctcatcaaacagttgcttggccagacacagccttataagttgatcctgggtgctcgtgacataccaagaacacaagctgcatacgacgagatcaaatacgacaataccaagcatgacctgactattgttcctctagagttgaacaatatgacctctgtcaaagggtttgctaagcagactcttgagaagcttggcaaaagtcccatagatgttctagtcctcaatgctgcaacaggcatggctaagcagaaagctgaaaagggacccttcggctctaagtggactgaggcctatctcgtcaatcatctttcgcaacattatttgcttcatctgcttcgccctaagttggaggaatccagggcccgcgtggtagtggtatcatctggcgctatccgtcaagtgactgacgccagtaagggatctcatcgagatttgtgcaaagcctcttactaacattgtgttcgaaggcactctcgagcacgaaatgctgtctgccacagaatcgaaagaagcctggatttatcctgctactaaattcattcagtttgtcaatgcgcaatggtggcggcgccaattgttgggcaaatgcgacgtagtcagtgtgtcgcctggcttaattcctcacacaggtctaggtcgtggatcgggaatgaccataccggccaatcttcccgatgctaagagcatccctgaaggtgcccaaagtatctacagagcttttgccgagcctgttcccaaagaccctgagcagatcttcctcacgagttggggcgaatggtggccgaaggatgtctatgagctttcacttgaccagaagctccaggacaagtggtcaccaacgcaagaagaaatcgagacggaggaaggtgtgactgcttaatgtgtgaatttcaccctcttacgaagtcgcccgcttattcggcccctcttgtaaattgatacagcatgcttttaggtacttggtataagggttagacgaatgtatatcgcctgcgtttattcgtagacctattcggtaattacatgtagttagaaagccaccctattcataatgtttctgcacgagtgtctatgaaaattcccgaaggttccacgaccacccgcccctcagcgccgtgacacactttctccagactatcttggccagatgtatgagtctcgcgtgttagcgaaaatagcgaaaatagaaaacgtattgagcctcacgcagtgctcagccgtctccctttcgcttatttctgccaactgatgaagataggacttgtaatgactttcccgccgtcatgttctctgccgacgaagtacactgcttggtcatagctctccgcctgaagtgcgggctttatagcacatctaccctgcacacgcttgggcaaaggaatatcaggtcctatctctatcgaaacaaacagatccgcacctccagctataagacaaatgtttgaccgccaggctggaaagcttgatttccggtcatgatcagattgaactctggttgtgccttgtgaggattgcctgctagtgcatccccgactttgacgtagccacctaatgttccagtgacacttactgcctttgggcattcgttattttcgaagacgatatcaacgccgtcaaaatcgccactcgtatgtgttttgaatactacatgggtatctgatttgcattcaacgacttcttcgggttggtccttcacacccccaaaaggacggatggaactgggactttctaccttggccccttggaaaatgatggatccgtcccagactgcttcacgataccggtcataaagacgcgccccaccccattttacacgcaacctcattttgcccgggttcatggagccgtgtttcttactagggagcgatgcagcttgttcttgcgcgagtttttgcgcgatatcgtggtgaagaatcttccccgtgccatcccatacttctatcgactcaaaaccatttcgcccgagaaagtggtagtacaagatcaaggggtcgctcatccgagcaattacgtcgtcgccctgcatctcgccatcttcagtagtagcgatgccaaccagtcgttctccggttgtcgcaaacgttcgtcgtgctcgaagagcctttgcgacattttcacggtcgagacggtcggataatacgccggtcaagcctccttttgtaccaaagacagctgttccaggcacaccacctccacaacgccctcgatgctcatctgagttagccgagacacccattttatagccacggctcaccgcatctcgtaaaagccattcgaataggccccaagcactgccaatttcgagcagccgctcaagtttgggatgatgccacgctaagttacatcttcgcccgcctacatgtgggatgaggagatgagactctggagaatgagcgtatgtcgcatacagctcatccaacggccaagcgccaggtactaactctgctggaccatcttcattccattcgaaacttcgcgctacattgccatgtttatcgaaagggaattcgggggtgaacttcgggtcatccaagaacaccacattgtggtcgccacccgcggcgctgttgccacaccattctgtaccgggaaacacaacaaactccccttcagagttgacctgtcttattgtctccagcgttgtatcccatcgggctttggtgacgttgaaatcatttgccgtgtagccaacgatatcaagacccgcgacttgttgcgcgtaggagaagttatatatcgtcgagttagtcccaacagtgtcatcagaatgaacgtgcaaatcggcatatagcgggcgcggtataggaagcgatgagtctgcgctgatatactctatagccgtatgaccctgactcaaaccctgcccttcgacctccactatgagtacgtaatcgccgtcttctggtagtgaaaatgacgtttttatcacggcccagccttccgtctgaaagtccatttggtgcgataagtaatagtcttcagggccagggataggcgttatcaagcggacttctttcggtatccccttccttaccttgattctagcgtatcctttgaagcctacagcggtgttgccccatttgtcctctaaatgtatgaagattgggaactcgccagagcccgttctcacaagacgaggagtgatgactttgacttgcgcaacctgacctggaacgattgggaacgcgagatcgggtttaataggcgcaaaccgtgatgtgcctacagggtcgatataccatctcatgagaaacttatcttcgacgaacgtctgcactcttgtccccttcgcaccccatcgccgatcgcccaaacgaaccagtattttatccccggggttgagatagccgtcaacaacatcgataatgatagctttctgaaacggtctctcgtgtcccttttggtcaaagcgtactgctaatgactgcacagttgcgggcgtttgacccgggtgcaggtcgcccgcgacgtattcaaccgacacatagttgtcttgttttcgatctgaagtctggaacagcgcccagtccgagtaaaacttgaacgtgcctttgatccacgcgccatcagctagaccactgcctccgactgtgtattcaataagaatttccctccattcacctgcaacgagtgtttgcgtgtcgcatttcaaactccccagaaatggcaggctcttagtgtgctgatatagcccttccggcgcgaagtactggccggctttagcgacaagctcttcgtcggacaacgttttcatttcgttagagaggagtatgacgactcttgtgattctgtatagacgagaagctcgagcgcaaacgaaccagcctttgagagacggtccccatcacgtgatctgacatcccggacagatcttgcatcgagacacccggatcggctcccgaagaggggcatatacgaataccaattgcagtacagcattgtttgccgtgatggctccggcccacgaacagtcctacggtcgccgatagaacgtggtgtttcgcgggtatagcctcgaacgccatcatcgatagaatggcgtgataccgatccacatatcctgaatcatacacggattactttgtatacgaaccggcgaattaggggcatctccgattagtaatgaaagtcataactctacaggtaagactctacaagattgccatggtagagtatgtgaactatttc

SEQ ID NO: 27976 - DNA, 2328 bp, Muscodor strobelii
  misc_feature: SGI cDNA ID NO. 569593
  misc_feature: Reduced expression when VOC is produced
  misc_feature: Encodes the peptide sequence at SEQ ID NO 27977
atgaaaacgttgtccgacgaagagcttgtcgctaaagccggccagtacttcgcgccggaagggctatatcagcacactaagagcctgccatttctggggagtttgaaatgcgacacgcaaacactcgttgcaggtgaatggagggaaattcttattgaatacacagtcggaggcagtggtctagctgatggcgcgtggatcaaaggcacgttcaagttttactcggactgggcgctgttccagacttcagatcgaaaacaagacaactatgtgtcggttgaatacgtcgcgggcgacctgcacccgggtcaaacgcccgcaactgtgcagtcattagcagtacgctttgaccaaaagggacacgagagaccgtttcagaaagctatcattatcgatgttgttgacggctatctcaaccccggggataaaatactggttcgtttgggcgatcggcgatggggtgcgaaggggacaagagtgcagacgttcgtcgaagataagtttctcatgagatggtatatcgaccctgtaggcacatcacggtttgcgcctattaaacccgatctcgcgttcccaatcgttccaggtcaggttgcgcaagtcaaagtcatcactcctcgtcttgtgagaacgggctctggcgagttcccaatcttcatacatttagaggacaaatggggcaacaccgctgtaggcttcaaaggatacgctagaatcaaggtaaggaaggggataccgaaagaagtccgcttgataacgcctatccctggccctgaagactattacttatcgcaccaaatggactttcagacggaaggctgggccgtgataaaaacgtcattttcactaccagaagacggcgattacgtactcatagtggaggtcgaagggcagggtttgagtcagggtcatacggctatagagtatatcagcgcagactcatcgcttcctataccgcgcccgctatatgccgatttgcacgttcattctgatgacactgttgggactaactcgacgatatataacttctcctacgcgcaacaagtcgcgggtcttgatatcgttggctacacggcaaatgatttcaacgtcaccaaagcccgatgggatacaacgctggagacaataagacaggtcaactctgaaggggagtttgttgtgtttcccggtacagaatggtgtggcaacagcgccgcgggtggcgaccacaatgtggtgttcttggatgacccgaagttcacccccgaattccctttcgataaacatggcaatgtagcgcgaagtttcgaatggaatgaagatggtccagcagagttagtacctggcgcttggccgttggatgagctgtatgcgacatacgctcattctccagagtctcatctcctcatcccacatgtaggcgggcgaagatgtaacttagcgtggcatcatcccaaacttgagcggctgctcgaaattggcagtgcttggggcctattcgaatggcttttacgagatgcggtgagccgtggctataaaatgggtgtctcggctaactcagatgagcatcgagggcgttgtggaggtggtgtgcctggaacagctgtctttggtacaaaaggaggcttgaccggcgtattatccgaccgtctcgaccgtgaaaatgtcgcaaaggctcttcgagcacgacgaacgtttgcgacaaccggagaacgactggttggcatcgctactactgaagatggcgagatgcagggcgacgacgtaattgctcggatgagcgaccccttgatcttgtactaccactttctcgggcgaaatggttttgagtcgatagaagtatgggatggcacggggaagattcttcaccacgatatcgcgcaaaaactcgcgcaagaacaagctgcatcgctccctagtaagaaacacggctccatgaacccgggcaaaatgaggttgcgtgtaaaatggggtggggcgcgtctttatgaccggtatcgtgaagcagtctgggacggatccatcattttccaaggggccaaggtagaaagtcccagttccatccgtccttttgggggtgtgaaggaccaacccgaagaagtcgttgaatgcaaatcagatacccatgtagtattcaaaacacatacgagtggcgattttgacggcgttgatatcgtcttcgaaaataacgaatgcccaaaggcagtaagtgtcactggaacattaggtggctacgtcaaagtcggggatgcactagcaggcaatcctcacaaggcacaaccagagttcaatctgatcatgaccggaaatcaagctttccagcctggcggtcaaacatttgtcttatag

SEQ ID NO: 27977 - protein, 775 aa, Muscodor strobelii
  misc_feature: SGI Peptide ID NO. 569593
  misc_feature (13)..(766): NCBI GI: 217978594 Blast Desc: Msil_2450 [Methylocella silvestris BL2] gi|217503970|gb|ACK51379.1| conserved [Methylocella silvestris BL2]
  misc_feature (12)..(763): NCBI GI: 254000340 Blast Desc: Msip34_2639 [Methylovorus sp. SIP3-4] gi|253987019|gb|ACT51876.1| conserved [Methylovorus sp. SIP3-4]
  misc_feature (18)..(762): NCBI GI: 218662297 Blast Desc: RetlI_23963 [Rhizobium etli IE4771]
  misc_feature (18)..(775): NCBI GI: 218510972 Blast Desc: RetlB5_28372 [Rhizobium etli Brasil 5]
  misc_feature (9)..(769): NCBI GI: 91780396 Blast Desc: Bxe_C0340 [Burkholderia xenovorans LB400] gi|91693056|gb|ABE36253.1| Bxe_C0340 [Burkholderia xenovorans LB400]
  misc_feature (9)..(775): NCBI GI: 209515229 Blast Desc: conserved [Burkholderia sp. H160] gi|209504210|gb|EEA04199.1| conserved [Burkholderia sp. H160]
  misc_feature (4)..(769): NCBI GI: 254562514 Blast Desc: METDI4132 [Methylobacterium extorquens DM4] gi|254269792|emb|CAX25765.1| conserved [Methylobacterium extorquens DM4]
  misc_feature (6)..(769): NCBI GI: 163852752 Blast Desc: Mext_3337 [Methylobacterium extorquens PA1] gi|163664357|gb|ABY31724.1| conserved [Methylobacterium extorquens PA1]
  misc_feature (4)..(769): NCBI GI: 218531593 Blast Desc: Mchl_3662 [Methylobacterium chloromethanicum CM4] gi|218523896|gb|ACK84481.1| conserved [Methylobacterium chloromethanicum CM4]
  misc_feature (14)..(775): NCBI GI: 254250410 Blast Desc: BCPG_05302 [Burkholderia cenocepacia PC184] gi|124879544|gb|EAY66900.1| BCPG_05302 [Burkholderia cenocepacia PC184]
  misc_feature: Useful for introducing or modulating the production of volatile compounds
MKTLSDEELVAKAGQYFAPEGLYQHTKSLPFLGSLKCDTQTLVAGEWREILIEYTVGGSGLADGAWIKGTFKFYSDWALFQTSDRKQDNYVSVEYVAGDLHPGQTPATVQSLAVRFDQKGHERPFQKAIIIDVVDGYLNPGDKILVRLGDRRWGAKGTRVQTFVEDKFLMRWYIDPVGTSRFAPIKPDLAFPIVPGQVAQVKVITPRLVRTGSGEFPIFIHLEDKWGNTAVGFKGYARIKVRKGIPKEVRLITPIPGPEDYYLSHQMDFQTEGWAVIKTSFSLPEDGDYVLIVEVEGQGLSQGHTAIEYISADSSLPIPRPLYADLHVHSDDTVGTNSTIYNFSYAQQVAGLDIVGYTANDFNVTKARWDTTLETIRQVNSEGEFVVFPGTEWCGNSAAGGDHNVVFLDDPKFTPEFPFDKHGNVARSFEWNEDGPAELVPGAWPLDELYATYAHSPESHLLIPHVGGRRCNLAWHHPKLERLLEIGSAWGLFEWLLRDAVSRGYKMGVSANSDEHRGRCGGGVPGTAVFGTKGGLTGVLSDRLDRENVAKALRARRTFATTGERLVGIATTEDGEMQGDDVIARMSDPLILYYHFLGRNGFESIEVWDGTGKILHHDIAQKLAQEQAASLPSKKHGSMNPGKMRLRVKWGGARLYDRYREAVWDGSIIFQGAKVESPSSIRPFGGVKDQPEEVVECKSDTHVVFKTHTSGDFDGVDIVFENNECPKAVSVTGTLGGYVKVGDALAGNPHKAQPEFNLIMTGNQAFQPGGQTFVL

SEQ ID NO: 27978 - DNA, 810 bp, Muscodor strobelii
  misc_feature: SGI cDNA ID NO. 569594
  misc_feature: Encodes the peptide sequence at SEQ ID NO 27979
atgggtgtctcggctaactcagatgagcatcgagggcgttgtggaggtggtgtgcctggaacagctgtctttggtacaaaaggaggcttgaccggcgtattatccgaccgtctcgaccgtgaaaatgtcgcaaaggctcttcgagcacgacgaacgtttgcgacaaccggagaacgactggttggcatcgctactactgaagatggcgagatgcagggcgacgacgtaattgctcggatgagcgaccccttgatcttgtactaccactttctcgggcgaaatggttttgagtcgatagaagtatgggatggcacggggaagattcttcaccacgatatcgcgcaaaaactcgcgcaagaacaagctgcatcgctccctagtaagaaacacggctccatgaacccgggcaaaatgaggttgcgtgtaaaatggggtggggcgcgtctttatgaccggtatcgtgaagcagtctgggacggatccatcattttccaaggggccaaggtagaaagtcccagttccatccgtccttttgggggtgtgaaggaccaacccgaagaagtcgttgaatgcaaatcagatacccatgtagtattcaaaacacatacgagtggcgattttgacggcgttgatatcgtcttcgaaaataacgaatgcccaaaggcagtaagtgtcactggaacattaggtggctacgtcaaagtcggggatgcactagcaggcaatcctcacaaggcacaaccagagttcaatctgatcatgaccggaaatcaagctttccagcctggcggtcaaacatttgtcttatag

SEQ ID NO: 27979 - protein, 269 aa, Muscodor strobelii
  misc_feature: SGI Peptide ID NO. 569594
  misc_feature (1)..(260): NCBI GI: 217978594 Blast Desc: Msil_2450 [Methylocella silvestris BL2] gi|217503970|gb|ACK51379.1| conserved [Methylocella silvestris BL2]
  misc_feature (1)..(257): NCBI GI: 254000340 Blast Desc: Msip34_2639 [Methylovorus sp. SIP3-4] gi|253987019|gb|ACT51876.1| conserved [Methylovorus sp. SIP3-4]
  misc_feature (1)..(269): NCBI GI: 218510972 Blast Desc: RetlB5_28372 [Rhizobium etli Brasil 5]
  misc_feature (1)..(256): NCBI GI: 218662297 Blast Desc: RetlI_23963 [Rhizobium etli IE4771]
  misc_feature (1)..(269): NCBI GI: 209515229 Blast Desc: conserved [Burkholderia sp. H160] gi|209504210|gb|EEA04199.1| conserved [Burkholderia sp. H160]
  misc_feature (1)..(263): NCBI GI: 91780396 Blast Desc: Bxe_C0340 [Burkholderia xenovorans LB400] gi|91693056|gb|ABE36253.1| Bxe_C0340 [Burkholderia xenovorans LB400]
  misc_feature (1)..(263): NCBI GI: 218531593 Blast Desc: Mchl_3662 [Methylobacterium chloromethanicum CM4] gi|218523896|gb|ACK84481.1| conserved [Methylobacterium chloromethanicum CM4]
  misc_feature (1)..(263): NCBI GI: 163852752 Blast Desc: Mext_3337 [Methylobacterium extorquens PA1] gi|163664357|gb|ABY31724.1| conserved [Methylobacterium extorquens PA1]
  misc_feature (1)..(263): NCBI GI: 254562514 Blast Desc: METDI4132 [Methylobacterium extorquens DM4] gi|254269792|emb|CAX25765.1| conserved [Methylobacterium extorquens DM4]
  misc_feature (1)..(269): NCBI GI: 254250410 Blast Desc: BCPG_05302 [Burkholderia cenocepacia PC184] gi|124879544|gb|EAY66900.1| BCPG_05302 [Burkholderia cenocepacia PC184]
MGVSANSDEHRGRCGGGVPGTAVFGTKGGLTGVLSDRLDRENVAKALRARRTFATTGERLVGIATTEDGEMQGDDVIARMSDPLILYYHFLGRNGFESIEVWDGTGKILHHDIAQKLAQEQAASLPSKKHGSMNPGKMRLRVKWGGARLYDRYREAVWDGSIIFQGAKVESPSSIRPFGGVKDQPEEVVECKSDTHVVFKTHTSGDFDGVDIVFENNECPKAVSVTGTLGGYVKVGDALAGNPHKAQPEFNLIMTGNQAFQPGGQTFVL

SEQ ID NO: 27980 - DNA, 1101 bp, Muscodor strobelii
  misc_feature: SGI cDNA ID NO. 569595
  misc_feature: Reduced expression when VOC is produced
  misc_feature: Encodes the peptide sequence at SEQ ID NO 27981
atgaagttctccacgataccgaacgcgtcctccgcgttgctcctgtcgctgctcctcggcccagcgaatgctatgctcaggtgtaaccatctcgtagccgagagccagcagtatgatctctccaagctgggtgggccgcactccgtcgtcatggcccagatgatggacagcaccgaatctctcaacaccacatatacagtcgatatctgcaagcccctcaagaagaaaggaagcttcccgaaggacgagcagtgtcccaacggtgcacgtgcctgcgccatcaagcgccgcatcatgaccggcgacgacaagtctgacgtgattttgaaagccataccccttgcgggagactttaaactcggtggtggcgatctagaacctaagactgagaagctcagtaaagtcgatccggacttgggcaaagaggggctgcgaatcaccatgaacggcggttacgaaatgggcgacaataaaatcaagcgcaagcagcgggtcgtcattgatttcgtttgcgacgaggagcgcgacggcactgagggcgagtgggaatcggaggagaagtatgagacacgttctctcactgctcgagaggacgaggacagtaaggaggatggtgagaaggaaggcgaggaaggcggtgataaagaagacgacggagaggaaggaagcccacctgaaccagcccagctcggcatcgagaacgaccccagcctggttttcaacagctacggcgccagcgagagcgataacagcgtagatgtcctcaaactcacttggtcttccaagtatgtctgcaagagcaagaaggacgacggatctaaggatgaggacggtggtgaagaagacggcggagacaagcgacctagtagctcacactggggcttctttacctggcttgttgtcctcattttcctcggtaccgcagcctatctcatctttggctcatggctcaactacaaccgatatggcgctagaggctgggatctcctcccccacggcgacacgatccgcgacatcccttatctcctcaaagactggacgaggcgcgttctcaacaccgtgcaaggtagtggaagtcgcggtggctatagcgcagtctaa

SEQ ID NO: 27981 - protein, 366 aa, Muscodor strobelii
  misc_feature: SGI Peptide ID NO. 569595
  misc_feature (15)..(361): Pfam Id: PF09451 Pfam Desc: Autophagy-related protein 27
  misc_feature (13)..(366): NCBI GI: 256730558 Blast Desc: NECHADRAFT_102961 [Nectria haematococca mpVI 77-13-4]
  misc_feature (25)..(366): NCBI GI: 261357253 Blast Desc: conserved [Verticillium albo-atrum VaMs.102]
  misc_feature (14)..(366): NCBI GI: 145606332 Blast Desc: MGG_02386 [Magnaporthe grisea 70-15] gi|145014024|gb|EDJ98665.1| MGG_02386 [Magnaporthe grisea 70-15]
  misc_feature (14)..(366): NCBI GI: 240108601 Blast Desc: CPC735_009510 [Coccidioides posadasii C735 delta SOWgp]
  misc_feature (1)..(365): NCBI GI: 156043918 Blast Desc: SS1G_10062 [Sclerotinia sclerotiorum 1980] gi|154694451|gb|EDN94189.1| SS1G_10062 [Sclerotinia sclerotiorum 1980]
  misc_feature (14)..(366): NCBI GI: 238844054 Blast Desc: Atg27p [Microsporum canis CBS 113480]
  misc_feature (26)..(366): NCBI GI: 46109384 Blast Desc: FG01574.1 [Gibberella zeae PH-1]
  misc_feature (25)..(366): NCBI GI: 85081955 Blast Desc: NCU03543 [Neurospora crassa OR74A] gi|18376056|emb|CAD21062.1| conserved [Neurospora crassa] gi|28917900|gb|EAA27586.1| [Neurospora crassa OR74A]
  misc_feature (1)..(366): NCBI GI: 226284379 Blast Desc: autophagy-related protein 27 [Paracoccidioides brasiliensis Pb01]
  misc_feature (13)..(366): NCBI GI: 225681833 Blast Desc: conserved [Paracoccidioides brasiliensis Pb03] gi|226288959|gb|EEH44471.1| autophagy-related protein 27 [Paracoccidioides brasiliensis Pb18]
  misc_feature: Useful for introducing or modulating the production of volatile compounds
MKFSTIPNASSALLLSLLLGPANAMLRCNHLVAESQQYDLSKLGGPHSVVMAQMMDSTESLNTTYTVDICKPLKKKGSFPKDEQCPNGARACAIKRRIMTGDDKSDVILKAIPLAGDFKLGGGDLEPKTEKLSKVDPDLGKEGLRITMNGGYEMGDNKIKRKQRVVIDFVCDEERDGTEGEWESEEKYETRSLTAREDEDSKEDGEKEGEEGGDKEDDGEEGSPPEPAQLGIENDPSLVFNSYGASESDNSVDVLKLTWSSKYVCKSKKDDGSKDEDGGEEDGGDKRPSSSHWGFFTWLVVLIFLGTAAYLIFGSWLNYNRYGARGWDLLPHGDTIRDIPYLLKDWTRRVLNTVQGSGSRGGYSAV

SEQ ID NO: 27982 - DNA, 3699 bp, Muscodor strobelii
  misc_feature: SGI EST ID NO. CUFF.65922.0
  misc_feature: Variant of the nucleotide sequence at SEQ ID NO 27980
cgggtcagcacccgtaggctgtaagggtatgtgtgtgtctgatgacgatggtcgtgacccttttcaactgaccctgcttgcctgccgctaagctcgacctgctacaccctctcagctgcctgctatcggcatcctgctggcttcattcatttcctcgaacaaattccctttcgccctcttcacttcaccacaccactcaccctactgcgcttcgggtgtcgcggtcctgtatttatgctgcgtggctagcgatagcatgccgatctttgcacctatagcgtctttctaatcatcctgatccgtgatttgtgcgacccctttcaactaacaattctgcctcgtccaacccgaccgtccatacattcatccaacaattttccggtcatcgggctgttctcatcaagccctggacagagaaagcaatataccgcacagctcctctctctcttcctaatcttccgcattgcatcctcatccatcacgtcacatcatgaagttctccacgataccgaacgcgtcctccgcgttgctcctgtcgctgctcctcggcccagcgaatgctatgctcaggtgtaaccatctcgtagccgagagccagcagtatgatctctccaagctgggtgggccgcactccgtcgtcatggcccagatgatggacagcaccgaatctctcaacaccacatatacagtcgatatctgcaagcccctcaagaagaaaggaagcttcccgaaggacgagcagtgtcccaacggtgcacgtgcctgcgccatcaagcgccgcatcatgaccggcgacgacaagtctgacgtgattttgaaagccataccccttgcgggagactttaaactcggtggtggcgatctagaacctaagactgagaagctcagtaaagtcgatccggacttgggcaaagaggggctgcgaatcaccatgaacggcggttacgaaatgggcgacaataaaatcaagcgcaagcagcgggtcgtcattgatttcgtttgcgacgaggagcgcgacggcactgagggcgagtgggaatcggaggagaagtatgagacacgttctctcactgctcgagaggacgaggacagtaaggaggatggtgagaaggaaggcgaggaaggcggtgataaagaagacgacggagaggaaggaagcccacctgaaccagcccagctcggcatcgagaacgaccccagcctggttttcaacagctacggcgccagcgagagcgataacagcgtagatgtcctcaaactcacttggtcttccaagtatgtctgcaagagcaagaaggacgacggatctaaggatgaggacggtggtgaagaagacggcggagacaagcgacctagtagctcacactggggcttctttacctggcttgttgtcctcattttcctcggtaccgcagcctatctcatctttggctcatggctcaactacaaccgatatggcgctagaggctgggatctcctcccccacggcgacacgatccgcgacatcccttatctcctcaaagactggacgaggcgcgttctcaacaccgtgcaaggtagtggaagtcgcggtggctatagcgcagtctaaacgtcgcctagatgataacggaacatttcaagctgcatttgggaatagaggcttggtttagggcggcgttggcgtattgattcgtctttcttccgaacgtcagggtttccgtctccactgccagcagagtgtcttcagacaacggcttgctaagccatcgcccgacactgagaccacgaccaattatcggaacagcatcagtcttcttcctactgctcatggagaatgacctcgcgtgggcagcgtcaaatcctctgctcatagacgggaaactgcgaggacgaagaaattgtggacatgtaccaatttgtatggttatgcgtatcatcgctgtctggacgacccgggtaatagcccgtggccgtgttggtctatgtgttattgtacatattaagaggtctctgaccaaaattcaaccatttcaacatgaagtgcttattcttaatcagaaaagatgcaaaccgaaatattggaaaatgctatgaagataccagccactttctgatcctttcaaccccaaacgcggtctgcagaacaatttttgtgaaatcattaatttcgcccggcgtcagctcagcgagtacgtcgtccggttcttcaagaggagtcgagctgatatccacgcacaacttctcccactccgtagccgtactagcttcccaaaccccgcgttgcgtcgtgaacatcatgccaccattacaaggcgcgtccatgcgacgatgcttcatcatttggtatacgccttggattcctgcagcgatgacccatgtgcgtctgatggactcggtgaggatccatgtcttccatttagaataagtagtggcgggtgaggttggggataagagagatgagggtgatggcggatgttgttcaagagtaggcgatgagagggccccgcctgggtttggtgttagactcgcgtgggacactacggcgttcatccaccggtctagaatggggatgcgggattctgagatgtgacgcaggcggatgtcgccgtcgtagaggccgattgtttggtagactaggagtgcgtggcagcgtgctaggtgttctagggaatctaaatccgtctttggaccagatgtgttgacgctgtcgctctcgtctatttcttcaccgtgctcgaccatcagtttctttgcccggtcctcgatgagtcggaagattactgcttcgttactaggtgttttttggatgtatgcggagagaacgagatatgcatcttggactgatgatgggaagcgctcagtgtagagatgtgagtggataaatgggttgctgccactttcaacccagatcttcagccagcgctgcatttcgacgatgcaggacttcatgtcttgtatatctgctgctgagggcgcgtgacaaggtcgttttgggtgtgttattttccatgttgagtgcgggaagcgggaggttgcttgcgtgagttgttgattgttctcttgttgggtatcagcttggaattggaaattactgagtccgaagggatccgggagtgcgagttctacgaatggccgtgggagatttggactaagtgctgtgtagtctagatcttgatgtagcgggcagatagtagtagagaatggacagattttgcctattggtactatctcttcatgatgcgcaaggactgccgtcttattatatgtgttatccccgaacaacgattcctgtggcacgggaatatcgccctggttttgaactggttctgtgacttcgacgtcttcagattcatctaagcagagtacgaatgaactcggcttaggtggcggatacttgcatactattccccgccttcgacatcgtatacattgcgggctttgcttcccgcacttgcgttttgatgccgcacacgctgtgcaagctctcatgtcgggattgcggagcatggctgagtatctggcgggatggtcatgtaactccggcatgatggggatgatagaagatggacatctttaaagatgctttatccaccctcggagtgagatgtcaccttattccttgcggcatcgtcgtcgtctgcacgtgttgctggtgagggttgaagaaggttgcgggagcttgctgctttgggaaagcgtccgccagctgcgcccgtg

SEQ ID NO: 27983 - DNA, 1419 bp, Muscodor strobelii
  misc_feature: SGI cDNA ID NO. 569596
  misc_feature: Encodes the peptide sequence at SEQ ID NO 27984
atgctccgcaatcccgacatgagagcttgcacagcgtgtgcggcatcaaaacgcaagtgcgggaagcaaagcccgcaatgtatacgatgtcgaaggcggggaatagtatgcaagtatccgccacctaagccgagttcattcgtactctgcttagatgaatctgaagacgtcgaagtcacagaaccagttcaaaaccagggcgatattcccgtgccacaggaatcgttgttcggggataacacatataataagacggcagtccttgcgcatcatgaagagatagtaccaataggcaaaatctgtccattctctactactatctgcccgctacatcaagatctagactacacagcacttagtccaaatctcccacggccattcgtagaactcgcactcccggatcccttcggactcagtaatttccaattccaagctgatacccaacaagagaacaatcaacaactcacgcaagcaacctcccgcttcccgcactcaacatggaaaataacacacccaaaacgaccttgtcacgcgccctcagcagcagatatacaagacatgaagtcctgcatcgtcgaaatgcagcgctggctgaagatctgggttgaaagtggcagcaacccatttatccactcacatctctacactgagcgcttcccatcatcagtccaagatgcatatctcgttctctccgcatacatccaaaaaacacctagtaacgaagcagtaatcttccgactcatcgaggaccgggcaaagaaactgatggtcgagcacggtgaagaaatagacgagagcgacagcgtcaacacatctggtccaaagacggatttagattccctagaacacctagcacgctgccacgcactcctagtctaccaaacaatcggcctctacgacggcgacatccgcctgcgtcacatctcagaatcccgcatccccattctagaccggtggatgaacgccgtagtgtcccacgcgagtctaacaccaaacccaggcggggccctctcatcgcctactcttgaacaacatccgccatcaccctcatctctcttatccccaacctcacccgccactacttattctaaatggaagacatggatcctcaccgagtccatcagacgcacatgggtcatcgctgcaggaatccaaggcgtataccaaatgatgaagcatcgtcgcatggacgcgccttgtaatggtggcatgatgttcacgacgcaacgcggggtttgggaagctagtacggctacggagtgggagaagttgtgcgtggatatcagctcgactcctcttgaagaaccggacgacgtactcgctgagctgacgccgggcgaaattaatgatttcacaaaaattgttctgcagaccgcgtttggggttgaaaggatcagaaagtggctggtatcttcatag

SEQ ID NO: 27984 - protein, 472 aa, Muscodor strobelii
  misc_feature: SGI Peptide ID NO. 569596
  misc_feature (8)..(46): Pfam Id: PF00172 Pfam Desc: Fungal Zn(2)-Cys(6) binuclear cluster domain
  misc_feature (172)..(469): NCBI GI: 242795089 Blast Desc: conserved [Talaromyces stipitatus ATCC 10500] gi|218719096|gb|EED18516.1| conserved [Talaromyces stipitatus ATCC 10500]
  misc_feature (185)..(468): NCBI GI: 212536184 Blast Desc: conserved [Penicillium marneffei ATCC 18224] gi|210070647|gb|EEA24737.1| conserved [Penicillium marneffei ATCC 18224]
  misc_feature (8)..(468): NCBI GI: 256721547 Blast Desc: NECHADRAFT_78504 [Nectria haematococca mpVI 77-13-4]
  misc_feature (137)..(472): NCBI GI: 242813475 Blast Desc: TSTA_101720 [Talaromyces stipitatus ATCC 10500] gi|218714513|gb|EED13936.1| TSTA_101720 [Talaromyces stipitatus ATCC 10500]
  misc_feature (7)..(469): NCBI GI: 256721824 Blast Desc: NECHADRAFT_53241 [Nectria haematococca mpVI 77-13-4]
  misc_feature (151)..(469): NCBI GI: 212544784 Blast Desc: RNA polymerase II mediator complex component Srb8, [Penicillium marneffei ATCC 18224] gi|210065515|gb|EEA19609.1| RNA polymerase II mediator complex component Srb8, [Penicillium
  misc_feature (188)..(471): NCBI GI: 256720318 Blast Desc: NECHADRAFT_56119 [Nectria haematococca mpVI 77-13-4]
  misc_feature (198)..(472): NCBI GI: 212535290 Blast Desc: aldo/keto reductase, [Penicillium marneffei ATCC 18224] gi|210070200|gb|EEA24290.1| aldo/keto reductase, [Penicillium marneffei ATCC 18224]
  misc_feature (8)..(472): NCBI GI: 154274522 Blast Desc: [Ajellomyces capsulatus NAm1] gi|150414552|gb|EDN09914.1| [Ajellomyces capsulatus NAm1]
  misc_feature (8)..(472): NCBI GI: 225561211 Blast Desc: conserved [Ajellomyces capsulatus G186AR]
MLRNPDMRACTACAASKRKCGKQSPQCIRCRRRGIVCKYPPPKPSSFVLCLDESEDVEVTEPVQNQGDIPVPQESLFGDNTYNKTAVLAHHEEIVPIGKICPFSTTICPLHQDLDYTALSPNLPRPFVELALPDPFGLSNFQFQADTQQENNQQLTQATSRFPHSTWKITHPKRPCHAPSAADIQDMKSCIVEMQRWLKIWVESGSNPFIHSHLYTERFPSSVQDAYLVLSAYIQKTPSNEAVIFRLIEDRAKKLMVEHGEEIDESDSVNTSGPKTDLDSLEHLARCHALLVYQTIGLYDGDIRLRHISESRIPILDRWMNAVVSHASLTPNPGGALSSPTLEQHPPSPSSLLSPTSPATTYSKWKTWILTESIRRTWVIAAGIQGVYQMMKHRRMDAPCNGGMMFTTQRGVWEASTATEWEKLCVDISSTPLEEPDDVLAELTPGEINDFTKIVLQTAFGVERIRKWLVSS

SEQ ID NO: 27985 - DNA, 1554 bp, Muscodor strobelii
  misc_feature: SGI cDNA ID NO. 569597
  misc_feature: Encodes the peptide sequence at SEQ ID NO 27986
atggattacctcaattcctcaacattcccaaccaaagttgaggagcttatgcagaagttccatgctcctggtctatcactcgcagtaattcatggtgatcgcactttctccgctgggtacgggctagcatcaattgatccaccgaagccatgcacgtcggaaacagtcttcgacatcgcatcctcgtcgaaatcgctcacggctgcgtctgtcgcgctgttggtacgcgacaatgagaaatatccagaggtgcagtgggatacggcgatgtcgagtcttctcccagaggactttgtgatgtctgacgacaagtataccgaaagtgtcactgttgaagatgtgctcagtcatcggactggcatgccgcggcatgatgactccttgttattcaatgcaaaatggatcacgaggaatttgcgaaatctgcaagtagttgcgccgctgcgatcggaatacatctacacgaatatcatgtataccgtcgcgacgtatcttgtagagaagaaaagcggggtcccattcaccgagttcttagagaagcatttcttcaaacccctaaagatggaatcgagtcatctgcaacctagccgcgctcgagaaatgggtctcggagatcgtatggcccgcggatactcgtggaacaaggacgagaacaaacacatctcgttcgacgcttccgatagtcccgaccaaggcgctgggtcgattatgacgagcgcagatgactacatcaaatgggtcaaagcattgatgaatcaagagggtcctatcgacgatgaggtttacaagggtcttgtcagaatgcgaaccttctcggatccagatgcaactgattgcggcctattttgctctccagtattttacgcagccggtttagagctatattggtatcgcggctacaaagttatcgggcacgatggctgcgtaaccggtttccagagccggcattttttcataccagatctcaaactgggttgcgtcattttttgcaatgccgatggtgaaaatgaagtgactaagattctagccaacaagataattgacgaggccattggggtgcccgttgcagagcgacctaactggagacaaatcgtggcagatgaagcaaatcgaaatgaatctgacaccaaggaagaggaggagaaaatacgaaaggaatttggcctcagcgacggggaacaggaaccacagaaaatgccacttgaggcatacgtaggcgagtattggaatccgggatatcagggaatgacagtcgagatcaaggatgggaaactcttcatcgacgcgacggatcgcgcaatgggtttcactctgacatttacacacgtgtgcgagcagtcgaaatacgttgcatacttgagcgacgtccaagcagggggcagcgaccctctcaaggccgagttccggttcgagaacgagaaggtaatcaaaatgggattgcatttggagccgaggcttgatgagttgatctggtttcgtcgcgcgcaccaagacgaatcctccagtactactgagggggagggaggttcccaaatgacgagaaacagagtgtga

SEQ ID NO: 27986 - protein, 517 aa, Muscodor strobelii
  misc_feature: SGI Peptide ID NO. 569597
  misc_feature (9)..(351): Pfam Id: PF00144 Pfam Desc: Beta-lactamase
  misc_feature (1)..(494): NCBI GI: 121704525 Blast Desc: beta-lactamase family protein [Aspergillus clavatus NRRL 1] gi|119398671|gb|EAW09100.1| beta-lactamase family protein [Aspergillus clavatus NRRL 1]
  misc_feature (1)..(508): NCBI GI: 258566824 Blast Desc: [Uncinocarpus reesii 1704] gi|237905602|gb|EEP80003.1| [Uncinocarpus reesii 1704]
  misc_feature (1)..(494): NCBI GI: 145252928 Blast Desc: An16g06750 [Aspergillus niger] gi|134083533|emb|CAK42925.1| protein product [Aspergillus niger]
  misc_feature (1)..(494): NCBI GI: 255945565 Blast Desc: Pc20g10590 [Penicillium chrysogenum Wisconsin 54-1255] gi|211588285|emb|CAP86388.1| Pc20g10590 [Penicillium chrysogenum Wisconsin 54-1255]
  misc_feature (1)..(494): NCBI GI: 212545979 Blast Desc: D-aminopeptidase, [Penicillium marneffei ATCC 18224] gi|210064663|gb|EEA18758.1| D-aminopeptidase, [Penicillium marneffei ATCC 18224]
  misc_feature (1)..(494): NCBI GI: 238838303 Blast Desc: beta-lactamase family protein [Microsporum canis CBS 113480]
  misc_feature (2)..(494): NCBI GI: 238845950 Blast Desc: beta-lactamase family protein [Microsporum canis CBS 113480]
  misc_feature (9)..(494): NCBI GI: 169598504 Blast Desc: SNOG_02056 [Phaeosphaeria nodorum SN15] gi|160704406|gb|EAT90268.2| SNOG_02056 [Phaeosphaeria nodorum SN15]
  misc_feature (9)..(494): NCBI GI: 242812319 Blast Desc: penicillin-binding protein, [Talaromyces stipitatus ATCC 10500] gi|218714272|gb|EED13695.1| penicillin-binding protein, [Talaromyces stipitatus ATCC 10500]
  misc_feature (9)..(495): NCBI GI: 145252112 Blast Desc: An16g02560 [Aspergillus niger] gi|134083113|emb|CAK46786.1| protein product [Aspergillus niger]
  misc_feature (1)..(358): SWISSPROT Homolog: EC 3.4.11.19 D-stereospecific aminopeptidase
MDYLNSSTFPTKVEELMQKFHAPGLSLAVIHGDRTFSAGYGLASIDPPKPCTSETVFDIASSSKSLTAASVALLVRDNEKYPEVQWDTAMSSLLPEDFVMSDDKYTESVTVEDVLSHRTGMPRHDDSLLFNAKWITRNLRNLQVVAPLRSEYIYTNIMYTVATYLVEKKSGVPFTEFLEKHFFKPLKMESSHLQPSRAREMGLGDRMARGYSWNKDENKHISFDASDSPDQGAGSIMTSADDYIKWVKALMNQEGPIDDEVYKGLVRMRTFSDPDATDCGLFCSPVFYAAGLELYWYRGYKVIGHDGCVTGFQSRHFFIPDLKLGCVIFCNADGENEVTKILANKIIDEAIGVPVAERPNWRQIVADEANRNESDTKEEEEKIRKEFGLSDGEQEPQKMPLEAYVGEYWNPGYQGMTVEIKDGKLFIDATDRAMGFTLTFTHVCEQSKYVAYLSDVQAGGSDPLKAEFRFENEKVIKMGLHLEPRLDELIWFRRAHQDESSSTTEGEGGSQMTRNRV

SEQ ID NO: 27987 - DNA, 2159 bp, Muscodor strobelii
  misc_feature: SGI EST ID NO. CUFF.66031.1
  misc_feature: Variant of the nucleotide sequence at SEQ ID NO 27985
ctggcatatgtttctataagttcaattaaacgattcatctggttgcgctgacagtgtcgagatgacattctaagatctgcacgtcacggaagaataaaacaattctcttaagcctacgccatctagaattttataatcaatggattacctcaattcctcaacattcccaaccaaagttgaggagcttatgcagaagttccatgctcctggtctatcactcgcagtaattcatggtgatcgcactttctccgctgggtacgggctagcatcaattgatccaccgaagccatgcacgtcggaaacagtcttcgacatcgcatcctcgtcgaaatcgctcacggctgcgtctgtcgcgctgttggtacgcgacaatgagaaatatccagaggtgcagtgggatacggcgatgtcgagtcttctcccagaggactttgtgatgtctgacgacaagtataccgaaagtgtcactgttgaagatgtgctcagtcatcggactggcatgccgcggcatgatgactccttgttattcaatgcaaaatggatcacgaggaatttgcgaaatctgcaagtagttgcgccgctgcgatcggaatacatctacacgaatatcatgtataccgtcgcgacgtatcttgtagagaagaaaagcggggtcccattcaccgagttcttagagaagcatttcttcaaacccctaaagatggaatcgagtcatctgcaacctagccgcgctcgagaaatgggtctcggagatcgtatggcccgcggatactcgtggaacaaggacgagaacaaacacatctcgttcgacgcttccgatagtcccgaccaaggcgctgggtcgattatgacgagcgcagatgactacatcaaatgggtcaaagcattgatgaatcaagagggtcctatcgacgatgaggtttacaagggtcttgtcagaatgcgaaccttctcggatccagatgcaactgattgcggcctattttgctctccagtattttacgcagccggtttagagctatattggtatcgcggctacaaagttatcgggcacgatggctgcgtaaccggtttccagagccggcattttttcataccagatctcaaactgggttgcgtcattttttgcaatgccgatggtgaaaatgaagtgactaagattctagccaacaagataattgacgaggccattggggtgcccgttgcagagcgacctaactggagacaaatcgtggcagatgaagcaaatcgaaatgaatctgacaccaaggaagaggaggagaaaatacgaaaggaatttggcctcagcgacggggaacaggaaccacagaaaatgccacttgaggcatacgtaggcgagtattggaatccgggatatcagggaatgacagtcgagatcaaggatgggaaactcttcatcgacgcgacggatcgcgcaatgggtttcactctgacatttacacacgtgtgcgagcagtcgaaatacgttgcatacttgagcgacgtccaagcagggggcagcgaccctctcaaggccgagttccggttcgagaacgagaaggtaatcaaaatgggattgcatttggagccgaggcttgatgagttgatctggtttcgtcgcgcgcaccaagacgaatcctccagtactactgagggggagggaggttcccaaatgacgagaaacagagtgtgatgcaccgacgctgtgcatcgaaaatgagttcactttagaagaagacgggaacgagaataccattgatgtaaacccaaaatatcggaggttctaggttcgcaccgttgtttgccctgttgagcaaggcagcagacacgtagatttacatgacacaactaatagctatgaggattacaggccaacgaatagcatcaatccaagaatgggtttcggcctttgcatgcgtctactctgagtcgacaatgttcttcaatcagactcatgtccatgggttgctgattctgtgtggcacggtcgcgcggggcattcttgtaggtacctgtttgctgccaaaacgactcacgtgctctcaatgtcagttccacaccagcatatatctacacgacaataaagaagtaatcgcaattgaaatacctctatagtttgtatagaatatgtaatcgaagtggaaatagcgcagaaaatc

SEQ ID NO: 27988 - DNA, 957 bp, Muscodor strobelii
  misc_feature: SGI cDNA ID NO. 569598
  misc_feature: Encodes the peptide sequence at SEQ ID NO 27989
atggataaactcagcccagaagtcgtgcaatacctcttccggcagtgtgtcgacagcaatgtcactaagtccattcatcggacactatatccggcattgttgccgtctcgtcccgagaatcgtcaagatggtcgtgtagttctcgttacaggtggtgcaacaaacattggctttgctatctctcaagcttttgttcgtgcgggcgcaagcactgtcattcttgtaggacgacgcgatgatgtgttgaatgacgcgaaggcccgattggagcaagaggcacaatctctacgaaatgacaccaagatcattacatcgcctaccgatgttgccgataccgtgcaaactaaccagttctggaagaatctcgctgacgagggcatcgcggtggacgtatttgtatccaatgcaactaaattctctgaggctaagcctatgcttgaggcaggagtcgacacgatctggtctcatgtagaagtcgatgcgaaagcgccaatatactggcttgacaagttctatcgccaaggaggtgatagacagaagtttgttgtcaatgtatctagccagggtattcacatgacaaatcatccgggtatgggtatactcccagcatactgcatgtctaagatgtttggaacacttttcttccagaacactgccttgggtactccagcggagaaaatgcaaattgtcagctttcatcccggatctatctggaccaaagaatgggagtcaatcaacagtgcactcaagcctgaggatcttgatgatgtacaacgaactggcgcattcgctgtctggcttgctacgaagcaggcagagtttctgcacgggcgcttcgtctggtcttcttgggacgtggatgagctttctacgggagatttgaggaagcgcattgacgaggacttccattttctcaagtgctcaattgtagggttgaatagtggtatgctcgtatga

SEQ ID NO: 27989 - protein, 318 aa, Muscodor strobelii
  misc_feature: SGI Peptide ID NO. 569598
  misc_feature (45)..(223): Pfam Id: PF00106 Pfam Desc: short chain dehydrogenase
  misc_feature (45)..(91): Pfam Id: PF00106 Pfam Desc: short chain dehydrogenase
  misc_feature (46)..(91): Pfam Id: PF08659 Pfam Desc: KR domain
  misc_feature (4)..(317): NCBI GI: 212536182 Blast Desc: short-chain dehydrogenase, [Penicillium marneffei ATCC 18224] gi|210070646|gb|EEA24736.1| short-chain dehydrogenase, [Penicillium marneffei ATCC 18224]
  misc_feature (4)..(317): NCBI GI: 242795084 Blast Desc: short-chain dehydrogenase, [Talaromyces stipitatus ATCC 10500] gi|218719095|gb|EED18515.1| short-chain dehydrogenase, [Talaromyces stipitatus ATCC 10500]
  misc_feature (22)..(313): NCBI GI: 238495098 Blast Desc: short-chain dehydrogenase, [Aspergillus flavus NRRL3357] gi|220695435|gb|EED51778.1| short-chain dehydrogenase, [Aspergillus flavus NRRL3357]
  misc_feature (21)..(312): NCBI GI: 256732316 Blast Desc: NECHADRAFT_80781 [Nectria haematococca mpVI 77-13-4]
  misc_feature (20)..(312): NCBI GI: 156056454 Blast Desc: SS1G_05581 [Sclerotinia sclerotiorum 1980] gi|154703363|gb|EDO03102.1| SS1G_05581 [Sclerotinia sclerotiorum 1980]
  misc_feature (22)..(313): NCBI GI: 119473989 Blast Desc: NADP(+)-dependent dehydrogenase, [Neosartorya fischeri NRRL 181] gi|119407023|gb|EAW16973.1| NADP(+)-dependent dehydrogenase, [Neosartorya fischeri NRRL 181]
  misc_feature (19)..(312): NCBI GI: 256723821 Blast Desc: NECHADRAFT_92278 [Nectria haematococca mpVI 77-13-4]
  misc_feature (23)..(316): NCBI GI: 46139675 Blast Desc: FG11352.1 [Gibberella zeae PH-1]
  misc_feature (19)..(317): NCBI GI: 85078782 Blast Desc: NCU08784 [Neurospora crassa OR74A] gi|28917281|gb|EAA26991.1| [Neurospora crassa OR74A]
  misc_feature (19)..(312): NCBI GI: 46112781 Blast Desc: FG02892.1 [Gibberella zeae PH-1]
  misc_feature (41)..(287): SWISSPROT Homolog: EC 1.1.1.14 L-iditol 2-dehydrogenase
MDKLSPEVVQYLFRQCVDSNVTKSIHRTLYPALLPSRPENRQDGRVVLVTGGATNIGFAISQAFVRAGASTVILVGRRDDVLNDAKARLEQEAQSLRNDTKIITSPTDVADTVQTNQFWKNLADEGIAVDVFVSNATKFSEAKPMLEAGVDTIWSHVEVDAKAPIYWLDKFYRQGGDRQKFVVNVSSQGIHMTNHPGMGILPAYCMSKMFGTLFFQNTALGTPAEKMQIVSFHPGSIWTKEWESINSALKPEDLDDVQRTGAFAVWLATKQAEFLHGRFVWSSWDVDELSTGDLRKRIDEDFHFLKCSIVGLNSGMLV

SEQ ID NO: 27990 - DNA, 443 bp, Muscodor strobelii
  misc_feature: SGI EST ID NO. CUFF.65931.0
  misc_feature: Variant of the nucleotide sequence at SEQ ID NO 27988
cgcctaccgatgttgccgataccgtgcaaactaaccagttctggaagaatctcgctgacgagggcatcgcggtggacgtatttgtatccaatgcaactaaattctctgaggctaagcctatgcttgaggcaggagtcgacacgatctggtctcatgtagaagtcgatgcgaaagcgccaatatactggcttgacaagttctatcgccaaggaggtgatagacagaagtttgttgtcaatgtatctagccagggtattcacatgacaaatcatccgggtatgggtatactcccagcatactgcatgtctaagatgtttggaacacttttcttccagaacactgccttgggtactccagcggagaaaatgcaaattgtcagctttcatcccggatctatctggaccaaagaatgggagtcaatcaacagtgcactcaagcctgag

SEQ ID NO: 27991 - DNA, 2556 bp, Muscodor strobelii
  misc_feature: SGI cDNA ID NO. 569599
  misc_feature: Elevated expression when VOC is produced
  misc_feature: Encodes the peptide sequence at SEQ ID NO 27992
atgtcgcttttgcaactgagtctaagcgacggatggcaattccgggaggatgtcggaggttcatcagacaactggttgccagtgagatccgttcctacacaggttcatacggatctgcttgcaaataacaaaatccctgatcctttcctagacctcaatgaactcccagttcgtgcgcttgcagaaaagaaatggacgtacaggaaaagttttgtgcggcctcgagcggatttcgtggacgaaccattcataacggaccttgtatttgagggccttgatacctttgcgaccgtccttttaaatggaaacgaaatcttgagatcagacaacatgttcatttcacatcgtgtgaatgtcactgatctattgcaagacacgaacgaacttgtaatccacttcgactcggctatgctaacaggtagaaagctcgtcaaattgcattcgcacgagcacacattttacgtacgtcagacggaaatgagtcgcgtgcctgtcaggaaagcacaataccactggggttgggattggggaccaattttgatcaccgctggtccgtggaagccgatattgattgagcagtatgttgctcgggttgaagatgtttggaccgagtgtgaagttagcgaagacctgagctcttgttcagggagcatcatcactaaagtagcagggtcaaatgcgaaatcagtcacggtatcgctatcctattctggatcaacagtgttcgagaaggattgcgaggtcgactcagaaggacttgcgaaaacaaatttcacgatcaatgaccccaagctgtggtatccatttactcatgggcctcaaaatcgatacgagctgaaggccgatctaggtctcgacacaaaatccaagcttattggctttcgacgagctgagcttgtgcagcaaaaagacgattccggaaaatctttcttctttcgcatcaatggccaagacgtgttctgcggcggctcgtgttggattcctgcggatagcttcttgccgacgatctcagcggagcgatatcacaactggatgaagctgataaaggacggaaatcagaatatggtacgcatctggggaggtgggatctatgagcacgatgccctgtacgacgcttgcgatgagttgggaattatggtgtggcaagattttgcatttgcatgtgcctcttacccgacatacaaatcctacctagactcgttcgagaaagaggctcgacagaatttacgacgcatacgatcccatccttgtctgactatctggtgtggtagcaatgaagattaccaggtacaagaacgctacggactcgagtacaactacgaagacaaggacccgcagtcgtggctaaagtccacatttccagctagatacacgtacgagtatttgctgccgaagattgtatccgaagagcatcccttcgctatttatcatccatgtagcccctggggagacggcaagcacaccgcagacccaacagttggcgataagcaccagtgggatatttggcatggcgccatgaacagatatcaagaggcttttcgattgtctgcaagattcatcagtgaattcggaatggaagcgtacccccacctccagacgacacgcactatgatcaccgtagattcggaaagacacccaggctcaatgatgatggactttcgcaacaaagcaatcgaccacgagcgccgtgtcgcctcttacgtcaacgagaacttcttagtcaaatacgatttagaatcatacacctatctaacacagatggtacaagcggaagcaatgcacttcgcctacaaaacctggcgacgcgaatggggaaagcgaaaatgtggcggcgtgctggtctggcagctaaatgattgctggccgacaatgagttgggccatcgtcgattattatctggtgaagaaaccagcatattacattatcaagaatgcgctgagaccactgtctgttgggatctcccgagagtaccatgactggacgtcgggacatgttgatccaaccgagagctggagggacaataaattcgacctctgggtcgtgagtgatctgaaagactcgcaagaggttgatgttattgtcagattcatctccattcgtacaggaaaggaagtgcgatcaccgaagaaaacggatgctgtcacaatacaaccaaataccacaacggaactttgcaatgacgaagatattcttagtacagtaccatcctcttccaatccacaggacctcgacccatacgtcatacgcgcttccatctcatcccaaggcaaagttctttccaccgatacatactggcctcaacctctgaagtacctcgacttctccaaccgacaagttagcatcaaaaagattaccgacgacaaggttgagatctctgccgttctgcctacgaaagggtttgtgtttcaggagactaggggtatggagcttagtgataatggcttcgacttggtaccgggcgaaacgaaagtggttgaggtgacggggtgtaaggtcgaggagctgttttacacatatgttggagcatcggaggggtcgatatcggtctcggtttga

SEQ ID NO: 27992 - protein, 851 aa, Muscodor strobelii
  misc_feature: SGI Peptide ID NO. 569599
  misc_feature (2)..(150): Pfam Id: PF02837 Pfam Desc: Glycosyl hydrolases family 2, sugar binding domain
  misc_feature (3)..(841): NCBI GI: 70982544 Blast Desc: beta-mannosidase [Aspergillus fumigatus Af293] gi|66844424|gb|EAL84762.1| beta-mannosidase, [Aspergillus fumigatus Af293]
  misc_feature (1)..(841): NCBI GI: 255940498 Blast Desc: Pc16g06840 [Penicillium chrysogenum Wisconsin 54-1255] gi|211585641|emb|CAP93354.1| Pc16g06840 [Penicillium chrysogenum Wisconsin 54-1255]
  misc_feature (3)..(841): NCBI GI: 159122960 Blast Desc: beta-mannosidase, [Aspergillus fumigatus A1163]
  misc_feature (1)..(847): NCBI GI: 255955291 Blast Desc: Pc21g13810 [Penicillium chrysogenum Wisconsin 54-1255] gi|211590109|emb|CAP96278.1| Pc21g13810 [Penicillium chrysogenum Wisconsin 54-1255]
  misc_feature (3)..(841): NCBI GI: 119488638 Blast Desc: beta-mannosidase, [Neosartorya fischeri NRRL 181] gi|119410927|gb|EAW20872.1| beta-mannosidase, [Neosartorya fischeri NRRL 181]
  misc_feature (5)..(841): NCBI GI: 238506577 Blast Desc: beta-mannosidase, [Aspergillus flavus NRRL3357] gi|220689203|gb|EED45554.1| beta-mannosidase, [Aspergillus flavus NRRL3357]
  misc_feature (1)..(846): NCBI GI: 39962747 Blast Desc: MGG_09664 [Magnaporthe grisea 70-15] gi|149209179|ref|XP_001521964.1| MGCH7_ch7g82 [Magnaporthe grisea 70-15] gi|86196037|gb|EAQ70675.1| MGCH7_ch7g82 [Magnaporthe
  misc_feature (8)..(829): NCBI GI: 256720364 Blast Desc: NECHADRAFT_56051 [Nectria haematococca mpVI 77-13-4]
  misc_feature (2)..(841): NCBI GI: 121709417 Blast Desc: beta-mannosidase, [Aspergillus clavatus NRRL 1] gi|119400563|gb|EAW10988.1| beta-mannosidase, [Aspergillus clavatus NRRL 1]
  misc_feature (2)..(841): NCBI GI: 67525821 Blast Desc: AN3368.2 [Aspergillus nidulans FGSC A4] gi|40744156|gb|EAA63336.1| AN3368.2 [Aspergillus nidulans FGSC A4] gi|259485648|tpe|CBF82847.1| TPA: Beta-mannosidase nidulans
  misc_feature (3)..(649): SWISSPROT Homolog: EC 3.2.1.25 Beta-mannosidase
  misc_feature: Useful for introducing or modulating the production of volatile compounds
MSLLQLSLSDGWQFREDVGGSSDNWLPVRSVPTQVHTDLLANNKIPDPFLDLNELPVRALAEKKWTYRKSFVRPRADFVDEPFITDLVFEGLDTFATVLLNGNEILRSDNMFISHRVNVTDLLQDTNELVIHFDSAMLTGRKLVKLHSHEHTFYVRQTEMSRVPVRKAQYHWGWDWGPILITAGPWKPILIEQYVARVEDVWTECEVSEDLSSCSGSIITKVAGSNAKSVTVSLSYSGSTVFEKDCEVDSEGLAKTNFTINDPKLWYPFTHGPQNRYELKADLGLDTKSKLIGFRRAELVQQKDDSGKSFFFRINGQDVFCGGSCWIPADSFLPTISAERYHNWMKLIKDGNQNMVRIWGGGIYEHDALYDACDELGIMVWQDFAFACASYPTYKSYLDSFEKEARQNLRRIRSHPCLTIWCGSNEDYQVQERYGLEYNYEDKDPQSWLKSTFPARYTYEYLLPKIVSEEHPFAIYHPCSPWGDGKHTADPTVGDKHQWDIWHGAMNRYQEAFRLSARFISEFGMEAYPHLQTTRTMITVDSERHPGSMMMDFRNKAIDHERRVASYVNENFLVKYDLESYTYLTQMVQAEAMHFAYKTWRREWGKRKCGGVLVWQLNDCWPTMSWAIVDYYLVKKPAYYIIKNALRPLSVGISREYHDWTSGHVDPTESWRDNKFDLWVVSDLKDSQEVDVIVRFISIRTGKEVRSPKKTDAVTIQPNTTTELCNDEDILSTVPSSSNPQDLDPYVIRASISSQGKVLSTDTYWPQPLKYLDFSNRQVSIKKITDDKVEISAVLPTKGFVFQETRGMELSDNGFDLVPGETKVVEVTGCKVEELFYTYVGASEGSISVSV

SEQ ID NO: 27993 - DNA, 6695 bp, Muscodor strobelii
  misc_feature: SGI EST ID NO. CUFF.65979.0
  misc_feature: Variant of the nucleotide sequence at SEQ ID NO 27991
cggcggctcgtgttggattcctgcggatagcttcttgccgacgatctcagcggagcgatatcacaactggatgaagctgataaaggacggaaatcagaatatggtacgcatctggggaggtgggatctatgagcacgatgccctgtacgacgcttgcgatgagttgggaattatggtgtggcaagattttgcatttgcatgtgcctcttacccgacatacaaatcctacctagactcgttcgagaaagaggctcgacagaatttacgacgcatacgatcccatccttgtctgactatctggtgtggtagcaatgaagattaccaggtacaagaacgctacggactcgagtacaactacgaagacaaggacccgcagtcgtggctaaagtccacatttccagctagatacacgtacgagtatttgctgccgaagattgtatccgaagagcatcccttcgctatttatcatccatgtagcccctggggagacggcaagcacaccgcagacccaacagttggcgataagcaccagtgggatatttggcatggcgccatgaacagatatcaagaggcttttcgattgtctgcaagattcatcagtgaattcggaatggaagcgtacccccacctccagacgacacgcactatgatcaccgtagattcggaaagacacccaggctcaatgatgatggactttcgcaacaaagcaatcgaccacgagcgccgtgtcgcctcttacgtcaacgagaacttcttagtcaaatacgatttagaatcatacacctatctaacacagatggtacaagcggaagcaatgcacttcgcctacaaaacctggcgacgcgaatggggaaagcgaaaatgtggcggcgtgctggtctggcagctaaatgattgctggccgacaatgagttgggccatcgtcgattattatctggtgaagaaaccagcatattacattatcaagaatgcgctgagaccactgtctgttgggatctcccgagagtaccatgactggacgtcgggacatgttgatccaaccgagagctggagggacaataaattcgacctctgggtcgtgagtgatctgaaagactcgcaagaggttgatgttattgtcagattcatctccattcgtacaggaaaggaagtgcgatcaccgaagaaaacggatgctgtcacaatacaaccaaataccacaacggaactttgcaatgacgaagatattcttagtacagtaccatcctcttccaatccacaggacctcgacccatacgtcatacgcgcttccatctcatcccaaggcaaagttctttccaccgatacatactggcctcaacctctgaagtacctcgacttctccaaccgacaagttagcatcaaaaagattaccgacgacaaggttgagatctctgccgttctgcctacgaaagggtttgtgtttcaggagactaggggtatggagcttagtgataatggcttcgacttggtaccgggcgaaacgaaagtggttgaggtgacggggtgtaaggtcgaggagctgttttacacatatgttggagcatcggaggggtcgatatcggtctcggtttgacgatatcgtcttgtgctacgacagtgagtccgacttgatacagatgatgacattcatgacctgcatatcgctggattcacaggtcgagaagcgttatatccggaataaaatcatattaaaatcataatatgtcctactgtatcgaacagagcacatatagttggagatatatcaaggcagatcttccgtgaatttcgaaacctcgctccctgatgtaacgtcaacaatcacactgcgctcgtgtaacggcgccaatcagctatcatcgtcaccactctcatcaccgtaccgtgatctaatacttatactcatgcatacaaatcttacacacaaaatcaagttatacaacgtatcaattctttacctaactcctattccttaaccctattcctttcctcaggcttcatcaagtcctaaagtaaggcgtatcattccagtatcttttcattcgtggaaggatcattcgttgaaaggaagaagtagaaagaagttccgtgacccatgaatgcaacaaacgccgaacgaattgaaccagcgagcctccgtccatggggtatatttagaaagggaaaaaaagaggtcgatcctccattttcccgagcaagtgaaagaagaagagcaccgccaaatccaagtacaaatacaaatgccacgaacgccgaattgcgccatgcgctttcctcttgatgcagatccctctcttctcctagtaatgtcgcgctggtgctgtttctcctccagttgtattctctgcgctctggaaaagaacccgacgcgccgctttccgctagagcgcaagacgattatccatggctagaaccgatttctctcgcgcaacttagcccacgcggtcctcatccgaccatggctcgtcgagcgacatggtacggctccgttgcgaatcacgatctcttgatctctgcagatactcgcattgctcctgaagcttccggtcttgctccagctccagacgaagtagttccatttgcatgatccgctgtcgttgttggagctcgccgcgttcctattgctgtcgagtgttttgcttctgagcttgctgctgttgagctaactgttgagccaaccgctgtgcttgcagctgaagtcgctgttgttccagaatccgttgtttatgtagttgcagctgtagcttcctcttttcatcaagctgccaaggttgctgctgggcgggctgataggcttgctgttgttgtagctcactgccttcctgatgctggtgagctccaagttgaccttctcgctgagcctgtagctgatgcagaatgcgttgtttttgcatccactgctgttgtcgctcagcgatttcctcgtgctgctgcggtcgctgctgaggttgctcttccgcttctccttgctttatcatccgctgctgttcatgttgtagctcgctgccgttctaatgctgctgagcctgttgctgagcctgctgttgctgcatcattcgctgttgctgcatctgcttgttacgcaaattaaactcctgatgagccttggccatgcactgctgtttgaacttctccaatgcctctggcggtatattgccctcgcctccatactgctgggccaagatgcctatattgttctgcagaaattgcattccacgctgtcttatctgctgctggaattgtgcaggaatctgctgtggcatttgcgccatatttccgccctgctgctgtccctgctgctgcatctgcatcgctctcatccgcatctgttggatctgctgcagctgcgcttgtgtgggctggccttgctgcataggctgctgcatgcccatattcatgccgttcatgttggcaaaattgggatttcctgggtgcggctgtcctggcacctgtccttgcatatgagctgtttgttgctgtagcgttgcctggtactgttggaggagctgttgctgctgctggtgttgttgttgcggagtcatcatcccgccgttctgcatctgcatagcctgcatctggcgcgccatctgctgctgaagcatctgctgctgcacctgtggcgacatctgttgcgcctgcccgttcatcctcatctgctgcgcttgctgttgcatcagcatacgttgttgtatttgctgttggtgctgttggtgctgctgagctgcgatctgtgcggccatgaccgggttatgaccaggctggcccatgttattttggtgagccatcatcatgttcggattcatgggcgagtttgtgaccatcatgcctggaggcggactggcttgggtcatgcgcggggtagccataggccgattgatgggggttccatgcgccatttgaggtgtcgcgttgggcattctgggggtgccagaaggatggctctgctgactaccccgagccgacatgctgatagccatggctgcggacataggcggctgggtctggacgacagaaggtggtcttgccgggctgcctcccatgccggaattggtctgggacatgggtacattgccaaccatgggactcgacatgttctggggcgtattctgtctcacgatcggcgaagagacggccggctgcgataccgcctgggcaaagcgctgagcttggctactgggctgaccgcccgccatgccgccattctgagcagggtggccatgtgctggctgtggcatgttgttgacttgaggattcggtggtgaatggggcgaggcggcggcctgggcggcctgagcctgagcctgggcggcgagcatgcgccgttgttgctctcgcgatgcttgcgctgcggcctgcgccttacgagcagcatcctctcggcgcgctgcggcgtcctgttgctgtctgagctgctcggcctgctcttgtgctgcctgggcctgttgttgtttctggaggttgatcttcctctcgttctctgcctgtcgctctcgctcctgctgcttcttctctgcatgctccttcttgatcagagtcagagtgttgaggcgctcaaagcgggcctcgaactgaggagcagatgcgccgctaccgtcagcgtcgccagaaccgctctgactggcgcctgtggtggacgagagacgctcgtcgccggtaagcatgtacttctcttcctcttctgcgagcgccttgtcggcggccttctcggcgacggtgcgttttctcgtcttggggttgggaggcgggtcggagtgccggggatcgtggacattgttgatcaaggcgatggcttcgtcgcggttcttggggacctcgagatcgagtggttccatggtggcgactaggacttggccctcgaatgcgtgcatttcgtttccgctgagctccatcttctggcgtttctgccgcttagccggcggtggcatgctggtagtaggcgtgggcgggacagcggatagaggggttggcggtggcatggcagatgtatccgagcctgccttcaagtcacctgcgcctcttggggtgctggccttgagggacatctctgtatagagactctcgggtgtggggaacaagaccttggtggtcaccgtggccttgggaggttctttgctttttgcgttgtcgctggcagtcatgggagctggtgtggggttctccttatcttccccttcctcacttgttactgcgggcttatttgtgtctggcgcattacggggcttggacccatcagcagcttcagttttgggaaaggggacccagggcgagtgggtgatgtagtcgctgtggttgtggatggagaaggggatgctggagccggccttggaggatggtctggcctcgtctttggccaaggtggggggcagcttgtggttgtgcacctggacaatcaggcatccctcgtagaaggggacatcagctgcgatcagttccccgagcagtaggccgtggggcacagtggcgttgcggacgtggtgtaggaatgcgctcatgggagatttgtactggaaggtggattcctgcgcatcgaagcggaagtaggtggcgtggagatggaccaccagcgagggggggttgcccgtgtactttttcaggatgtactgctgggtcagcttcttggggcgaggctcgaagacacaaggcacggcgggatctctggtcaagccggctgagcggggcacggcgatggaggtcttcttgggctggttgccggtgtcgcgacgggctcgaggcggtggtggacgggcagactgggtcgagacggagatgccgttgacgggcggtgctatgggagtgatggatgtcgcagagctcggggtctggctctgtttggcggtggccgaggtgggagggatcttggccgagatggatggagagggcgatgactgggaggatggggcgccattggtctggatgccggcgggcgtgggacgcttgagcttggggacggcgggcacaggcaccgcggtgacgacgggcggcggcatcgctgcggtgtgggaagccaccgatagagatgacggtggctataggcgacgacgaggctgatgggatcgcatgggtggtggttgcggatgagattatgtgcgtgcttatatgggagtatattcgactgcagatgtggatacaaagcgccgggggttgacgagggcgcctgcgtctttgaagcgaacgggcacggctgcggactagataagaatatatgcttgagcacgagcaatgggtaaacgagtggcgacggcgacgttggagatgatcgagcacggccggtgcgcacaagggcgggcgatgcggcgcgttggcgttgcgggagatgcgatggaaggatcacatttgatggagatggaatcgctagtagtcgaatgttggccgactgggggataagcaagagatctagtcaaagacgcggtcgctatactcgcgcaatctcgtttgaacgtaaattatgtattgaaatgcgcgccagtagccaccgtattcatcgcagcatacagccagcctgcacctgggatggggaggaggtgaaatggaatgatgatgctgcgaattggacgagtgtcgttgattgatgcgtgtgatgtctgctgatgtcgggagccttggctgaggctcgtccacccaaatccacagcgcttcctcacccctgtctccacactgtcgcacacgctgagcttgcgcactttcacccgcccgca

SEQ ID NO: 27994 - DNA, 2976 bp, Muscodor strobelii
  misc_feature: SGI cDNA ID NO. 569600
  misc_feature: Reduced expression when VOC is produced
  misc_feature: Encodes the peptide sequence at SEQ ID NO 27995
atgccgccgcccgtcgtcaccgcggtgcctgtgcccgccgtccccaagctcaagcgtcccacgcccgccggcatccagaccaatggcgccccatcctcccagtcatcgccctctccatccatctcggccaagatccctcccacctcggccaccgccaaacagagccagaccccgagctctgcgacatccatcactcccatagcaccgcccgtcaacggcatctccgtctcgacccagtctgcccgtccaccaccgcctcgagcccgtcgcgacaccggcaaccagcccaagaagacctccatcgccgtgccccgctcagccggcttgaccagagatcccgccgtgccttgtgtcttcgagcctcgccccaagaagctgacccagcagtacatcctgaaaaagtacacgggcaaccccccctcgctggtggtccatctccacgccacctacttccgcttcgatgcgcaggaatccaccttccagtacaaatctcccatgagcgcattcctacaccacgtccgcaacgccactgtgccccacggcctactgctcggggaactgatcgcagctgatgtccccttctacgagggatgcctgattgtccaggtgcacaaccacaagctgccccccaccttggccaaagacgaggccagaccatcctccaaggccggctccagcatccccttctccatccacaaccacagcgactacatcacccactcgccctgggtcccctttcccaaaactgaagctgctgatgggtccaagccccgtaatgcgccagacacaaataagcccgcagtaacaagtgaggaaggggaagataaggagaaccccacaccagctcccatgactgccagcgacaacgcaaaaagcaaagaacctcccaaggccacggtgaccaccaaggtcttgttccccacacccgagagtctctatacagagatgtccctcaaggccagcaccccaagaggcgcaggtgacttgaaggcaggctcggatacatctgccatgccaccgccaacccctctatccgctgtcccgcccacgcctactaccagcatgccaccgccggctaagcggcagaaacgccagaagatggagctcagcggaaacgaaatgcacgcattcgagggccaagtcctagtcgccaccatggaaccactcgatctcgaggtccccaagaaccgcgacgaagccatcgccttgatcaacaatgtccacgatccccggcactccgacccgcctcccaaccccaagacgagaaaacgcaccgtcgccgagaaggccgccgacaaggcgctcgcagaagaggaagagaagtacatgcttaccggcgacgagcgtctctcgtccaccacaggcgccagtcagagcggttctggcgacgctgacggtagcggcgcatctgctcctcagttcgaggcccgctttgagcgcctcaacactctgactctgatcaagaaggagcatgcagagaagaagcagcaggagcgagagcgacaggcagagaacgagaggaagatcaacctccagaaacaacaacaggcccaggcagcacaagagcaggccgagcagctcagacagcaacaggacgccgcagcgcgccgagaggatgctgctcgtaaggcgcaggccgcagcgcaagcatcgcgagagcaacaacggcgcatgctcgccgcccaggctcaggctcaggccgcccaggccgccgcctcgccccattcaccaccgaatcctcaagtcaacaacatgccacagccagcacatggccaccctgctcagaatggcggcatggcgggcggtcagcccagtagccaagctcagcgctttgcccaggcggtatcgcagccggccgtctcttcgccgatcgtgagacagaatacgccccagaacatgtcgagtcccatggttggcaatgtacccatgtcccagaccaattccggcatgggaggcagcccggcaagaccaccttctgtcgtccagacccagccgcctatgtccgcagccatggctatcagcatgtcggctcggggtagtcagcagagccatccttctggcacccccagaatgcccaacgcgacacctcaaatggcgcatggaacccccatcaatcggcctatggctaccccgcgcatgacccaagccagtccgcctccaggcatgatggtcacaaactcgcccatgaatccgaacatgatgatggctcaccaaaataacatgggccagcctggtcataacccggtcatggccgcacagatcgcagctcagcagcaccaacagcaccaacagcaaatacaacaacgtatgctgatgcaacagcaagcgcagcagatgaggatgaacgggcaggcgcaacagatgtcgccacaggtgcagcagcagatgcttcagcagcagatggcgcgccagatgcaggctatgcagatgcagaacggcgggatgatgactccgcaacaacaacaccagcagcagcaacagctcctccaacagtaccaggcaacgctacagcaacaaacagctcatatgcaaggacaggtgccaggacagccgcacccaggaaatcccaattttgccaacatgaacggcatgaatatgggcatgcagcagcctatgcagcaaggccagcccacacaagcgcagctgcagcagatccaacagatgcggatgagagcgatgcagatgcagcagcagggacagcagcagggcggaaatatggcgcaaatgccacagcagattcctgcacaattccagcagcagataagacagcgtggaatgcaatttctgcagaacaatataggcatcttggcccagcagtatggaggcgagggcaatataccgccagaggcattggagaagttcaaacagcagtgcatggccaaggctcatcaggagtttaatttgcgtaacaagcagatgcagcaacagcgaatgatgcagcaacagcaggctcagcaacaggctcagcagcattag

SEQ ID NO: 27995 - protein, 991 aa, Muscodor strobelii
  misc_feature: SGI Peptide ID NO. 569600
  misc_feature (43)..(752): NCBI GI: 261357252 Blast Desc: conserved [Verticillium albo-atrum VaMs.102]
  misc_feature (135)..(729): NCBI GI: 256730557 Blast Desc: NECHADRAFT_102960 [Nectria haematococca mpVI 77-13-4]
  misc_feature (138)..(508): NCBI GI: 116200149 Blast Desc: CHGG_08230 [Chaetomium globosum CBS 148.51] gi|88179509|gb|EAQ86977.1| CHGG_08230 [Chaetomium globosum CBS 148.51]
  misc_feature (98)..(723): NCBI GI: 154322505 Blast Desc: BC1G_00595 [Botryotinia fuckeliana B05.10] gi|150847929|gb|EDN23122.1| BC1G_00595 [Botryotinia fuckeliana B05.10]
  misc_feature (5)..(740): NCBI GI: 225561363 Blast Desc: conserved [Ajellomyces capsulatus G186AR]
  misc_feature (5)..(734): NCBI GI: 239612658 Blast Desc: conserved [Ajellomyces dermatitidis ER-3]
  misc_feature (5)..(734): NCBI GI: 261191520 Blast Desc: conserved [Ajellomyces dermatitidis SLH14081] gi|239589934|gb|EEQ72577.1| conserved [Ajellomyces dermatitidis SLH14081]
  misc_feature (5)..(733): NCBI GI: 154282473 Blast Desc: [Ajellomyces capsulatus NAm1] gi|150410212|gb|EDN05600.1| [Ajellomyces capsulatus NAm1]
  misc_feature (5)..(733): NCBI GI: 240274469 Blast Desc: conserved [Ajellomyces capsulatus H143]
  misc_feature (5)..(736): NCBI GI: 225677715 Blast Desc: conserved [Paracoccidioides brasiliensis Pb03]
  misc_feature: Useful for introducing or modulating the production of volatile compounds
MPPPVVTAVPVPAVPKLKRPTPAGIQTNGAPSSQSSPSPSISAKIPPTSATAKQSQTPSSATSITPIAPPVNGISVSTQSARPPPPRARRDTGNQPKKTSIAVPRSAGLTRDPAVPCVFEPRPKKLTQQYILKKYTGNPPSLVVHLHATYFRFDAQESTFQYKSPMSAFLHHVRNATVPHGLLLGELIAADVPFYEGCLIVQVHNHKLPPTLAKDEARPSSKAGSSIPFSIHNHSDYITHSPWVPFPKTEAADGSKPRNAPDTNKPAVTSEEGEDKENPTPAPMTASDNAKSKEPPKATVTTKVLFPTPESLYTEMSLKASTPRGAGDLKAGSDTSAMPPPTPLSAVPPTPTTSMPPPAKRQKRQKMELSGNEMHAFEGQVLVATMEPLDLEVPKNRDEAIALINNVHDPRHSDPPPNPKTRKRTVAEKAADKALAEEEEKYMLTGDERLSSTTGASQSGSGDADGSGASAPQFEARFERLNTLTLIKKEHAEKKQQERERQAENERKINLQKQQQAQAAQEQAEQLRQQQDAAARREDAARKAQAAAQASREQQRRMLAAQAQAQAAQAAASPHSPPNPQVNNMPQPAHGHPAQNGGMAGGQPSSQAQRFAQAVSQPAVSSPIVRQNTPQNMSSPMVGNVPMSQTNSGMGGSPARPPSVVQTQPPMSAAMAISMSARGSQQSHPSGTPRMPNATPQMAHGTPINRPMATPRMTQASPPPGMMVTNSPMNPNMMMAHQNNMGQPGHNPVMAAQIAAQQHQQHQQQIQQRMLMQQQAQQMRMNGQAQQMSPQVQQQMLQQQMARQMQAMQMQNGGMMTPQQQHQQQQQLLQQYQATLQQQTAHMQGQVPGQPHPGNPNFANMNGMNMGMQQPMQQGQPTQAQLQQIQQMRMRAMQMQQQGQQQGGNMAQMPQQIPAQFQQQIRQRGMQFLQNNIGILAQQYGGEGNIPPEALEKFKQQCMAKAHQEFNLRNKQMQQQRMMQQQQAQQQAQQH

SEQ ID NO: 27996 - DNA, 1248 bp, Muscodor strobelii
  misc_feature: SGI cDNA ID NO. 569601
  misc_feature: Reduced expression when VOC is produced
  misc_feature: Encodes the peptide sequence at SEQ ID NO 27997
atgtcgtcgtcgtacgattcatccaggcgacgtcgtggtgtctggagccattgggtgcccctcgtcgtcaccgtcaccgtcgccaccgttggtgttgccgcctgggcgtggagccagcgcacaaccgaggaggaggagagcgactcggcacctgccgacctcgactacgagaatgccgactacggcgacaacccggcctatggtgcaaactctcgcgatgcccgccgttcgacaaccagaccgactgtcaccagagacgatgtgagctacggtgtgggcgacgtgcaccccgaggccagtggtgcacctgcgggctggggtgctcagatgtctggcgccttgcgacggacgccgagcccacagcagttcctgtctaacgcgggcaagacggtcgcggcgagcgtggcaggcgtgggcgcggccatgggcagcgccttggctgccattcgcgaagaagacaagaacgcatacgcagaccacgaaacctggtccgaggaggcggaagcgaagaaggaaaagccctcttctaagtcatctcctcgcggccatgactcgggcaagcgccgcaagaccgtcactatcatcgtctcggcggacagcggcgccgacgactttgatcacgatgactttcacgaacatgcctctattttgtcgcacatccccaagaacattgatttctccaagatcaagctgttcgtgttgatatacgcgcctggtatgaaggagacgggactggaagcaccagcaagtaacctacctccggcctcgctgagttcgtcattctcaaacataagtcataaccaggctcagacgcccggagacgagagcaaaagcccactactgcctgccaactcggccaactcgacgttcaacgcggtatactcgcaagcgatgggcctagtggagaaggagtccatgatcttcccctttaccacggccaatgggtacgtgcacattctacgccacctggaacccgaagttgtgtacctgcaagagtcgctgggaggcgagaatgggagcctcgtaacacagcttcagtcatggctccggcatgatgtgatcctggtggtaggggctgacgggggacacgggggactggcggatagcgagtctgaggctgaacgaccggagcggaaggagctgtggtggcagaaggaagagagagtggggcgcggtagaggagtggtggttgtggacagcctgagggtgggagacgattggagccggcgcattcaggggaacgagtaa

SEQ ID NO: 27997 - protein, 415 aa, Muscodor strobelii
  misc_feature: SGI Peptide ID NO. 569601
  misc_feature (8)..(415): NCBI GI: 39968597 Blast Desc: MGG_02391 [Magnaporthe grisea 70-15] gi|145606316|ref|XP_001406895.1| MGG_11920 [Magnaporthe grisea 70-15] gi|145014014|gb|EDJ98655.1| MGG_11920 [Magnaporthe grisea
  misc_feature (11)..(415): NCBI GI: 261357251 Blast Desc: conserved [Verticillium albo-atrum VaMs.102]
  misc_feature (1)..(415): NCBI GI: 171690056 Blast Desc: protein product [Podospora anserina] gi|170944983|emb|CAP71094.1| protein product [Podospora anserina]
  misc_feature (1)..(415): NCBI GI: 116200151 Blast Desc: CHGG_08231 [Chaetomium globosum CBS 148.51] gi|88179510|gb|EAQ86978.1| CHGG_08231 [Chaetomium globosum CBS 148.51]
  misc_feature (142)..(415): NCBI GI: 256730556 Blast Desc: NECHADRAFT_74188 [Nectria haematococca mpVI 77-13-4]
  misc_feature (1)..(415): NCBI GI: 154322773 Blast Desc: BC1G_00729 [Botryotinia fuckeliana B05.10] gi|150848063|gb|EDN23256.1| BC1G_00729 [Botryotinia fuckeliana B05.10]
  misc_feature (1)..(415): NCBI GI: 156064745 Blast Desc: SS1G_00380 [Sclerotinia sclerotiorum 1980] gi|154691242|gb|EDN90980.1| SS1G_00380 [Sclerotinia sclerotiorum 1980]
  misc_feature (7)..(413): NCBI GI: 145230311 Blast Desc: An01g10460 [Aspergillus niger] gi|134055581|emb|CAK37227.1| protein product [Aspergillus niger]
  misc_feature (7)..(415): NCBI GI: 70996554 Blast Desc: conserved [Aspergillus fumigatus Af293] gi|66850667|gb|EAL90994.1| conserved [Aspergillus fumigatus Af293] gi|159131768|gb|EDP56881.1| conserved [Aspergillus A1163]
  misc_feature (7)..(415): NCBI GI: 119494397 Blast Desc: NFIA_008740 [Neosartorya fischeri NRRL 181] gi|119412256|gb|EAW22197.1| conserved [Neosartorya fischeri NRRL 181]
  misc_feature: Useful for introducing or modulating the production of volatile compounds
MSSSYDSSRRRRGVWSHWVPLVVTVTVATVGVAAWAWSQRTTEEEESDSAPADLDYENADYGDNPAYGANSRDARRSTTRPTVTRDDVSYGVGDVHPEASGAPAGWGAQMSGALRRTPSPQQFLSNAGKTVAASVAGVGAAMGSALAAIREEDKNAYADHETWSEEAEAKKEKPSSKSSPRGHDSGKRRKTVTIIVSADSGADDFDHDDFHEHASILSHIPKNIDFSKIKLFVLIYAPGMKETGLEAPASNLPPASLSSSFSNISHNQAQTPGDESKSPLLPANSANSTFNAVYSQAMGLVEKESMIFPFTTANGYVHILRHLEPEVVYLQESLGGENGSLVTQLQSWLRHDVILVVGADGGHGGLADSESEAERPERKELWWQKEERVGRGRGVVVVDSLRVGDDWSRRIQGNE

SEQ ID NO: 27998 - DNA, 1752 bp, Muscodor strobelii
  misc_feature: SGI EST ID NO. CUFF.66141.0
  misc_feature: Variant of the nucleotide sequence at SEQ ID NO 27996
gttacccctgccaaccacgacgacccatggcagggatcctcatggccccaagtcaacaacacgcccgacaccagccaccccaaccacacccgtccgttgtatctcagctcaggtctgacgacaacatcgtagctcggcgagtacaaccaacatttccactgctaccagcgtgatattcaaagtgcagtgccccttctgttgccagatacgtctccgtgctgctcttgcgcccgaaagcccctttgccacatcggcgttgacgccaacgcaagcctagtacgggggcgcgcattgccatgatctcgcctgcataaatgtcgtcgtcgtacgattcatccaggcgacgtcgtggtgtctggagccattgggtgcccctcgtcgtcaccgtcaccgtcgccaccgttggtgttgccgcctgggcgtggagccagcgcacaaccgaggaggaggagagcgactcggcacctgccgacctcgactacgagaatgccgactacggcgacaacccggcctatggtgcaaactctcgcgatgcccgccgttcgacaaccagaccgactgtcaccagagacgatgtgagctacggtgtgggcgacgtgcaccccgaggccagtggtgcacctgcgggctggggtgctcagatgtctggcgccttgcgacggacgccgagcccacagcagttcctgtctaacgcgggcaagacggtcgcggcgagcgtggcaggcgtgggcgcggccatgggcagcgccttggctgccattcgcgaagaagacaagaacgcatacgcagaccacgaaacctggtccgaggaggcggaagcgaagaaggaaaagccctcttctaagtcatctcctcgcggccatgactcgggcaagcgccgcaagaccgtcactatcatcgtctcggcggacagcggcgccgacgactttgatcacgatgactttcacgaacatgcctctattttgtcgcacatccccaagaacattgatttctccaagatcaagctgttcgtgttgatatacgcgcctggtatgaaggagacgggactggaagcaccagcaagtaacctacctccggcctcgctgagttcgtcattctcaaacataagtcataaccaggctcagacgcccggagacgagagcaaaagcccactactgcctgccaactcggccaactcgacgttcaacgcggtatactcgcaagcgatgggcctagtggagaaggagtccatgatcttcccctttaccacggccaatgggtacgtgcacattctacgccacctggaacccgaagttgtgtacctgcaagagtcgctgggaggcgagaatgggagcctcgtaacacagcttcagtcatggctccggcatgatgtgatcctggtggtaggggctgacgggggacacgggggactggcggatagcgagtctgaggctgaacgaccggagcggaaggagctgtggtggcagaaggaagagagagtggggcgcggtagaggagtggtggttgtggacagcctgagggtgggagacgattggagccggcgcattcaggggaacgagtaatgattgttgtgcaaaagcatatttgctacctatagcttagatgtattcatgtggaattactgatttgctcattaccgatatatacacatattcgaatcacatgtacgcctacgatacctaccctgggtagatagtcctcaaagcgtggtgtcaatgattctgactcccaaataagcagaatgaatacaca

SEQ ID NO: 27999 - DNA, 1188 bp, Muscodor strobelii
  misc_feature: SGI cDNA ID NO. 569602
  misc_feature: Encodes the peptide sequence at SEQ ID NO 28000
atgtcgtcgtcgtacgattcatccaggcgacgtcgtggtgtctggagccattgggtgcccctcgtcgtcaccgtcaccgtcgccaccgttggtgttgccgcctgggcgtggagccagcgcacaaccgaggaggaggagagcgactcggcacctgccgacctcgactacgagaatgccgactacggcgacaacccggcctatggtgcaaactctcgcgatgcccgccgttcgacaaccagaccgactgtcaccagagacgatgtgagctacggtgtgggcgacgtgcaccccgaggccagtggtgcacctgcgggctggggtgctcagatgtctggcgccttgcgacggacgccgagcccacagcagttcctgtctaacgcgggcaagacggtcgcggcgagcgtggcaggcgtgggcgcggccatgggcagcgccttggctgccattcgcgaagaagacaagaacgcatacgcagaccacgaaacctggtccgaggaggcggaagcgaagaaggaaaagccctcttctaagtcatctcctcgcggccatgactcgggcaagcgccgcaagaccgtcactatcatcgtctcggcggacagcggcgccgacgactttgatcacgatgactttcacgaacatgcctctattttgtcgcacatccccaagaacattgatttctccaagatcaagctgttcgtgttgatatacgcgcctggtatgaaggagacgggactggaagcaccagctcagacgcccggagacgagagcaaaagcccactactgcctgccaactcggccaactcgacgttcaacgcggtatactcgcaagcgatgggcctagtggagaaggagtccatgatcttcccctttaccacggccaatgggtacgtgcacattctacgccacctggaacccgaagttgtgtacctgcaagagtcgctgggaggcgagaatgggagcctcgtaacacagcttcagtcatggctccggcatgatgtgatcctggtggtaggggctgacgggggacacgggggactggcggatagcgagtctgaggctgaacgaccggagcggaaggagctgtggtggcagaaggaagagagagtggggcgcggtagaggagtggtggttgtggacagcctgagggtgggagacgattggagccggcgcattcaggggaacgagtaa

SEQ ID NO: 28000 - protein, 395 aa, Muscodor strobelii
  misc_feature: SGI Peptide ID NO. 569602
  misc_feature (8)..(395): NCBI GI: 39968597 Blast Desc: MGG_02391 [Magnaporthe grisea 70-15] gi|145606316|ref|XP_001406895.1| MGG_11920 [Magnaporthe grisea 70-15] gi|145014014|gb|EDJ98655.1| MGG_11920 [Magnaporthe grisea
  misc_feature (8)..(395): NCBI GI: 261357251 Blast Desc: conserved [Verticillium albo-atrum VaMs.102]
  misc_feature (1)..(395): NCBI GI: 171690056 Blast Desc: protein product [Podospora anserina] gi|170944983|emb|CAP71094.1| protein product [Podospora anserina]
  misc_feature (1)..(395): NCBI GI: 116200151 Blast Desc: CHGG_08231 [Chaetomium globosum CBS 148.51] gi|88179510|gb|EAQ86978.1| CHGG_08231 [Chaetomium globosum CBS 148.51]
  misc_feature (1)..(395): NCBI GI: 154322773 Blast Desc: BC1G_00729 [Botryotinia fuckeliana B05.10] gi|150848063|gb|EDN23256.1| BC1G_00729 [Botryotinia fuckeliana B05.10]
  misc_feature (142)..(395): NCBI GI: 256730556 Blast Desc: NECHADRAFT_74188 [Nectria haematococca mpVI 77-13-4]
  misc_feature (1)..(395): NCBI GI: 156064745 Blast Desc: SS1G_00380 [Sclerotinia sclerotiorum 1980] gi|154691242|gb|EDN90980.1| SS1G_00380 [Sclerotinia sclerotiorum 1980]
  misc_feature (8)..(395): NCBI GI: 85075449 Blast Desc: NCU03549 [Neurospora crassa OR74A] gi|18376050|emb|CAD21056.1| [Neurospora crassa] gi|28916779|gb|EAA26537.1| [Neurospora crassa OR74A]
  misc_feature (7)..(393): NCBI GI: 145230311 Blast Desc: An01g10460 [Aspergillus niger] gi|134055581|emb|CAK37227.1| protein product [Aspergillus niger]
  misc_feature (7)..(395): NCBI GI: 119185947 Blast Desc: CIMG_03021 [Coccidioides immitis RS]
MSSSYDSSRRRRGVWSHWVPLVVTVTVATVGVAAWAWSQRTTEEEESDSAPADLDYENADYGDNPAYGANSRDARRSTTRPTVTRDDVSYGVGDVHPEASGAPAGWGAQMSGALRRTPSPQQFLSNAGKTVAASVAGVGAAMGSALAAIREEDKNAYADHETWSEEAEAKKEKPSSKSSPRGHDSGKRRKTVTIIVSADSGADDFDHDDFHEHASILSHIPKNIDFSKIKLFVLIYAPGMKETGLEAPAQTPGDESKSPLLPANSANSTFNAVYSQAMGLVEKESMIFPFTTANGYVHILRHLEPEVVYLQESLGGENGSLVTQLQSWLRHDVILVVGADGGHGGLADSESEAERPERKELWWQKEERVGRGRGVVVVDSLRVGDDWSRRIQGNE

SEQ ID NO: 28001 - DNA, 1752 bp, Muscodor strobelii; identical to SEQ ID NO: 27998
  misc_feature: SGI EST ID NO. CUFF.66141.0
  misc_feature: Variant of the nucleotide sequence at SEQ ID NO 27999

SEQ ID NO: 28002 - DNA, 1650 bp, Muscodor strobelii
  misc_feature: SGI cDNA ID NO. 569603
  misc_feature: Encodes the peptide sequence at SEQ ID NO 28003
atgccgcacgcaagttcgatgccctcaccgggcgtccaggctctcattctctgcggcccgggctcttcttttcctactttcaccgccaacccagatgaaaatccgaaggccttattacctatcgccaaccggccaatggtttggtatcccatcgacttctgctatcgcagtggcatctcaaatatcaccctggtctgcccaccatcagccgcagaagccatgaccaccgccctgaatactaacccagtcttaaccagcctgcctcacccacgtccagatcttatatcaccacaggcattagactataacaccggcaccgcagagatcctccggctccccgagatccgagagatcgttacctcggaccttctaatcctaccgtgcgatctagtctgtgagcttggcggtgacaaactgttgcaagcttggatggtgaaagcagctagtctaccagatctactcggcgatgatagagctccttactgtagtggagggctgggagtttggtacgaaacaaagacggccaatgcggtcaagggcgaggagacagatttcctcatcactactcccatgtcacaaatcaagcccagaacgagtcaaaaccaggttctacaacgtctatcccacttggcagtatctatgccgactgattcgctgaaagacgtcgtcgaggagaagaatgcaatccctctgcgacatggtttattgcgcaagcatccaaggctcagaatgctcaagacgcatcgtgatgcacatatctattttttacccaaatgggtaataggttttgtgcaagaaaatgggcgactagagactatcggagaggatgtcgtcggatggtgggccaagtcaacatggcaaaccggattgccagaaaagcttggtttgatgaaagtgcttgaaggtcgaacatctagtactacgtcctctagtgcaagaatacccgatgctgcacgcgacgagagtccatcttcggagaacgaaagacttaactctcagcggagcgacagttctcctcctgcaggttcgagaaaggatcatggcgcattgctatccaaaccatctcgggcttctgtaccccctttcttagcatacatccattccccacagccagatgctccactcatccgtcgtgttgataatgcaagacttcttctttcagtgtcattgcagttggccaaactgccttctttggaagaacatccggatgcaccttcggcattcgcgcaccccaaaaaagtggcctaccctgatggagtccagcctcgaactaccattacgaggcaggattgcttgatcgcagataatgtgatggtagatgagaaaacctcgatcaaagagtgtgtcattggcgcaaactgtcaaatcaacgaaggcgccaaacttttccagtgtttgctcatggataatgtggtggtgggcaaaggatgcaagctaactcgctgtattcttggcaagcgcagtgacattggtgaaggctcgactctcacagactgcgaagtacaagagaatctcctggttgagccgcgaaccgacgacaaagataacaagttgatgagttcctctggccttgaagcaactgaacaagatttggaggatgcaatgcaagacaacgaagaggggttaagctctgacattgatatgctgtag

SEQ ID NO: 28003 - protein, 549 aa, Muscodor strobelii
  misc_feature: SGI Peptide ID NO. 569603
  misc_feature (1)..(537): NCBI GI: 261357250 Blast Desc: conserved [Verticillium albo-atrum VaMs.102]
  misc_feature (1)..(527): NCBI GI: 164427486 Blast Desc: NCU03548 [Neurospora crassa OR74A] gi|157071762|gb|EAA26536.2| conserved [Neurospora crassa OR74A]
  misc_feature (1)..(527): NCBI GI: 18376051 Blast Desc: related to eukaryotic translation initiation factor EIF-2B subunit 3 [Neurospora crassa]
  misc_feature (1)..(531): NCBI GI: 116200153 Blast Desc: CHGG_08232 [Chaetomium globosum CBS 148.51] gi|88179511|gb|EAQ86979.1| CHGG_08232 [Chaetomium globosum CBS 148.51]
  misc_feature (1)..(540): NCBI GI: 46109386 Blast Desc: FG01575.1 [Gibberella zeae PH-1]
  misc_feature (1)..(541): NCBI GI: 39968595 Blast Desc: MGG_02390 [Magnaporthe grisea 70-15] gi|145014019|gb|EDJ98660.1| MGG_02390 [Magnaporthe grisea 70-15]
  misc_feature (1)..(531): NCBI GI: 171690054 Blast Desc: protein product [Podospora anserina] gi|170944982|emb|CAP71093.1| protein product [Podospora anserina]
  misc_feature (1)..(545): NCBI GI: 154322775 Blast Desc: BC1G_00730 [Botryotinia fuckeliana B05.10] gi|150848064|gb|EDN23257.1| BC1G_00730 [Botryotinia fuckeliana B05.10]
  misc_feature (1)..(544): NCBI GI: 156064749 Blast Desc: SS1G_00382 [Sclerotinia sclerotiorum 1980] gi|154691244|gb|EDN90982.1| SS1G_00382 [Sclerotinia sclerotiorum 1980]
  misc_feature (1)..(540): NCBI GI: 70996556 Blast Desc: eukaryotic translation initiation factor subunit eIF2B-gamma, [Aspergillus fumigatus Af293] gi|66850668|gb|EAL90995.1| eukaryotic translation initiation
MPHASSMPSPGVQALILCGPGSSFPTFTANPDENPKALLPIANRPMVWYPIDFCYRSGISNITLVCPPSAAEAMTTALNTNPVLTSLPHPRPDLISPQALDYNTGTAEILRLPEIREIVTSDLLILPCDLVCELGGDKLLQAWMVKAASLPDLLGDDRAPYCSGGLGVWYETKTANAVKGEETDFLITTPMSQIKPRTSQNQVLQRLSHLAVSMPTDSLKDVVEEKNAIPLRHGLLRKHPRLRMLKTHRDAHIYFLPKWVIGFVQENGRLETIGEDVVGWWAKSTWQTGLPEKLGLMKVLEGRTSSTTSSSARIPDAARDESPSSENERLNSQRSDSSPPAGSRKDHGALLSKPSRASVPPFLAYIHSPQPDAPLIRRVDNARLLLSVSLQLAKLPSLEEHPDAPSAFAHPKKVAYPDGVQPRTTITRQDCLIADNVMVDEKTSIKECVIGANCQINEGAKLFQCLLMDNVVVGKGCKLTRCILGKRSDIGEGSTLTDCEVQENLLVEPRTDDKDNKLMSSSGLEATEQDLEDAMQDNEEGLSSDIDML

SEQ ID NO: 28004 - DNA, 3599 bp, Muscodor strobelii
  misc_feature: SGI EST ID NO. CUFF.66116.0
  misc_feature: Variant of the nucleotide sequence at SEQ ID NO 28002
cgacagttcgcgatgactcaacctatttcgacgtcgaacaaataatgagcatataccttttcacatttacgcgtttgtcggcaatcaagtataagagtcgatcagtcgcgacgtcttttcacgtccttcaaggcaccgttggggaggttgaaacacttcacgcgagcacctctgtcagcccctccttctataagtactagttatccatctctattgaggcggaatccgttggccgcgcgagccagtctcggtcaagatgccgcacgcaagttcgatgccctcaccgggcgtccaggctctcattctctgcggcccgggctcttcttttcctactttcaccgccaacccagatgaaaatccgaaggccttattacctatcgccaaccggccaatggtttggtatcccatcgacttctgctatcgcagtggcatctcaaatatcaccctggtctgcccaccatcagccgcagaagccatgaccaccgccctgaatactaacccagtcttaaccagcctgcctcacccacgtccagatcttatatcaccacaggcattagactataacaccggcaccgcagagatcctccggctccccgagatccgagagatcgttacctcggaccttctaatcctaccgtgcgatctagtctgtgagcttggcggtgacaaactgttgcaagcttggatggtgaaagcagctagtctaccagatctactcggcgatgatagagctccttactgtagtggagggctgggagtttggtacgaaacaaagacggccaatgcggtcaagggcgaggagacagatttcctcatcactactcccatgtcacaaatcaagcccagaacgagtcaaaaccaggttctacaacgtctatcccacttggcagtatctatgccgactgattcgctgaaagacgtcgtcgaggagaagaatgcaatccctctgcgacatggtttattgcgcaagcatccaaggctcagaatgctcaagacgcatcgtgatgcacatatctattttttacccaaatgggtaataggttttgtgcaagaaaatgggcgactagagactatcggagaggatgtcgtcggatggtgggccaagtcaacatggcaaaccggattgccagaaaagcttggtttgatgaaagtgcttgaaggtcgaacatctagtactacgtcctctagtgcaagaatacccgatgctgcacgcgacgagagtccatcttcggagaacgaaagacttaactctcagcggagcgacagttctcctcctgcaggttcgagaaaggatcatggcgcattgctatccaaaccatctcgggcttctgtaccccctttcttagcatacatccattccccacagccagatgctccactcatccgtcgtgttgataatgcaagacttcttctttcagtgtcattgcagttggccaaactgccttctttggaagaacatccggatgcaccttcggcattcgcgcaccccaaaaaagtggcctaccctgatggagtccagcctcgaactaccattacgaggcaggattgcttgatcgcagataatgtgatggtagatgagaaaacctcgatcaaagagtgtgtcattggcgcaaactgtcaaatcaacgaaggcgccaaacttttccagtgtttgctcatggataatgtggtggtgggcaaaggatgcaagctaactcgctgtattcttggcaagcgcagtgacattggtgaaggctcgactctcacagactgcgaagtacaagagaatctcctggttgagccgcgaagtaagttgccgcctttccggttttcattccgcccttcggcataccgttgcgcggcccatttgttcatatgcagctgacatgcaagtagccgacgacaaagataacaagttgatgagttcctctggccttgaagcaactgaacaagatttggaggatgcaatgcaagacaacgaagaggggttaagctctgacattgatatgctgtagcttgcaatgatccggttacctggtaaccactataaagggctctagaagaccctcggatgcaaccaaccctgccaggcttcattagcttcgaatgtgaaaggctgtaaatggactatgcagtcagcaatccgctccatactgcagtcgatatctcgagacctcaagtggcatggctagcaggggtagctcagttatcgctatgggtagttaatcaagtgtatcggaccccatcacatttttgcatagtgtctgcctgtaagtgctttatgcacaagtcaatacagaagtgttctacatgcctcttaggttgcatggcacattccaagatgctcaaaagtctgagacttacaatcacgtctattagtcattgagtaccaaagtgccaacctgccgttaattcgtccatgctggacggcgcaacaccacatttgcaacttcacaccgctttcgctaggagccctgtcctcgcagggttacaatgcagggactacacagctactgtacataaaagtaacgctaccagcaacgaagtgtggcaacttagtctacaaaaggtcctcggcatgaatggccacatggcagacagctcacggctcgatgccaagctatttcgcgcccaagcgccaacgtgtgctacgcaacctacgatggtgctccaaccaacagtcattggttccggaccgccgcttttctcatggcgattatcgcatgttcttctggtagaaaaactggtataaaccagtccgccgtatcatccaatgaacaacggttgagctaccctcgcctgttacataccagcccctccaagttccaagtgtcggaattcgggcccccaagccaggttgaggtgctatctgccaaggcagctctgtctccggcgcagtgtcaccccatatgctcgagagccaactcagcgttcggtaaatagcgcctccatatgtaaagcatcgaagctcacatgtttcttcttcctctttcggcatgccgctgctcgcgcgccagtttcatgggtgaaatcccatagccgagtaccaacatccgttgcatttcgagccgagctcctttgttccggcgatatgcagtcggagcacacacaaaaaagcaaaatacggcattcattgggcagagagactcgggaagtcgatgggggggaaagtacgcggtccgatagctcttcggacctgaatctgtagcacatgtagggctgaagccataggtgtaccgttgagattttgcgctgtgttacagaccccacgcgaacaaaggaatcgaaagcctatatctcatcataagagggtataaaaggcaggggggaaggtatacaaaaggtacctagctccatgggacaattggtggaaggtcgtctcgctggcgctgcttggaatcgtgtgctctttggtccgccttcaacgccgatatcgttgatcgtgaataataggtacgcattttgacgagacttggctgcagtgcagtgctgcaaggttgagcaagaatggcatatcgtgttaccttcgcaaactgcgacacatcgttgagtcaacaacaagattgcttgtcgtacaacagatatgagatactttatgtttcactaagaatagaatgata

SEQ ID NO: 28005 - DNA, 1665 bp, Muscodor strobelii
  misc_feature: SGI cDNA ID NO. 569604
  misc_feature: Encodes the peptide sequence at SEQ ID NO 28006
atgccgcacgcaagttcgatgccctcaccgggcgtccaggctctcattctctgcggcccgggctcttcttttcctactttcaccgccaacccagatgaaaatccgaaggccttattacctatcgccaaccggccaatggtttggtatcccatcgacttctgctatcgcagtggcatctcaaatatcaccctggtctgcccaccatcagccgcagaagccatgaccaccgccctgaatactaacccagtcttaaccagcctgcctcacccacgtccagatcttatatcaccacaggcattagactataacaccggcaccgcagagatcctccggctccccgagatccgagagatcgttacctcggaccttctaatcctaccgtgcgatctagtctgtgagcttggcggtgacaaactgttgcaagcttggatggtgaaagcagctagtctaccagatctactcggcgatgatagagctccttactgtagtggagggctgggagtttggtacgaaacaaagacggccaatgcggtcaagggcgaggagacagatttcctcatcactactcccatgtcacaaatcaagcccagaacgagtcaaaaccaggttctacaacgtctatcccacttggcagtatctatgccgactgattcgctgaaagacgtcgtcgaggagaagaatgcaatccctctgcgacatggtttattgcgcaagcatccaaggctcagaatgctcaagacgcatcgtgatgcacatatctattttttacccaaatgggtaataggttttgtgcaagaaaatgggcgactagagactatcggagaggatgtcgtcggatggtgggccaagtcaacatggcaaaccggattgccagaaaagcttggtttgatgaaagtgcttgaaggtcgaacatctagtactacgtcctctagtgcaagaatacccgatgctgcacgcgacgagagtccatcttcggagaacgaaagacttaactctcagcggagcgacagttctcctcctgcaggttcgagaaaggatcatggcgcattgctatccaaaccatctcgggcttctgtaccccctttcttagcatacatccattccccacagccagatgctccactcatccgtcgtgttgataatgcaagacttcttctttcagtgtcattgcagttggccaaactgccttctttggaagaacatccggatgcaccttcggcattcgcgcaccccaaaaaagtggcctaccctgatggagtccagcctcgaactaccattacgaggcaggattgcttgatcgcagataatgtgatggtagatgagaaaacctcgatcaaagagtgtgtcattggcgcaaactgtcaaatcaacgaaggcgccaaacttttccagtgtttgctcatggataatgtggtggtgggcaaaggatgcaagctaactcgctgtattcttggcaagcgcagtgacattggtgaaggctcgactctcacagactgcgaagtacaagagaatctcctggttgagccgcgaactgacatgcaagtagccgacgacaaagataacaagttgatgagttcctctggccttgaagcaactgaacaagatttggaggatgcaatgcaagacaacgaagaggggttaagctctgacattgatatgctgtag

SEQ ID NO: 28006 - protein, 554 aa, Muscodor strobelii
  misc_feature: SGI Peptide ID NO. 569604
  misc_feature (1)..(542): NCBI GI: 261357250 Blast Desc: conserved [Verticillium albo-atrum VaMs.102]
  misc_feature (1)..(532): NCBI GI: 18376051 Blast Desc: related to eukaryotic translation initiation factor EIF-2B subunit 3 [Neurospora crassa]
  misc_feature (1)..(532): NCBI GI: 164427486 Blast Desc: NCU03548 [Neurospora crassa OR74A] gi|157071762|gb|EAA26536.2| conserved [Neurospora crassa OR74A]
  misc_feature (1)..(536): NCBI GI: 116200153 Blast Desc: CHGG_08232 [Chaetomium globosum CBS 148.51] gi|88179511|gb|EAQ86979.1| CHGG_08232 [Chaetomium globosum CBS 148.51]
  misc_feature (1)..(545): NCBI GI: 46109386 Blast Desc: FG01575.1 [Gibberella zeae PH-1]
  misc_feature (1)..(546): NCBI GI: 39968595 Blast Desc: MGG_02390 [Magnaporthe grisea 70-15] gi|145014019|gb|EDJ98660.1| MGG_02390 [Magnaporthe grisea 70-15]
  misc_feature (1)..(536): NCBI GI: 171690054 Blast Desc: protein product [Podospora anserina] gi|170944982|emb|CAP71093.1| protein product [Podospora anserina]
  misc_feature (1)..(550): NCBI GI: 154322775 Blast Desc: BC1G_00730 [Botryotinia fuckeliana B05.10] gi|150848064|gb|EDN23257.1| BC1G_00730 [Botryotinia fuckeliana B05.10]
  misc_feature (1)..(549): NCBI GI: 156064749 Blast Desc: SS1G_00382 [Sclerotinia sclerotiorum 1980] gi|154691244|gb|EDN90982.1| SS1G_00382 [Sclerotinia sclerotiorum 1980]
  misc_feature (1)..(545): NCBI GI: 70996556 Blast Desc: eukaryotic translation initiation factor subunit eIF2B-gamma, [Aspergillus fumigatus Af293] gi|66850668|gb|EAL90995.1| eukaryotic translation initiation
MPHASSMPSPGVQALILCGPGSSFPTFTANPDENPKALLPIANRPMVWYPIDFCYRSGISNITLVCPPSAAEAMTTALNTNPVLTSLPHPRPDLISPQALDYNTGTAEILRLPEIREIVTSDLLILPCDLVCELGGDKLLQAWMVKAASLPDLLGDDRAPYCSGGLGVWYETKTANAVKGEETDFLITTPMSQIKPRTSQNQVLQRLSHLAVSMPTDSLKDVVEEKNAIPLRHGLLRKHPRLRMLKTHRDAHIYFLPKWVIGFVQENGRLETIGEDVVGWWAKSTWQTGLPEKLGLMKVLEGRTSSTTSSSARIPDAARDESPSSENERLNSQRSDSSPPAGSRKDHGALLSKPSRASVPPFLAYIHSPQPDAPLIRRVDNARLLLSVSLQLAKLPSLEEHPDAPSAFAHPKKVAYPDGVQPRTTITRQDCLIADNVMVDEKTSIKECVIGANCQINEGAKLFQCLLMDNVVVGKGCKLTRCILGKRSDIGEGSTLTDCEVQENLLVEPRTDMQVADDKDNKLMSSSGLEATEQDLEDAMQDNEEGLSSDIDML

SEQ ID NO: 28007 - DNA, 3599 bp, Muscodor strobelii; identical to SEQ ID NO: 28004
  misc_feature: SGI EST ID NO. CUFF.66116.0
  misc_feature: Variant of the nucleotide sequence at SEQ ID NO 28005

SEQ ID NO: 28008 - DNA, 1119 bp, Muscodor strobelii
  misc_feature: SGI cDNA ID NO. 569605
  misc_feature: Elevated expression when VOC is produced
  misc_feature: Encodes the peptide sequence at SEQ ID NO 28009
atggaccttcacatggaccttcgagtcgggtttggcgaagagttctctttcgattcccaaacttttccttgtaactcatcatctggtggcagcttctcgtcagcatctacgactagttctacccaggacccatttacaccaacatccgggtgctcaacaccgggcatccagcctatgttaatggaacaagaaattatcgccagcgaggcatcatcaagctacgggctgactccaccagcgtctgcatttggtggctatttccctgctgacgccaaaattgagcttcatcatggctatggctacgagccactctcgggaactcccagtcgtcgaactagtgtgcagggccatgccggcagtattgacttcgattatgcacctatgatgagtactcctacggcctctcaaagccatcctgttcagtctaccaactctcagagcttcccacaatattcttttgggcaaggcatcacttccccgcctcttgagtaccctccaccttcgtactcgcttgagagctcggccttcgagatcccaccggcatggccatggtcgaatgacagtcccgtcaatttgttcgagaaacgcgaatctccgggacctctctctctgagagagatcccaattcgggaacgccaacctgcacatgtctatattccgatggctgggaggcggcatatttacgatgttgatcacgtacagcaaagaacgacagccttgcatcgggcccagggaggccgcatgaagcgaaagcggacacaggaagccatcctacatatggactcatacggggaaatacaaattcctcgatgccccaagggtggacatcggtgtccatacgaaatctgtagcgaccggaaagcattcaaacggcaagaacatttaaagagacacatactcactgtacacggaaatcaagcagaaatcaccacgatctgcgagttttgccaaaagaaattcaaccgaagagacaactggaggtctcatctcctactgcacaccaagaaggatgcaagcggtcgaacacgttaccatgaggaagctcaggcagtattggacgaggaaatgaggaaaactaaacaacgaaatattcctaaaaagaaaacttcagtattatga

SEQ ID NO: 28009 - protein, 372 aa, Muscodor strobelii
  misc_feature: SGI Peptide ID NO. 569605
  misc_feature (276)..(303): Pfam Id: PF00096 Pfam Desc: Zinc finger, C2H2 type
  misc_feature (43)..(369): NCBI GI: 46109388 Blast Desc: FG01576.1 [Gibberella zeae PH-1]
  misc_feature (43)..(366): NCBI GI: 261357249 Blast Desc: VDBG_05786 [Verticillium albo-atrum VaMs.102]
  misc_feature (35)..(363): NCBI GI: 85075600 Blast Desc: NCU03552 [Neurospora crassa OR74A] gi|28916803|gb|EAA26555.1| [Neurospora crassa OR74A]
  misc_feature (35)..(363): NCBI GI: 18376047 Blast Desc: related to zinc finger protein odd-paired-like (opl) [Neurospora crassa]
  misc_feature (43)..(362): NCBI GI: 256727840 Blast Desc: NECHADRAFT_83371 [Nectria haematococca mpVI 77-13-4]
  misc_feature (272)..(341): NCBI GI: 238878688 Blast Desc: conserved [Candida albicans WO-1]
  misc_feature (287)..(341): NCBI GI: 255728061 Blast Desc: [Candida tropicalis MYA-3404] gi|240133272|gb|EER32828.1| [Candida tropicalis MYA-3404]
  misc_feature (283)..(340): NCBI GI: 149247170 Blast Desc: LELG_00530 [Lodderomyces elongisporus NRRL YB-4239] gi|146447964|gb|EDK42352.1| LELG_00530 [Lodderomyces elongisporus NRRL YB-4239]
  misc_feature (268)..(343): NCBI GI: 150866445 Blast Desc: zf-C2H2 Zinc finger, C2H2 type [Pichia stipitis CBS 6054] gi|149387701|gb|ABN68021.2| zf-C2H2 Zinc finger, C2H2 type [Pichia stipitis CBS 6054]
  misc_feature (283)..(342): NCBI GI: 190345619 Blast Desc: PGUG_01635 [Pichia guilliermondii ATCC 6260]
  misc_feature: Useful for introducing or modulating the production of volatile compounds
MDLHMDLRVGFGEEFSFDSQTFPCNSSSGGSFSSASTTSSTQDPFTPTSGCSTPGIQPMLMEQEIIASEASSSYGLTPPASAFGGYFPADAKIELHHGYGYEPLSGTPSRRTSVQGHAGSIDFDYAPMMSTPTASQSHPVQSTNSQSFPQYSFGQGITSPPLEYPPPSYSLESSAFEIPPAWPWSNDSPVNLFEKRESPGPLSLREIPIRERQPAHVYIPMAGRRHIYDVDHVQQRTTALHRAQGGRMKRKRTQEAILHMDSYGEIQIPRCPKGGHRCPYEICSDRKAFKRQEHLKRHILTVHGNQAEITTICEFCQKKFNRRDNWRSHLLLHTKKDASGRTRYHEEAQAVLDEEMRKTKQRNIPKKKTSVL

SEQ ID NO: 28010 - DNA, 1256 bp, Muscodor strobelii
  misc_feature: SGI EST ID NO. CUFF.65991.0
  misc_feature: Variant of the nucleotide sequence at SEQ ID NO 28008
ttcgattatgcacctatgatgagtactcctacggcctctcaaagccatcctgttcagtctaccaactctcagagcttcccacaatattcttttgggcaaggcatcacttccccgcctcttgagtaccctccaccttcgtactcgcttgagagctcggccttcgagatcccaccggcatggccatggtcgaatgacagtcccgtcaatttgttcgagaaacgcgaatctccgggacctctctctctgagagagatcccaattcgggaacgccaacctgcacatgtctatattccgatggctgggaggcggcatatttacgatgttgatcacgtacagcaaagaacgacagccttgcatcgggcccagggaggccgcatgaagcgaaagcggacacaggaagccatcctacatatggactcatacggggaaatacaaattcctcgatgccccaagggtggacatcggtgtccatacgaaatctgtagcgaccggaaagcattcaaacggcaagaacatttaaagagacacatactcactgtacacggaaatcaagcagaaatcaccacgatctgcgagttttgccaaaagaaattcaaccgaagagacaactggaggtctcatctcctactgcacaccaagaaggatgcaagcggtcgaacacgttaccatgaggaagctcaggcagtattggacgaggaaatgaggaaaactaaacaacgaaatattcctaaaaagaaaacttcagtattatgaagcaacattggttcatcataataaaacgaagccacgaatctcaacgaaactttctaggataaacgaagaacacaacattttatcaacctttcgaaaaatgcaaggcgttatggtcgattctttttctttcttgcacttttggtgttggcatggaacttctcgggctcaaaatcatcacttatatttacttgctcaggcttcacgtatcttgtatcatcatcaccgctactgttggactcctactagcatttggacatcaagaaaaatgtagttggaccgggaattcggaggtctgtttctttaggactatattgtacaatattcccggcatttacaatggagttggattcagaaacggagatgctgcattcatgcttgtgcaggtttagctatgtctgacttgccccagtcataaactgcgaggcctgtagtttgaatggaatttgcactgacgctgggcgtcgatcatcaatgcctcatacctaaacgcctcagcatgccca

SEQ ID NO: 28011 - DNA, 1041 bp, Muscodor strobelii
  misc_feature: SGI cDNA ID NO. 569606
  misc_feature: Encodes the peptide sequence at SEQ ID NO 28012
atgtcatacggtaggctggagcactttgactgtgatgcttgtcagatccttcccaaagaagggcctgcacctcatatgcgtgttgatgggttattgggagtagcgcatgtgttccgccctgtatggtcatcgaatctccggtccctcagagtccatcactccttagtgacccaagtgccaaatatcagcgtcagagactctgggccatcacgaatcttattatggctcgcagagaagattttctacgagcgtgccactttcgtataccctcaaagttttgagctagacatgaatccacgtctcagttccttgacactaacccaagtccctgcacgatctacaggccccgtcattgagcgactatgctcattcattgcctctgcatctgcgcaacagaaagcaattgacatgaccaaagaaaaactgaatgaacgagatagacattctgcagtacttaccgggctgcgacatctctacctcgaaatagagccagatatcgaggccactggaggctcttttgctgatggcgaatttgattacagaaaattgaagttatcgagctttgaaagtaaagaacttccgaatgacttattcaattcgtcgtcagaatacgttgtccatactcaagattcatcagaatcactgatgggcgacgcgggacatcaaatttctgtatggatcgggtctggaactaggggagcatatccagctgtaaatgagtacatgcggaagctcaatgatcctcaacttcgaaaaggcgtcggccctgtgacaccaagccatgttcttgccggagttccaccgatgtcttacatctttcacgatgcgtgggactcaatgttgatacccgatgatctggttgcaacagcaaggcgcaaggttacgcagactacggacgtgactccgctcacagatgtcgctgctgctatcaagaaatatcggcttcaaaccaaggggacgccagaacactgggatggaaggatcgaacttgtgagggctgatgtggcattgcagtatcaggcttcggaatactggcggtga

SEQ ID NO: 28012 - protein, 346 aa, Muscodor strobelii
  misc_feature: SGI Peptide ID NO. 569606
  misc_feature (4)..(346): NCBI GI: 261357248 Blast Desc: conserved [Verticillium albo-atrum VaMs.102]
  misc_feature (2)..(167): NCBI GI: 171690048 Blast Desc: protein product [Podospora anserina] gi|170944979|emb|CAP71090.1| protein product [Podospora anserina]
  misc_feature (1)..(166): NCBI GI: 116200161 Blast Desc: CHGG_08236 [Chaetomium globosum CBS 148.51] gi|88179515|gb|EAQ86983.1| CHGG_08236 [Chaetomium globosum CBS 148.51]
  misc_feature (1)..(163): NCBI GI: 145606330 Blast Desc: MGG_02387 [Magnaporthe grisea 70-15] gi|145014023|gb|EDJ98664.1| MGG_02387 [Magnaporthe grisea 70-15]
  misc_feature (1)..(175): NCBI GI: 256730761 Blast Desc: NECHADRAFT_30392 [Nectria haematococca mpVI 77-13-4]
  misc_feature (4)..(233): NCBI GI: 46109390 Blast Desc: FG01577.1 [Gibberella zeae PH-1]
  misc_feature (30)..(193): NCBI GI: 85075596 Blast Desc: NCU03551 [Neurospora crassa OR74A] gi|18376048|emb|CAD21054.1| [Neurospora crassa] gi|28916802|gb|EAA26554.1| [Neurospora crassa OR74A]
  misc_feature (222)..(346): NCBI GI: 145606330 Blast Desc: MGG_02387 [Magnaporthe grisea 70-15] gi|145014023|gb|EDJ98664.1| MGG_02387 [Magnaporthe grisea 70-15]
  misc_feature (236)..(333): NCBI GI: 171690048 Blast Desc: protein product [Podospora anserina] gi|170944979|emb|CAP71090.1| protein product [Podospora anserina]
MSYGRLEHFDCDACQILPKEGPAPHMRVDGLLGVAHVFRPVWSSNLRSLRVHHSLVTQVPNISVRDSGPSRILLWLAEKIFYERATFVYPQSFELDMNPRLSSLTLTQVPARSTGPVIERLCSFIASASAQQKAIDMTKEKLNERDRHSAVLTGLRHLYLEIEPDIEATGGSFADGEFDYRKLKLSSFESKELPNDLFNSSSEYVVHTQDSSESLMGDAGHQISVWIGSGTRGAYPAVNEYMRKLNDPQLRKGVGPVTPSHVLAGVPPMSYIFHDAWDSMLIPDDLVATARRKVTQTTDVTPLTDVAAAIKKYRLQTKGTPEHWDGRIELVRADVALQYQASEYWR

SEQ ID NO: 28013 - DNA, 1793 bp, Muscodor strobelii
  misc_feature: SGI EST ID NO. CUFF.66009.0
  misc_feature: Variant of the nucleotide sequence at SEQ ID NO 28011
cacgaacatgcaattgtcattctttctgacagggtctgcacatagctacttgacgatgttacgcccgaactcatcccacagaaataatggatgatcttccatcttacagtgaggccacaactcgcccagattggctgtcatttgttgcgcccgttgtcccaccatcagattgggcaagatgctgtctcgttgatcatcggttttatcatcatttcgcctgtcgcctatggcatgatcccttggtcactatcagaaagcttgggcttcatcctaatgatgacctcgcctggtatcaccgcttcacgtctaaattgtctagctgtgtacagcccaatacccgatgtatgattagatgcttggactttcgtaatttcgcgcagaatgcctctggtctgtattcgactgaggcgagcgaacgtgccatctctgaaagttttaaatatctgccacaacttttcccgaagttgacatgcttccttctaggtgggcatccagagcttgatcctaactcactatttgcgacagcactctcgaatacaatatcagctggtacaaagggaattgaattattagatttgagctattgccaccaagaactcagatccaggctgttttctcctgcattctttcgtgatttggtttatctcgatgtctcgtacatccccgggtcgctcaaaaacgccatttcgcagtcgttgaatcccagcagtctaccacagctccgagtattgaaagctcgaggtcgcgagatggatgatgtcactgctctgcagttattcgaagcatttcggctgcaactgtgcagtcttgatcttggtgataataagcttaccgacgaatgtattgtaccgctcttgaggtattgcttttctccgcaaaatttgccggccgaagcgcacttcgaatctgaaggaaagctcatgcttcaagcaagtgtcggtactcgcaaatacggtatttttgggttcatcgaagagtcagtgaccagcgctcacttctgtcatcctgaaagatatctggcagacgcgcctttctattccgagagaccccaaacagagctacaagaaggacacactgttcgacccgatgggtcctctcccctccaacgagacgatgctagcacggcaaaagcactccttactaatatacaggcgggagtatatgcatcaagtggaggacccactaacgtattccgaacaccacgggcaggtctcacacatctttatctcagtgggaatgcatttacaactgctcagatcgacaagttggtaaggatgtcatacggtaggctggagcactttgactgtgatgcttgtcagatccttcccaaagaagggcctgcacctcatatgcgtgttgatgggttattgggagtagcgcatgtgttccgccctgtatggtcatcgaatctccggtccctcagagtccatcactccttagtgacccaagtgccaaatatcagcgtcagagactctgggccatcacgaatcttattatggctcgcagagaagattttctacgagcgtgccactttcgtataccctcaaagttttgagctagacatgaatccacgtctcagttccttgacactaacccaagtccctgcacgatctacaggccccgtcattgagcgactatgctcattcattgcctctgcatctgcgcaacagaaagcaattgacatgaccaaagaaaaactgaatgaacgagatagacattctgcagtacttaccgggctgcgacatctctacctcgaaatagagccagatatcgaggccactggaggctctttt

SEQ ID NO: 28014 - DNA, 1077 bp, Muscodor strobelii
  misc_feature: SGI cDNA ID NO. 569607
  misc_feature: Encodes the peptide sequence at SEQ ID NO 28015
atggccaacccgaacgaagtccagtcgacggatgcgtcgaacctcatctctgtccttagaatattaggtttcgtcggtctttgcacgcaatgggtcgttatgttattcaacggcactctcgccggattatctctgataacgggctccggactcttgccatccggcactcctctcaagcaggtgtggactggtatctggcccgtcgactacgtccttagcctcttggtaatcttcatcgttgaactcactaaagtgcctcaactgaaagatcttggttcgtacatattattgactgacctgatcttcatcatccacgtcgtcaatacggtcgtcattacggaagggctcagatccaagacgtcccttctcagacacactgcattatggcaggtttcttggagttacttcggcgcggcctcgacgattccttggtggtcgagcttctatgtcaaacaccgtcgtgacatcctgatccccgccgaccaggcgcaggtcctaccttttgcagctcttatcaacttcctcccactgctttccatcatcttacctcctgttcttggatggtatccatcctacacccaagccgccgtgttgttttggttcttctttcccctcatggcgtcgcctgtcgtctctttcgtcgcctccttcctgtcccataactccattaccctagccaagaaccccgtcaaagctgcatacactatttcaggggttgcaagtggtctggttcacgtcggcgtcgtctactgggttctcaccacggataacttgtcgctcgccagagtctacatcccccgcttcgccgatgttcaacctggcgagttcctcctaaccgaaggagccctggttttcatcaagttcggcctcatgttcatctttttcgctattcagattgttgggttctccgaattctcaacccgcggccccaagaacgggttgcagccgaccaacaaccctttggccttgctggccatgtccctggtcacggggcctggagccgcacttgcgtacctccagtctcaaagggacgatgagattatcgccgtcagctcggagtctatgaagcggaaatga

SEQ ID NO: 28015 - protein, 358 aa, Muscodor strobelii
  misc_feature: SGI Peptide ID NO. 569607
  misc_feature (31)..(355): NCBI GI: 242783833 Blast Desc: conserved [Talaromyces stipitatus ATCC 10500] gi|218720412|gb|EED19831.1| conserved [Talaromyces stipitatus ATCC 10500]
  misc_feature (31)..(293): NCBI GI: 242793235 Blast Desc: conserved [Talaromyces stipitatus ATCC 10500] gi|218718709|gb|EED18129.1| conserved [Talaromyces stipitatus ATCC 10500]
  misc_feature (46)..(356): NCBI GI: 169612639 Blast Desc: SNOG_09444 [Phaeosphaeria nodorum SN15] gi|160702554|gb|EAT83636.2| SNOG_09444 [Phaeosphaeria nodorum SN15]
  misc_feature (19)..(347): NCBI GI: 269996428 Blast Desc: [Alternaria brassicicola]
  misc_feature (33)..(347): NCBI GI: 240110611 Blast Desc: CPC735_040330 [Coccidioides posadasii C735 delta SOWgp]
  misc_feature (34)..(153): NCBI GI: 255953391 Blast Desc: [Penicillium chrysogenum Wisconsin 54-1255] gi|211589159|emb|CAP95297.1| [Penicillium chrysogenum Wisconsin 54-1255]
  misc_feature (33)..(347): NCBI GI: 119196049 Blast Desc: [Coccidioides immitis RS]
  misc_feature (21)..(353): NCBI GI: 212545619 Blast Desc: conserved [Penicillium marneffei ATCC 18224] gi|210064483|gb|EEA18578.1| conserved [Penicillium marneffei ATCC 18224]
  misc_feature (11)..(266): NCBI GI: 189189178 Blast Desc: PTRG_00595 [Pyrenophora tritici-repentis Pt-1C-BFP] gi|187972534|gb|EDU40033.1| PTRG_00595 [Pyrenophora tritici-repentis Pt-1C-BFP]
  misc_feature (31)..(255): NCBI GI: 255953387 Blast Desc: Pc21g03980 [Penicillium chrysogenum Wisconsin 54-1255] gi|211589157|emb|CAP95295.1| Pc21g03980 [Penicillium chrysogenum Wisconsin 54-1255]
MANPNEVQSTDASNLISVLRILGFVGLCTQWVVMLFNGTLAGLSLITGSGLLPSGTPLKQVWTGIWPVDYVLSLLVIFIVELTKVPQLKDLGSYILLTDLIFIIHVVNTVVITEGLRSKTSLLRHTALWQVSWSYFGAASTIPWWSSFYVKHRRDILIPADQAQVLPFAALINFLPLLSIILPPVLGWYPSYTQAAVLFWFFFPLMASPVVSFVASFLSHNSITLAKNPVKAAYTISGVASGLVHVGVVYWVLTTDNLSLARVYIPRFADVQPGEFLLTEGALVFIKFGLMFIFFAIQIVGFSEFSTRGPKNGLQPTNNPLALLAMSLVTGPGAALAYLQSQRDDEIIAVSSESMKRK

SEQ ID NO: 28016 - DNA, 2887 bp, Muscodor strobelii
  misc_feature: SGI EST ID NO. CUFF.66012.1
  misc_feature: Variant of the nucleotide sequence at SEQ ID NO 28014
atcagaatcactgatgggcgacgcgggacatcaaatttctgtatggatcgggtctggaactaggggagcatatccagctgtaaatgagtacatgcggaagctcaatgatcctcaacttcgaaaaggcgtcggccctgtgacaccaagccatgttcttgccggagttccaccgatgtcttacatctttcacgatgcgtgggactcaatgttgatacccgatgatctggttgcaacagcaaggcgcaaggttacgcagactacggacgtgactccgctcacagatgtcgctgctgctatcaagaaatatcggcttcaaaccaaggggacgccagaacactgggatggaaggatcgaacttgtgagggctgatgtggcattgcagtatcaggcttcggaatactggcggtgaaatccgcactgtgaataaatgaataataccacgagaatgacctattaagcggaaataataccctgttggattcttcgtgctaatgccttcaattgcatatctcgaccagcgtagctgatcgtaacaaacagacacggcacggggatgaagaagcgccagagtaacaactggaccgcgtctaaattctgctaggatagttgatacgcgggtctcgacgcgtgcactgtccctttgacgcttctagcctaaggggacgcggcagtggggttgaacatggttacgtgagtcaccgccaccctagatgaaaggtcggaaactggggatatcaagagtaagtcatgacaccaattgaattatctgggttggaaaaaattttttgggaggcattgtctacattacagcaaagcagggataagtaacgaactgtggcgagcctctgccatcattgatgccagaattaatttatccgtcattagatcttgcgactacaatcctttactgcaagaataaagcatcatcaaacttagtcagtgctttgatatctataagatgtcgctaatagtcgataaagtaaagaactttcgcagcaccgattctctatttgtcggtacacccgatttgtcaatcattgtggtgctagactgtgacgcacttctcaacgcacgagatccgctctcctgtcgttcttgaaagtgtcaaagtctgccggggatagactgacaggctgcaaggattactccagaccgccaagaaatgttgtgagagacgacgattgtttggaatccagtcttcccaatgcgggcaagcaatttttcatattgagacgttacgcataatacgcgtaaagttatcaaatgtagaattcaaatctatataagcggcggcctgctcctttcctttgatcagtcttagaagagagaacacaattcgcccttccacctcgtaataagtcccggtatagtcgacttatacctgttgtcttcgcttagcctgtgctctacgcggcggagatctccttaaaggctgttttctgacttcatccaagctcagcataagccactaacaagaatcgtgtgggcaagatggccaacccgaacgaagtccagtcgacggatgcgtcgaacctcatctctgtccttagaatattaggtttcgtcggtctttgcacgcaatgggtcgttatgttattcaacggcactctcgccggattatctctgataacgggctccggactcttgccatccggcactcctctcaagcaggtgtggactggtatctggcccgtcgactacgtccttagcctcttggtaatcttcatcgttgaactcactaaagtgcctcaactgaaagatcttggttcgtacatattattgactgacctgatcttcatcatccacgtcgtcaatacggtcgtcattacggaagggctcagatccaagacgtcccttctcagacacactgcattatggcaggtttcttggagttacttcggcgcggcctcgacgattccttggtggtcgagcttctatgtcaaacaccgtcgtgacatcctgatccccgccgaccaggcgcaggtcctaccttttgcagctcttatcaacttcctcccactgctttccatcatcttacctcctgttcttggatggtatccatcctacacccaagccgccgtgttgttttggttcttctttcccctcatggcgtcgcctgtcgtctctttcgtcgcctccttcctgtcccataactccattaccctagccaagaaccccgtcaaagctgcatacactatttcaggggttgcaagtggtctggttcacgtcggcgtcgtctactgggttctcaccacggataacttgtcgctcgccagagtctacatcccccgcttcgccgatgttcaacctggcgagttcctcctaaccgaaggagccctggttttcatcaagttcggcctcatgttcatctttttcgctattcagattgttgggttctccgaattctcaacccgcggccccaagaacgggttgcagccgaccaacaaccctttggccttgctggccatgtccctggtcacggggcctggagccgcacttgcgtacctccagtctcaaagggacgatgagattatcgccgtcagctcggagtctatgaagcggaaatgaattcgaccgttttctaatattttttactccggtttctcgctgagactactgcgtcaggctgcaatgcaaatgaaaatgcggcttggaagttggagtagataagcctcaaagaagccctaattaaggggttatcgcaataggcgctactagaattctaccataggaactagaatcaatcactataattttcaaaggacagatggtataggtctgtttagaagtggggctttttttcttttggataggtaaataataccctagctatgcttactgaagaccatgtcaggccggacctgggtgcacgatgtctttatctttc

SEQ ID NO: 28017 - DNA, 1230 bp, Muscodor strobelii
  misc_feature: SGI cDNA ID NO. 569608
  misc_feature: Encodes the peptide sequence at SEQ ID NO 28018
atggctaagcacaagaaaacttcctcgaaacacaaatctaagaatcagccacggcatcactcgcgacaccggcaacatgagaactcagatgctgatgaacacagcaatgcgaggctaggagctcaggtcggcggcaaatcatctaaaagccactcaaaacttcggaagactcgaaaagagaaacaaagacacaatgaacctgcttcagaagaccaggctcctcagcacgatctagataatactaaaaagcaaagacgggagagtcggaagattagagatgttctacgaaaccacaaacggagtagttttgagtatccccagcctgaagatcccgattattgtcatccggatcagtataattcagagaatcttgagtctcagtttaccaacccagaagagccagaggtgttgccagaaatgtcagagctaaatgttacagatccatcgcgccctttagacccatcagatgagcgaccagcgttgcgcacgatctctgtcagtgatttgtggacagtcgctcgcgacaagcgaagtgagtgtaccaactcatttgaagcgattcagaaggacatggcgttcacgggccagtacctcaatcgaccccatcgtcattcagacccaaacaatatacagaacttcactcggccctattggaatgaacccggcggcttcattcctggcgtattatcttctgttccttttgactataagcctaaatttgaggcgatcttggacgggattgaacatcaagaattcgtgcgaaagaagattgaccccgaagtcgaatcatcgaagacccgagcaaggaccaccgaggaatgggtgatggaagaagactcgtcaaatgttggcccgcaggaccacgcccggagacacaggcaagccacgaggcaggcatatgacatcacgagacaggatcccggtcaaactgaagactggcagactcccttctcctctgaccgtgactctgatatataccctgatgcccctgctaggaacgccagggagaagaagagagagcgcaacggagttcgacgccacgacggaggagagcaatatcgggatcgaagaaaccgcgaacaatggtatcaggggcaagagcgagactttttagataggaataaggcgagggcaccgtacgaagcatggaagccggctttgagaaagaagaaagataggaaaaataggaaagggaaagataaagacatcgtgcacccaggtccggcctga

SEQ ID NO: 28018 - protein, 409 aa, Muscodor strobelii
  misc_feature: SGI Peptide ID NO. 569608
MAKHKKTSSKHKSKNQPRHHSRHRQHENSDADEHSNARLGAQVGGKSSKSHSKLRKTRKEKQRHNEPASEDQAPQHDLDNTKKQRRESRKIRDVLRNHKRSSFEYPQPEDPDYCHPDQYNSENLESQFTNPEEPEVLPEMSELNVTDPSRPLDPSDERPALRTISVSDLWTVARDKRSECTNSFEAIQKDMAFTGQYLNRPHRHSDPNNIQNFTRPYWNEPGGFIPGVLSSVPFDYKPKFEAILDGIEHQEFVRKKIDPEVESSKTRARTTEEWVMEEDSSNVGPQDHARRHRQATRQAYDITRQDPGQTEDWQTPFSSDRDSDIYPDAPARNAREKKRERNGVRRHDGGEQYRDRRNREQWYQGQERDFLDRNKARAPYEAWKPALRKKKDRKNRKGKDKDIVHPGPA

SEQ ID NO: 28019 - DNA, 227 bp, Muscodor strobelii
  misc_feature: SGI EST ID NO. CUFF.66015.0
  misc_feature: Variant of the nucleotide sequence at SEQ ID NO 28017
cgaggaatgggtgatggaagaagactcgtcaaatgttggcccgcaggaccacgcccggagacacaggcaagccacgaggcaggcatatgacatcacgagacaggatcccggtcaaactgaagactggcagactcccttctcctctgaccgtgactctgatatataccctgatgcccctgctaggaacgccagggagaagaagagagagcgcaacggagttcgacgcc

SEQ ID NO: 28020 - DNA, 531 bp, Muscodor strobelii
  misc_feature: SGI cDNA ID NO. 569609
  misc_feature: Encodes the peptide sequence at SEQ ID NO 28021
atggtcatggtccggcggttcttacaacgtgaagtcctacgacatgatattaacttctttatagcgaacgccgtataccagggaggtgcaaaaaagctatccgctatctcaactatgcccacgacttggaagtacacctatacgggaagcagtttggttgccaacgtggcttatgatctgttcacttcgtcgacaacctctggttcgtcggagtatgagataatggtctggctcgctgcgctgggcggtgctggccctatctcgtcgacgggcagcccgattgcgaccccctctatcaacggagtctcgtggaagttgtactatggactgaacggttcgatgaaggtctacagtttcgtagcctcatcccaagttaccagcttcagcggcgatttgaaactcttcctcagctacctctcttctaaccagggtctgtcgacaagtcaatatctaacaagtttgggtgctggcacagaaccatttactggctcgaatgcggttcttacttcgacctactccgcgtcctactag

SEQ ID NO: 28021 - protein, 176 aa, Muscodor strobelii
  misc_feature: SGI Peptide ID NO. 569609
  misc_feature (28)..(175): Pfam Id: PF01670 Pfam Desc: Glycosyl hydrolase family 12
  misc_feature (28)..(163): Pfam Id: PF01670 Pfam Desc: Glycosyl hydrolase family 12
  misc_feature (22)..(175): NCBI GI: 154322503 Blast Desc: BC1G_00594 [Botryotinia fuckeliana B05.10] gi|150847928|gb|EDN23121.1| BC1G_00594 [Botryotinia fuckeliana B05.10]
  misc_feature (11)..(173): NCBI GI: 212530620 Blast Desc: endoglucanase, [Penicillium marneffei ATCC 18224] gi|210074865|gb|EEA28952.1| endoglucanase, [Penicillium marneffei ATCC 18224]
  misc_feature (22)..(171): NCBI GI: 189208482 Blast Desc: endoglucanase A precursor [Pyrenophora tritici-repentis Pt-1C-BFP] gi|187976667|gb|EDU43293.1| endoglucanase A precursor [Pyrenophora tritici-repentis
  misc_feature (22)..(169): NCBI GI: 21842091 Blast Desc: AF434181_1 endoglucanase [Emericella desertorum]
  misc_feature (22)..(169): NCBI GI: 67516341 Blast Desc: AN0452.2 [Aspergillus nidulans FGSC A4] gi|40747395|gb|EAA66551.1| AN0452.2 [Aspergillus nidulans FGSC A4] gi|95025682|gb|ABF50842.1| xyloglucan-specific endoglucanase
  misc_feature (22)..(174): NCBI GI: 226501556 Blast Desc: LOC100275182 [Zea mays] gi|195610100|gb|ACG26880.1| [Zea mays]
  misc_feature (22)..(173): NCBI GI: 121702845 Blast Desc: endoglucanase, [Aspergillus clavatus NRRL 1] gi|119397830|gb|EAW08261.1| endoglucanase, [Aspergillus clavatus NRRL 1]
  misc_feature (32)..(175): NCBI GI: 4105147 Blast Desc: xyloglucan-specific endo-beta-1,4-glucanase precursor [Aspergillus aculeatus]
  misc_feature (22)..(175): NCBI GI: 37724719 Blast Desc: xyloglucanase 2 [Aspergillus aculeatus]
  misc_feature (22)..(175): NCBI GI: 94692207 Blast Desc: xyloglucan-specific endo-beta-1,4-glucanase precursor [Aspergillus niger]
  misc_feature (31)..(175): SWISSPROT Homolog: EC 3.2.1.4 Cellulase
MVMVRRFLQREVLRHDINFFIANAVYQGGAKKLSAISTMPTTWKYTYTGSSLVANVAYDLFTSSTTSGSSEYEIMVWLAALGGAGPISSTGSPIATPSINGVSWKLYYGLNGSMKVYSFVASSQVTSFSGDLKLFLSYLSSNQGLSTSQYLTSLGAGTEPFTGSNAVLTSTYSASY

SEQ ID NO: 28022 - DNA, 314 bp, Muscodor strobelii
  misc_feature: SGI EST ID NO. CUFF.66025.0
  misc_feature: Variant of the nucleotide sequence at SEQ ID NO 28020
aaaaagctatccgctatctcaactatgcccacgacttggaagtacacctatacgggaagcagtttggttgccaacgtggcttatgatctgttcacttcgtcgacaacctctggttcgtcggagtatgagataatggtctggctcgctgcgctgggcggtgctggccctatctcgtcgacgggcagcccgattgcgaccccctctatcaacggagtctcgtggaagttgtactatggactgaacggttcgatgaaggtctacagtttcgtagcctcatcccaagttaccagcttcagcggcgatttgaaactctt

SEQ ID NO: 28023 - DNA, 933 bp, Muscodor strobelii
  misc_feature: SGI cDNA ID NO. 569610
  misc_feature: Encodes the peptide sequence at SEQ ID NO 28024
atgtcggacgctgcgaagcaacgaatcactgcgatagggaaacagctctcccccggtgagagcggagagggactcccggccattaagaagatcgccggcccatccaacggaccacgagctcagggcaaagttgtcatcatcacgggcacgaactccgtcctaggaataggtcgagctactgcgcacgcgttcgctgagagtggtgctaaagccgtctacctctgcgactacgacgatacgaatctcgaagctcacaagcgcgaaataacatcgctctaccccagcgtcgacgttcacgtgcgtcaattcgatgccgccgacgaggccgcagtcaaggctgtagtcgaccacgccgtgcagacctacaagagactggatgtgtttttcgcgaatgccggtattgttgggccgcatgccatgttcaacgacatcgataaggaagacttcatgaaagtcatggagacgaatactgcgagtgttttcctcgctgcgaagtatgccgcacccgcaatgatggagacatccgcagagaagacggcttcctcgggtagcattatcggaacagcttcagttgccgggctacggtccaacgctgggtctacgccctattctgcttccaaagctgctgttgtttcattggcgcagtcaataagctaccagctctccgggactggtatccgggtcaatgctatttgccctggcttaatcgaaactggaatgacggctccaacgtttgactctgcacgtgctcggggcacggaaaagaagcttggccaactgaatcctttgaagagagcggctatagccgatgaggtagcccgtgtcgcactatttctgggaaccgatgaagcttcctacgtaaatggtcaagcatggtcagtttgcggcggattgtccgctggtcatccatatgtccttggaaagatggcataa

SEQ ID NO: 28024 - protein, 310 aa, Muscodor strobelii
  misc_feature: SGI Peptide ID NO. 569610
  misc_feature (43)..(222): Pfam Id: PF00106 Pfam Desc: short chain dehydrogenase
  misc_feature (45)..(295): Pfam Id: PF01370 Pfam Desc: NAD dependent epimerase/dehydratase family
  misc_feature (44)..(239): Pfam Id: PF08659 Pfam Desc: KR domain
  misc_feature (1)..(309): NCBI GI: 116199787 Blast Desc: CHGG_08049 [Chaetomium globosum CBS 148.51] gi|88179328|gb|EAQ86796.1| CHGG_08049 [Chaetomium globosum CBS 148.51]
  misc_feature (1)..(309): NCBI GI: 46109174 Blast Desc: FG01469.1 [Gibberella zeae PH-1]
  misc_feature (1)..(310): NCBI GI: 85076209 Blast Desc: NCU03332 [Neurospora crassa OR74A] gi|28881170|emb|CAD70352.1| related to levodione reductase [Neurospora crassa] gi|28916924|gb|EAA26660.1| NCU03332 crassa
  misc_feature (1)..(309): NCBI GI: 156046801 Blast Desc: SS1G_09484 [Sclerotinia sclerotiorum 1980] gi|154693879|gb|EDN93617.1| SS1G_09484 [Sclerotinia sclerotiorum 1980]
  misc_feature (1)..(309): NCBI GI: 256730604 Blast Desc: [Nectria haematococca mpVI 77-13-4]
  misc_feature (1)..(310): NCBI GI: 255956799 Blast Desc: Pc21g21810 [Penicillium chrysogenum Wisconsin 54-1255] gi|211590863|emb|CAP97078.1| Pc21g21810 [Penicillium chrysogenum Wisconsin 54-1255]
  misc_feature (1)..(310): NCBI GI: 121699908 Blast Desc: 3-oxoacyl-(acyl-carrier-protein) reductase [Aspergillus clavatus NRRL 1] gi|119396361|gb|EAW06793.1| 3-oxoacyl-(acyl-carrier-protein) reductase [Aspergillus clavatus
  misc_feature (1)..(309): NCBI GI: 171688964 Blast Desc: protein product [Podospora anserina] gi|170944444|emb|CAP70555.1| protein product [Podospora anserina]
  misc_feature (1)..(310): NCBI GI: 145240445 Blast Desc: An08g07520 [Aspergillus niger] gi|134077387|emb|CAK40001.1| protein product [Aspergillus niger]
  misc_feature (1)..(310): NCBI GI: 239613996 Blast Desc: 3-oxoacyl-(acyl-carrier-protein) reductase [Ajellomyces dermatitidis ER-3]
  misc_feature (39)..(298): SWISSPROT Homolog: EC 1.1.1.100 3-oxoacyl-[acyl-carrier-protein] reductase
MSDAAKQRITAIGKQLSPGESGEGLPAIKKIAGPSNGPRAQGKVVIITGTNSVLGIGRATAHAFAESGAKAVYLCDYDDTNLEAHKREITSLYPSVDVHVRQFDAADEAAVKAVVDHAVQTYKRLDVFFANAGIVGPHAMFNDIDKEDFMKVMETNTASVFLAAKYAAPAMMETSAEKTASSGSIIGTASVAGLRSNAGSTPYSASKAAVVSLAQSISYQLSGTGIRVNAICPGLIETGMTAPTFDSARARGTEKKLGQLNPLKRAAIADEVARVALFLGTDEASYVNGQAWSVCGGLSAGHPYVLGKMA

SEQ ID NO: 28025 - DNA, 2133 bp, Muscodor strobelii
  misc_feature: SGI EST ID NO. CUFF.66037.0
  misc_feature: Variant of the nucleotide sequence at SEQ ID NO 28023
gcctcggttcgtctggggaagcagctctccacctgccaaatgcacgtaggtcgcatagaagctgagatcaattgaagatgagttagccgacaatacaacataacactgctctgcgaggatcttccagagtaacagtgtctcgaggcaaacgatcagagagccaattcaggtcaagatgtcggacgctgcgaagcaacgaatcactgcgatagggaaacagctctcccccggtgagagcggagagggactcccggccattaagaagatcgccggcccatccaacggaccacgagctcagggcaaagttgtcatcatcacgggcacgaactccgtcctaggaataggtcgagctactgcgcacgcgttcgctgagagtggtgctaaagccgtctacctctgcgactacgacgatacgaatctcgaagctcacaagcgcgaaataacatcgctctaccccagcgtcgacgttcacgtgcgtcaattcgatgccgccgacgaggccgcagtcaaggctgtagtcgaccacgccgtgcagacctacaagagactggatgtgtttttcgcgaatgccggtattgttgggccgcatgccatgttcaacgacatcgataaggaagacttcatgaaagtcatggagacgaatactgcgagtgttttcctcgctgcgaagtatgccgcacccgcaatgatggagacatccgcagagaagacggcttcctcgggtagcattatcggaacagcttcagttgccgggctacggtccaacgctgggtctacgccctattctgcttccaaagctgctgttgtttcattggcgcagtcaataagctaccagctctccgggactggtatccgggtcaatgctatttgccctggcttaatcgaaactggaatgacggctccaacgtttgactctgcacgtgctcggggcacggaaaagaagcttggccaactgaatcctttgaagagagcggctatagccgatgaggtagcccgtgtcgcactatttctgggaaccgatgaagcttcctacgtaaatggtcaagcatggtcagtttgcggcggattgtccgctggtcatccatatgtccttggaaagatggcataaacatgtagtcacaactgtacaaatcgaattcggataaatcgagacagcatagaacatggcaatcgttaatgttagctttccacatactatcgacaagactatggcgcgatcacgaggagatcgcattcgcagatggtggcagatgttcgagcgggcgtactaattatgatactaatgtgtacaacgagtcctaacgtatatgctgcgttaagagatgtgaccaatgacagcgtctggcgcaaataaatcataagcaaataccgatgcttcatgattcgttgccgacattaattcccgattccccggatctcccccatagcctttatcaggcacaacatttagggatccctcaatacatctgcaattcggtcatggccatgtcgtttcctaggtaccaagttcaggagtcatttctattgccgacgttaaacttgtacttacgaattttaaatgagcacgaacagcagtggaattcctgttatgcttcgatcagtcctgtttgttatgcgatatagacatacagagacacccgcggatgcctccaacttgaatagcctcaatcaatcgaattttgaaatggcaaacatttgccggcttttaccatcaattccccataacgcccagactttattgacgagggcgacgcagaccacaactttctaggtcgcttatccgtattagccgcgacgcaggaacgcgcaagcaacaatattagtcaacatgcggcgacttgtggatacgttacagataatcgagaagtgagcaagaggcgaggctgcagttaaaaggaaggcggtagtgtcgcaatgcccagactatgtccaggttttcgattctgagttgtcggggatttagcttgtggtcttggttatacccgcagtgaaaatggtcagtgcgatttgcttgacggcctatctggctgtcactttcttcactggactcgttgtctctcatcctggagagtctaatacgaagctcaagcgggaacgagatgcccatagggcgtctctgcccgttgctcgccg

SEQ ID NO: 28026 - DNA, 1209 bp, Muscodor strobelii
  misc_feature: SGI cDNA ID NO. 569611
  misc_feature: Encodes the peptide sequence at SEQ ID NO 28027
atggtcagtgcgatttgcttgacggcctatctggctgtcactttcttcactggactcgttgtctctcatcctggagagtctaatacgaagctcaagcgggaacgagatgcccatagggcgtctctgcccgttgctcgccgtgccatcaatagctgtgcggcagctcccggaactgcggctctcaaggcacgatccgtaactcgccgcgcagctaccgccgagaagcttcgacaaaagcgcgggatcgctagtcacagtatcaaatccaagcgcgaccagccgggcttcaacaagtgggcaggtgtcgaccatgatgtctctagtcttgactttggactcggtacacctctcgggaccatctttgactcaaattccacttgtgcccttgtgcccgaaagtgatattgggccctattttgttggtggtgaactcataaggagcgatgtcacagataacgaacccggcgtgcctttacatcttgaccttcagtttatcgacatcaagacttgtgagcctattccagcaggcgttcttgtagacatttgggcctgcaatagtactggtgtctactccggaattgagggtttcggtccccaacatgagggcggactgaactcaacgtatctgcgcggggttcagccgacagacaaagatggcacggtccagttcgatacgattttcccaggtcactatcctggccgcgccacacatattcatttaatcactacgcacaatgccaccctcctcaagaacaagacctatgtaaccaacagcggcacgccatcgcacatcggacagctgttcttcgaccaggacttaatcaccgaagtggaagcgctggcaccttacaacaccaacaaggcccggatcactcccaataaggcggatttcatcgacgtcgctggagccacagtagattacgatcccttcgtcgattacgtacgtcttggcaattctctcgaggatggacttcttgcatttatcactgtattcgtcaatacagctgccaatgtgacctcctcgcgtagggtagctgcacagtactacgaaggaggtggtgtgactttgaaccctggatttaacttcactttgcctcctgggtttaactggactggcttcccgcctccacctggcttccccttccccggtggaccgccaccaccatttcgtggcaggctgagaagatggctgcagagacgaggagcgtga

SEQ ID NO: 28027 - protein, 402 aa, Muscodor strobelii
  misc_feature: SGI Peptide ID NO. 569611
  misc_feature (136)..(315): Pfam Id: PF00775 Pfam Desc: Dioxygenase
  misc_feature (7)..(356): NCBI GI: 256721882 Blast Desc: NECHADRAFT_92188 [Nectria haematococca mpVI 77-13-4]
  misc_feature (23)..(353): NCBI GI: 119473919 Blast Desc: GPI anchored dioxygenase, [Neosartorya fischeri NRRL 181] gi|119406988|gb|EAW16938.1| GPI anchored dioxygenase, [Neosartorya fischeri NRRL 181]
  misc_feature (23)..(353): NCBI GI: 70985996 Blast Desc: GPI anchored dioxygenase [Aspergillus fumigatus Af293] gi|66846130|gb|EAL86463.1| GPI anchored dioxygenase, [Aspergillus fumigatus Af293] gi|159128367|gb|EDP53482.1| GPI anchored A1163]
  misc_feature (11)..(352): NCBI GI: 46118107 Blast Desc: FG04685.1 [Gibberella zeae PH-1]
  misc_feature (2)..(353): NCBI GI: 156030764 Blast Desc: SS1G_14321 [Sclerotinia sclerotiorum 1980] gi|154700712|gb|EDO00451.1| SS1G_14321 [Sclerotinia sclerotiorum 1980]
  misc_feature (20)..(353): NCBI GI: 154299611 Blast Desc: BC1G_10768 [Botryotinia fuckeliana B05.10] gi|150857260|gb|EDN32452.1| BC1G_10768 [Botryotinia fuckeliana B05.10]
  misc_feature (23)..(353): NCBI GI: 115399340 Blast Desc: conserved [Aspergillus terreus NIH2624] gi|114192142|gb|EAU33842.1| conserved [Aspergillus terreus NIH2624]
  misc_feature (5)..(353): NCBI GI: 169766220 Blast Desc: [Aspergillus oryzae RIB40] gi|83765436|dbj|BAE55579.1| protein product [Aspergillus oryzae]
  misc_feature (5)..(353): NCBI GI: 238482919 Blast Desc: GPI anchored dioxygenase, [Aspergillus flavus NRRL3357] gi|220700748|gb|EED57086.1| GPI anchored dioxygenase, [Aspergillus flavus NRRL3357]
  misc_feature (23)..(353): NCBI GI: 67538316 Blast Desc: AN5328.2 [Aspergillus nidulans FGSC A4] gi|40743298|gb|EAA62488.1| AN5328.2 [Aspergillus nidulans FGSC A4] gi|259485231|tpe|CBF82093.1| TPA: GPI anchored dioxygenase,
MVSAICLTAYLAVTFFTGLVVSHPGESNTKLKRERDAHRASLPVARRAINSCAAAPGTAALKARSVTRRAATAEKLRQKRGIASHSIKSKRDQPGFNKWAGVDHDVSSLDFGLGTPLGTIFDSNSTCALVPESDIGPYFVGGELIRSDVTDNEPGVPLHLDLQFIDIKTCEPIPAGVLVDIWACNSTGVYSGIEGFGPQHEGGLNSTYLRGVQPTDKDGTVQFDTIFPGHYPGRATHIHLITTHNATLLKNKTYVTNSGTPSHIGQLFFDQDLITEVEALAPYNTNKARITPNKADFIDVAGATVDYDPFVDYVRLGNSLEDGLLAFITVFVNTAANVTSSRRVAAQYYEGGGVTLNPGFNFTLPPGFNWTGFPPPPGFPFPGGPPPPFRGRLRRWLQRRGA

SEQ ID NO: 28028 - DNA, 2287 bp, Muscodor strobelii
  misc_feature: SGI EST ID NO. CUFF.66085.0
  misc_feature: Variant of the nucleotide sequence at SEQ ID NO 28026
ccatgatgtctctagtcttgactttggactcggtacacctctcgggaccatctttgactcaaattccacttgtgcccttgtgcccgaaagtgatattgggccctattttgttggtggtgaactcataaggagcgatgtcacagataacgaacccggcgtgcctttacatcttgaccttcagtttatcgacatcaagacttgtgagcctattccagcaggcgttcttgtagacatttgggcctgcaatagtactggtgtctactccggaattgagggtttcggtccccaacatgagggcggactgaactcaacgtatctgcgcggggttcagccgacagacaaagatggcacggtccagttcgatacgattttcccaggtcactatcctggccgcgccacacatattcatttaatcactacgcacaatgccaccctcctcaagaacaagacctatgtaaccaacagcggcacgccatcgcacatcggacagctgttcttcgaccaggacttaatcaccgaagtggaagcgctggcaccttacaacaccaacaaggcccggatcactcccaataaggcggatttcatcgacgtcgctggagccacagtagattacgatcccttcgtcgattacgtacgtcttggcaattctctcgaggatggacttcttgcatttatcactgtattcgtcaatacagctgccaatgtgacctcctcgcgtagggtagctgcacagtactacgaaggaggtggtgtgactttgaaccctggatttaacttcactttgcctcctgggtttaactggactggcttcccgcctccacctggcttccccttccccggtggaccgccaccaccatttcgtggcaggctgagaagatggctgcagagacgaggagcgtgataatgtttagcaatggagtgtcagcgttagtgatacgttggaatgaaatcgttcaccgggtaacctaaatatttcagtttctatgagttaggtacaacaatttcagtacttggatatttgtatatggtagacactaggtagtcaaacattgagacatgattccctgcattgaccagtttcaagtagattgctcgtaagtctgctagcaaatgtctgaaatacgtgggagactatacaatcacacattctttaaactagcaatcatggtcacgttgttgatatttcccattgcgtggcggccgattcttaagttcgcattcgagtcgctgaggaaatacgtcacagtatttgcatgatttgaattaagcctgttgagatctatctctttgaggtcaagcatcccaatatccaatctcagttaccctgagcaatcacgagacctccttggtcaggtttgcatcctcgtgttcatggttagcagcgagtttctcgtccgcaaccaaatcagagttggcccgttcctcatcgacggcgtcagggttatttgtcagaccaacctcagtctccgagaacttatcggccggaacgcgataggcagctacgaagttgacacacacggggtaggacaaggcagcaagtgaagaataccaagggcactaccatcgcaaaagcagtcccgtgaatatccgcagcgacacccgtcaatggcgggacgaccgcaccgccagagacacctgcgacgataaatcctgagcctcgcttactatgtcggccgagaccacgcatgccaagggcaacgatggtagggaagatgatagactcgaagaacaagacaacgtagagtagtgacattcctgtccagccatgcgcagaaatggtcggaccgatgaatatgatacaaagtgtcaaaaagacaaggaacactttgcgtggtcggacgtagttcatcaagaacgaaccgaaaaatcgtccggctgcaaacccaccctgcgcaccagagaggaagcgagctgcacccgcatcagtggaaagaggctgagtatctcgtacgtagttgatgaagtaggaggcgattgcgacttgcgcgcccgtataacagaactgcgcagcagcggcgtgaaaaagccgatactgcttccagaacggcttgtcatcggcattggcgtgtgttacagaggcttggaatgccatatccgcatcggtgatctcggggatggtcgatagccagaagacgaaagcaagagcaagtacgaatattccgatcgcgacgtagacccattgaacattctgaagagcggcatcatcgttgaatctgaagaagacgtaagagcctaagacaggcgcaatcacagtgccaattccattgaaggcttgagagaggttgat

SEQ ID NO: 28029 - DNA, 1362 bp, Muscodor strobelii
  misc_feature: SGI cDNA ID NO. 569612
  misc_feature: Encodes the peptide sequence at SEQ ID NO 28030
atgggcgcaaaggctttcctcgagcggcggtcgctcaaggccaaggacgataggcgaaccaaggcatcggaactcacccttcgtcagtcaattctgccaatcgccttggtgacgatcctattcttcctctggggtttctcctacggtcttcttgacaccttgaataaaaaattccaaaatgctctcgacatcaccaaatcgcgttccgctggtctccagggtgcatactttggcgcatacccgctcgcttctctaggacatgccaactggattttgagacattacggttatagagctaccttcatctggggtctcgttctgtacggcattggtgcattcgttgcgattcctgctatcaaggcagagtcgttcggtggcttcgttggtgccattttcattatcggtaacggtcttggctctttagagacggcagcaaatccatacattaccgtctgtggccctcccaagtactccgagatccgtatcaacctctctcaagccttcaatggaattggcactgtgattgcgcctgtcttaggctcttacgtcttcttcagattcaacgatgatgccgctcttcagaatgttcaatgggtctacgtcgcgatcggaatattcgtacttgctcttgctttcgtcttctggctatcgaccatccccgagatcaccgatgcggatatggcattccaagcctctgtaacacacgccaatgccgatgacaagccgttctggaagcagtatcggctttttcacgccgctgctgcgcagttctgttatacgggcgcgcaagtcgcaatcgcctcctacttcatcaactacgtacgagatactcagcctctttccactgatgcgggtgcagctcgcttcctctctggtgcgcagggtgggtttgcagccggacgatttttcggttcgttcttgatgaactacgtccgaccacgcaaagtgttccttgtctttttgacactttgtatcatattcatcggtccgaccatttctgcgcatggctggacaggaatgtcactactctacgttgtcttgttcttcgagtctatcatcttccctaccatcgttgcccttggcatgcgtggtctcggccgacatagtaagcgaggctcaggatttatcgtcgcaggtgtctctggcggtgcggtcgtcccgccattgacgggtgtcgctgcggatattcacgggactgcttttgcgatggtagtgcccttgttctcggagactgaggttggtctgacaaataaccctgacgccgtcgatgaggaacgggccaactctgatttggttgcggacgagaaactcgctgctaaccatgaacacgaggatgcaaacctgaccaaggaggtctcgtga

SEQ ID NO: 28030 - protein, 453 aa, Muscodor strobelii
  misc_feature: SGI Peptide ID NO. 569612
  misc_feature (37)..(388): Pfam Id: PF07690 Pfam Desc: Major Facilitator Superfamily
  misc_feature (1)..(450): NCBI GI: 116206046 Blast Desc: CHGG_02316 [Chaetomium globosum CBS 148.51] gi|88182913|gb|EAQ90381.1| CHGG_02316 [Chaetomium globosum CBS 148.51]
  misc_feature (1)..(407): NCBI GI: 256730542 Blast Desc: [Nectria haematococca mpVI 77-13-4]
  misc_feature (1)..(407): NCBI GI: 46109422 Blast Desc: FG01593.1 [Gibberella zeae PH-1]
  misc_feature (1)..(437): NCBI GI: 261357178 Blast Desc: glucose/galactose transporter [Verticillium albo-atrum VaMs.102]
  misc_feature (1)..(444): NCBI GI: 85094424 Blast Desc: NCU05897 [Neurospora crassa OR74A] gi|28921344|gb|EAA30652.1| NCU05897 [Neurospora crassa OR74A]
  misc_feature (1)..(407): NCBI GI: 39957692 Blast Desc: MGG_09193 [Magnaporthe grisea 70-15] gi|145013373|gb|EDJ98014.1| MGG_09193 [Magnaporthe grisea 70-15]
  misc_feature (6)..(447): NCBI GI: 169618730 Blast Desc: SNOG_12557 [Phaeosphaeria nodorum SN15] gi|111058735|gb|EAT79855.1| SNOG_12557 [Phaeosphaeria nodorum SN15]
  misc_feature (1)..(406): NCBI GI: 115389142 Blast Desc: conserved [Aspergillus terreus NIH2624] gi|114194472|gb|EAU36172.1| conserved [Aspergillus terreus NIH2624]
  misc_feature (1)..(453): NCBI GI: 119467968 Blast Desc: l-fucose permease, [Neosartorya fischeri NRRL 181] gi|119405942|gb|EAW15893.1| l-fucose permease, [Neosartorya fischeri NRRL 181]
  misc_feature (1)..(406): NCBI GI: 169769639 Blast Desc: [Aspergillus oryzae RIB40] gi|83767148|dbj|BAE57287.1| protein product [Aspergillus oryzae]
MGAKAFLERRSLKAKDDRRTKASELTLRQSILPIALVTILFFLWGFSYGLLDTLNKKFQNALDITKSRSAGLQGAYFGAYPLASLGHANWILRHYGYRATFIWGLVLYGIGAFVAIPAIKAESFGGFVGAIFIIGNGLGSLETAANPYITVCGPPKYSEIRINLSQAFNGIGTVIAPVLGSYVFFRFNDDAALQNVQWVYVAIGIFVLALAFVFWLSTIPEITDADMAFQASVTHANADDKPFWKQYRLFHAAAAQFCYTGAQVAIASYFINYVRDTQPLSTDAGAARFLSGAQGGFAAGRFFGSFLMNYVRPRKVFLVFLTLCIIFIGPTISAHGWTGMSLLYVVLFFESIIFPTIVALGMRGLGRHSKRGSGFIVAGVSGGAVVPPLTGVAADIHGTAFAMVVPLFSETEVGLTNNPDAVDEERANSDLVADEKLAANHEHEDANLTKEVS

SEQ ID NO: 28031 - DNA, 2380 bp, Muscodor strobelii
  misc_feature: SGI EST ID NO. CUFF.66086.1
  misc_feature: Variant of the nucleotide sequence at SEQ ID NO 28029
tctggggtttctcctacggtcttcttgacaccttgaataaaaaattccaaaatgctctcgacatcaccaaatcgcgttccgctggtctccagggtgcatactttggcgcatacccgctcgcttctctaggacatgccaactggattttgagacattacggttatagagctaccttcatctggggtctcgttctgtacggcattggtgcattcgttgcgattcctgctatcaaggcagagtcgttcggtggcttcgttggtgccattttcattatcggtaacggtcttggctctttagagacggcagcaaatccatacattaccgtctgtggccctcccaagtactccgagatccgtatcaacctctctcaagccttcaatggaattggcactgtgattgcgcctgtcttaggctcttacgtcttcttcagattcaacgatgatgccgctcttcagaatgttcaatgggtctacgtcgcgatcggaatattcgtacttgctcttgctttcgtcttctggctatcgaccatccccgagatcaccgatgcggatatggcattccaagcctctgtaacacacgccaatgccgatgacaagccgttctggaagcagtatcggctttttcacgccgctgctgcgcagttctgttatacgggcgcgcaagtcgcaatcgcctcctacttcatcaactacgtacgagatactcagcctctttccactgatgcgggtgcagctcgcttcctctctggtgcgcagggtgggtttgcagccggacgatttttcggttcgttcttgatgaactacgtccgaccacgcaaagtgttccttgtctttttgacactttgtatcatattcatcggtccgaccatttctgcgcatggctggacaggaatgtcactactctacgttgtcttgttcttcgagtctatcatcttccctaccatcgttgcccttggcatgcgtggtctcggccgacatagtaagcgaggctcaggatttatcgtcgcaggtgtctctggcggtgcggtcgtcccgccattgacgggtgtcgctgcggatattcacgggactgcttttgcgatggtagtgcccttggtattcttcacttgctgccttgtcctaccccgtgtgtgtcaacttcgtagctgcctatcgcgttccggccgataagttctcggagactgaggttggtctgacaaataaccctgacgccgtcgatgaggaacgggccaactctgatttggttgcggacgagaaactcgctgctaaccatgaacacgaggatgcaaacctgaccaaggaggtctcgtgattgctcagggtaactgagattggatattgggatgcttgacctcaaagagatagatctcaacaggcttaattcaaatcatgcaaatactgtgacgtatttcctcagcgactcgaatgcgaacttaagaatcggccgccacgcaatgggaaatatcaacaacgtgaccatgattgctagtttaaagaatgtgtgattgtatagtctcccacgtatttcagacatttgctagcagacttacgagcaatctacttgaaactggtcaatgcagggaatcatgtctcaatgtttgactacctagtgtctaccatatacaaatatccaagtactgaaattgttgtacctaactcatagaaactgaaatatttaggttacccggtgaacgatttcattccaacgtatcactaacgctgacactccattgctaaacattatcacgctcctcgtctctgcagccatcttctcagcctgccacgaaatggtggtggcggtccaccggggaaggggaagccaggtggaggcgggaagccagtccagttaaacccaggaggcaaagtgaagttaaatccagggttcaaagtcacaccacctccttcgtagtactgtgcagctaccctacgcgaggaggtcacattggcagctgtattgacgaatacagtgataaatgcaagaagtccatcctcgagagaattgccaagacgtacgtaatcgacgaagggatcgtaatctactgtggctccagcgacgtcgatgaaatccgccttattgggagtgatccgggccttgttggtgttgtaaggtgccagcgcttccacttcggtgattaagtcctggtcgaagaacagctgtccgatgtgcgatggcgtgccgctgttggttacataggtcttgttcttgaggagggtggcattgtgcgtagtgattaaatgaatatgtgtggcgcggccaggatagtgacctgggaaaatcgtatcgaactggaccgtgccatctttgtctgtcggctgaaccccgcgcagatacgttgagttcagtccgccctcatgttggggaccgaaaccctcaattccgg

SEQ ID NO: 28032 - DNA, 1392 bp, Muscodor strobelii
  misc_feature: SGI cDNA ID NO. 569613
  misc_feature: Encodes the peptide sequence at SEQ ID NO 28033
atgctgggcagctggctcaccctcgtcaatggaacgccatacacctggactaaagaagtctgggatcagcatcaaatgcacacggactacggcgtcgggaatttcccctcgaccgtagcacccttctctaaggtagactgtaaattcgtctttgacgacgatggtctgttcaaaaaggtggcggactcggagtgctgggccgagtaccaaatccagggaacatcaagtcggttccaagtctggttgaaccggaagataatgcccaattggaaactctgcctcaaccaaatgaagacgctgtctgaccaaactggcaccaagatcgacctcggcttcgttgacgacaaagacgtgccggagtatcactacaacggaacaacactcatcatctcaggggtagatggcgaatttgtgacgacaagtagaaatccggttgcgccgtggatgtggcggtacaaagatctgatcggcgaacgaaccctatgccagatctgcatgcccggcacacataattcaggtactggacgtgtcacacggacaggcttcaacacgcccaacagcgtcattatgtgtcagttcggtagtgtctgggatcagctacgattaggcgtgcggttcttcgatatcagaccgtgctggtcaaagagcgaaggctacgccacagggcattattcggaacacgatctcggttccctactaggaaagaaggtcctcggtgggagcgggcagaccattgcagacgttgttaataacgtgaatgacttcacgtacaataacgctgaggttatcatactaaacattagccatgatcaaaacctagacaatggtgtcgcgtcgtggccaagctcatggtggtcccacttctgcgatacagagttggataggctcactcaccgatttcacacggatggcaatcgagatttgtcaaatatgaggcttaacgagtttattggagaaggccgcgctgcagtcattgtcagatttgccttcaataggagcgagggtcacttagggcatagggaaggcaagggctactactatgccgatagtctacctcttttcgatgagtacgccaacgagatgaatcccgggaaggttgtaggggatcagctaggcaaattgagagagcagcgttctgatccgaatcgtcagatgtttatcctcggctgggcccagacgcagaagacatttggcgacgctgctaagagttatgccaagaccaccaagtacttaacagcactggggaagtgggcaatggcacccaggttaggatatgatttgatccctaacacctcgagtaaggtctatccgaatgttttggccttagatggcgttgataccacccaaggcgttgcagctgccattgcaatcaacctaagggcacagccatag

SEQ ID NO: 28033 - protein, 463 aa, Muscodor strobelii
  misc_feature: SGI Peptide ID NO. 569613
  misc_feature (3)..(458): NCBI GI: 46127379 Blast Desc: FG08067.1 [Gibberella zeae PH-1]
  misc_feature (3)..(463): NCBI GI: 256725354 Blast Desc: NECHADRAFT_45692 [Nectria haematococca mpVI 77-13-4]
  misc_feature (5)..(379): NCBI GI: 225559245 Blast Desc: LysM domain-containing protein [Ajellomyces capsulatus G186AR]
  misc_feature (5)..(379): NCBI GI: 240282178 Blast Desc: LysM domain-containing protein [Ajellomyces capsulatus H143]
  misc_feature (5)..(379): NCBI GI: 226286309 Blast Desc: glucan 1,3-beta-glucosidase [Paracoccidioides brasiliensis Pb01]
  misc_feature (5)..(379): NCBI GI: 225679994 Blast Desc: exo-1,3-beta-D-glucanase [Paracoccidioides brasiliensis Pb03]
  misc_feature (5)..(379): NCBI GI: 226291773 Blast Desc: glucan 1,3-beta-glucosidase [Paracoccidioides brasiliensis Pb18]
  misc_feature (5)..(379): NCBI GI: 261204583 Blast Desc: LysM domain-containing protein [Ajellomyces dermatitidis SLH14081] gi|239587290|gb|EEQ69933.1| LysM domain-containing protein [Ajellomyces dermatitidis SLH14081]
  misc_feature (5)..(379): NCBI GI: 239614171 Blast Desc: exo-beta-1,3-glucanase [Ajellomyces dermatitidis ER-3]
  misc_feature (60)..(395): NCBI GI: 189204974 Blast Desc: conserved [Pyrenophora tritici-repentis Pt-1C-BFP] gi|187985921|gb|EDU51409.1| conserved [Pyrenophora tritici-repentis Pt-1C-BFP]
MLGSWLTLVNGTPYTWTKEVWDQHQMHTDYGVGNFPSTVAPFSKVDCKFVFDDDGLFKKVADSECWAEYQIQGTSSRFQVWLNRKIMPNWKLCLNQMKTLSDQTGTKIDLGFVDDKDVPEYHYNGTTLIISGVDGEFVTTSRNPVAPWMWRYKDLIGERTLCQICMPGTHNSGTGRVTRTGFNTPNSVIMCQFGSVWDQLRLGVRFFDIRPCWSKSEGYATGHYSEHDLGSLLGKKVLGGSGQTIADVVNNVNDFTYNNAEVIILNISHDQNLDNGVASWPSSWWSHFCDTELDRLTHRFHTDGNRDLSNMRLNEFIGEGRAAVIVRFAFNRSEGHLGHREGKGYYYADSLPLFDEYANEMNPGKVVGDQLGKLREQRSDPNRQMFILGWAQTQKTFGDAAKSYAKTTKYLTALGKWAMAPRLGYDLIPNTSSKVYPNVLALDGVDTTQGVAAAIAINLRAQP

SEQ ID NO: 28034 - DNA, 795 bp, Muscodor strobelii
  misc_feature: SGI cDNA ID NO. 569614
  misc_feature: Elevated expression when VOC is produced
  misc_feature: Encodes the peptide sequence at SEQ ID NO 28035
atggattctcaaaagcttaaatacgaagcggattcgagttctcgatctagcaccgaggtcgagtccctaatgggtgaatctaacgcgaagttatggcacgacgtggagctcaacgatccgatgcggacaaagaaggaggcgtttgtcacagtgattaaatcgtacaggtcgatccttgacacggcattattatttatcattgttgcgttattggcccgcgatcaattgagagcgcctgctgtcctgcaagacccgaatccctggcaatttggacaagacttcactggagttggccccaaattctcgtcaaaaatcactacatttgtccgggacgagtcatatgcaccaaataatacagcggaattcttcaacaatgcaacgctccagaaatggaacgagctgatgccgatcggtatgggctttgtttgggtcaatgaaactgagaagtatcatgatctgccgacgccaatcatgtggccagataagaccgtcttcacgacttcggctactcatcagttgcattgtctctttgccatcgttcaaacctactccggtttaacatcaggtcacgaaattccagacgaccaccattggcacatgattcattgtttcgattatatgcggcaagccatcatgtgcagcgccgatacggcattggaagggttagagacaacattccctgaccataatggtgggagcgatggatgggactccaagcatgtttgtaaggattggacccaagttaaatcatacctagagagcgtacgcgcatatgacgatcaattgatctactag

SEQ ID NO: 28035 - protein, 264 aa, Muscodor strobelii
  misc_feature: SGI Peptide ID NO. 569614
  misc_feature (16)..(264): NCBI GI: 189192689 Blast Desc: conserved [Pyrenophora tritici-repentis Pt-1C-BFP] gi|187978247|gb|EDU44873.1| conserved [Pyrenophora tritici-repentis Pt-1C-BFP]
  misc_feature (4)..(264): NCBI GI: 261357980 Blast Desc: conserved [Verticillium albo-atrum VaMs.102]
  misc_feature (91)..(237): NCBI GI: 169604939 Blast Desc: SNOG_05486 [Phaeosphaeria nodorum SN15] gi|160706668|gb|EAT86550.2| SNOG_05486 [Phaeosphaeria nodorum SN15]
  misc_feature (7)..(260): NCBI GI: 39966819 Blast Desc: MGG_01932 [Magnaporthe grisea 70-15] gi|145009574|gb|EDJ94230.1| MGG_01932 [Magnaporthe grisea 70-15]
  misc_feature (85)..(262): NCBI GI: 261355356 Blast Desc: conserved [Verticillium albo-atrum VaMs.102]
  misc_feature (52)..(253): NCBI GI: 189204510 Blast Desc: conserved [Pyrenophora tritici-repentis Pt-1C-BFP] gi|187985689|gb|EDU51177.1| conserved [Pyrenophora tritici-repentis Pt-1C-BFP]
  misc_feature (26)..(240): NCBI GI: 149211233 Blast Desc: MGCH7_ch7g1077 [Magnaporthe grisea 70-15] gi|86197032|gb|EAQ71670.1| MGCH7_ch7g1077 [Magnaporthe grisea 70-15]
  misc_feature (61)..(255): NCBI GI: 283135485 Blast Desc: [Mycosphaerella eumusae]
  misc_feature (61)..(255): NCBI GI: 283135499 Blast Desc: [Mycosphaerella musicola]
  misc_feature (102)..(254): NCBI GI: 145601410 Blast Desc: MGG_10306 [Magnaporthe grisea 70-15] gi|145009490|gb|EDJ94157.1| MGG_10306 [Magnaporthe grisea 70-15]
  misc_feature: Useful for introducing or modulating the production of volatile compounds
MDSQKLKYEADSSSRSSTEVESLMGESNAKLWHDVELNDPMRTKKEAFVTVIKSYRSILDTALLFIIVALLARDQLRAPAVLQDPNPWQFGQDFTGVGPKFSSKITTFVRDESYAPNNTAEFFNNATLQKWNELMPIGMGFVWVNETEKYHDLPTPIMWPDKTVFTTSATHQLHCLFAIVQTYSGLTSGHEIPDDHHWHMIHCFDYMRQAIMCSADTALEGLETTFPDHNGGSDGWDSKHVCKDWTQVKSYLESVRAYDDQLIY

SEQ ID NO: 28036 - DNA, 2275 bp, Muscodor strobelii
  misc_feature: SGI EST ID NO. CUFF.66065.0
  misc_feature: Variant of the nucleotide sequence at SEQ ID NO 28034
agacgatcagctaataataagatcgaatgtatgttgcgcacacagcgcccatagaactgaggctagccccaaacatgttcctggtcgttgtttcaaattgtgtgcttcgattcagaagcgaggggcctatgcacgctacatcattttccgtcctcactccataatctgagtatatatttcatcgtctaggaattcctctgaagaccactcggcgttgctcatcatgtaaatcagcatcgaattcttgcacgtagctttgttcattaaccattaaccgaagtctggctgaaggcgatgtgcaactcatctgatgagctatgtggagacgtgtctgggccatgtttgagcagggtatttgttaccctaggagccgccaaatgaccctgttaagactgccaaggcgaaacattcacagttacagtaccccagattctgcgcatcctcaaacagtggttggcaccatacagcgcgatgtcgatcttcatgctcgtcctttacagcaataaaagtacaatatgtgcattttcgaggcaatctcgaaatttcgctttctgttgtctctagatctacaggccgttgtggttctctaatcaattttcttcttctttttcgttcccttctttcgcagccggtctgtattccgtgtagatcacgatggattctcaaaagcttaaatacgaagcggattcgagttctcgatctagcaccgaggtcgagtccctaatgggtgaatctaacgcgaagttatggcacgacgtggagctcaacgatccgatgcggacaaagaaggaggcgtttgtcacagtgattaaatcgtacaggtcgatccttgacacggcattattatttatcattgttgcgttattggcccgcgatcaattgagagcgcctgctgtcctgcaagacccgaatccctggcaatttggacaagacttcactggagttggccccaaattctcgtcaaaaatcactacatttgtccgggacgagtcatatgcaccaaataatacagcggaattcttcaacaatgcaacgctccagaaatggaacgagctgatgccgatcggtatgggctttgtttgggtcaatgaaactgagaagtatcatgatctgccgacgccaatcatgtggccagataagaccgtcttcacgacttcggctactcatcagttgcattgtctctttgccatcgttcaaacctactccggtttaacatcaggtcacgaaattccagacgaccaccattggcacatgattcattgtttcgattatatgcggcaagccatcatgtgcagcgccgatacggcattggaagggttagagacaacattccctgaccataatggtgggagcgatggatgggactccaagcatgtttgtaaggattggacccaagttaaatcatacctagagagcgtacgcgcatatgacgatcaattgatctactagcatcgggtggggggctacccaaattttcgccagtggaccactatagacatgtcaatatggacacagaattgaatacaatcaacattccatgctccatcgtctgcctacactccgaaaacgattgataataccaatccatgactcgttgacgctctggtggaatttcgactcatatactttatctggagggattgctcaatagctgctattctccgagctttgcggttagcagcaggttttgtcaagctgaagttccgcttagctagttcccactcacgctaaaccgagagccacgagaagaattctaggctttgggctaaccgtcaacagtcaactgcaggaaactatcggctgtttccgtgggctataacggctttgccgctcgattgggaacgtagcttcagtcgcaatgggttctagactggctttcagctactatagggatgcattgacacatagaaaattacgcgtctttgactgaacatgacagcagatcttttagatagcaagtgaggtcagggagaaaggtctatataaacccgatcaaataattactttagacaagttgaagatatagatgctgttttctcgcccagttacggcctcgattctccccgctaactctcacgactacaactagtatcttgccatcattatacttgtagcacaatatacatcaacatgctgggcagctggctcaccctcgtcaatggaacgccatacacctggactaaagaagtctgggatcagcatcaaatgcacacggactacggcgtcgggaatttcccctcgaccgtagcaccctgtaagatagcaatacgtctac

SEQ ID NO: 28037 - DNA, 1290 bp, Muscodor strobelii
  misc_feature: SGI cDNA ID NO. 569615
  misc_feature: Encodes the peptide sequence at SEQ ID NO 28038
atgtctgcgcttcattctcttcccttcacaatcagttggaagaatcctcgtgctgcagtgtccggtgccgttatcgcctatctgcttctagtacgagttttgcggtataggaggcgcaatgcctggatccgtgctttcaagcgcaagtatgggtcatgcgaaagagaagcactgtgtaacatgacaattgaagatgcacagtcaatcttgaagggcatgtcagagcaggagttccctttcatctttgccatctcgaccttcttcgctctattcaagacatatgggacccctacaatcagcgagctacttgtagcgactgggcagctagccagcgacacgacggcctcaaagcgaacagcagataccggggtcgttttagccgagaccattttgaactcaccagattccacacgcaggcttgagagtgtggcaagaatgaattatttacacgatcggtaccggaaagcaggcaagatttcagacgctgatttgctgtacacgctgagcctattcgcacttgagcccattagatggacgaacaggtgggactggagacagctcacagacctggaacgatgcgctatgggcgttttctggcgtgatatgggcgaggcgatgaagattccatacgacatgcttgatccttacctacaaaaccaaggagatgggctcgactggttaaacgctattgatcggtggggtttggcatatgaacagaactatatggtcccagctgatactaatgagaagctggcaaaggggacgttgaagatcctgttgttcaacacgccgttttggctgcgaggatttgcttcaaaggctgccggtgcactcatggatgaccgtttacgggtggcgatgaagatcgaagaaccgccttgctttcacagaaacttcgtcgcgctattcctcgcaattcgagccctaataatccgacacacacatttaccgcgaccattctttctccgcaacaaatttttcgaggaaaccccggatcctaaaaccggaagatattacacagcgcggtacgcagctcatccttggtatatgaagccgacgttttcctcacgatggggcttgctggcgatgtggacacgattatggggaggcattcttccaggagatgagggaggaaaatatcatcccgaaggttatcatctctcagatattggtcccgagaatcgaagaggcaaaggagggccggagatggaaatactcaaagctgaactagtggaaaggcgcagagcacaggttagctgtccaatgtcgatacttagcaagactggatga

SEQ ID NO: 28038 - protein, 429 aa, Muscodor strobelii
  misc_feature: SGI Peptide ID NO. 569615
  misc_feature (26)..(422): NCBI GI: 238839098 Blast Desc: conserved [Microsporum canis CBS 113480]
  misc_feature (24)..(424): NCBI GI: 240109808 Blast Desc: CPC735_033130 [Coccidioides posadasii C735 delta SOWgp]
  misc_feature (24)..(424): NCBI GI: 119184205 Blast Desc: CIMG_06926 [Coccidioides immitis RS]
  misc_feature (11)..(417): NCBI GI: 238507051 Blast Desc: conserved [Aspergillus flavus NRRL3357] gi|220689440|gb|EED45791.1| conserved [Aspergillus flavus NRRL3357]
  misc_feature (1)..(421): NCBI GI: 255955307 Blast Desc: Pc21g13890 [Penicillium chrysogenum Wisconsin 54-1255] gi|211590117|emb|CAP96286.1| Pc21g13890 [Penicillium chrysogenum Wisconsin 54-1255]
  misc_feature (25)..(424): NCBI GI: 226291376 Blast Desc: conserved [Paracoccidioides brasiliensis Pb18]
  misc_feature (22)..(422): NCBI GI: 255937467 Blast Desc: Pc13g13460 [Penicillium chrysogenum Wisconsin 54-1255] gi|211584380|emb|CAP92415.1| Pc13g13460 [Penicillium chrysogenum Wisconsin 54-1255]
  misc_feature (14)..(417): NCBI GI: 119479335 Blast Desc: NFIA_077320 [Neosartorya fischeri NRRL 181] gi|119407850|gb|EAW17799.1| conserved [Neosartorya fischeri NRRL 181]
  misc_feature (25)..(424): NCBI GI: 226285904 Blast Desc: conserved [Paracoccidioides brasiliensis Pb01]
  misc_feature (23)..(421): NCBI GI: 119495804 Blast Desc: NFIA_014740 [Neosartorya fischeri NRRL 181] gi|119412841|gb|EAW22782.1| conserved [Neosartorya fischeri NRRL 181]
MSALHSLPFTISWKNPRAAVSGAVIAYLLLVRVLRYRRRNAWIRAFKRKYGSCEREALCNMTIEDAQSILKGMSEQEFPFIFAISTFFALFKTYGTPTISELLVATGQLASDTTASKRTADTGVVLAETILNSPDSTRRLESVARMNYLHDRYRKAGKISDADLLYTLSLFALEPIRWTNRWDWRQLTDLERCAMGVFWRDMGEAMKIPYDMLDPYLQNQGDGLDWLNAIDRWGLAYEQNYMVPADTNEKLAKGTLKILLFNTPFWLRGFASKAAGALMDDRLRVAMKIEEPPCFHRNFVALFLAIRALIIRHTHLPRPFFLRNKFFEETPDPKTGRYYTARYAAHPWYMKPTFSSRWGLLAMWTRLWGGILPGDEGGKYHPEGYHLSDIGPENRRGKGGPEMEILKAELVERRRAQVSCPMSILSKTG

SEQ ID NO: 28039 - DNA, 426 bp, Muscodor strobelii
  misc_feature: SGI EST ID NO. CUFF.66070.0
  misc_feature: Variant of the nucleotide sequence at SEQ ID NO 28037
gttttgcggtataggaggcgcaatgcctggatccgtgctttcaagcgcaagtatgggtcatgcgaaagagaagcactgtgtaacatgacaattgaagatgcacagtcaatcttgaagggcatgtcagagcaggagttccctttcatctttgccatctcgaccttcttcgctctattcaagacatatgggacccctacaatcagcgagctacttgtagcgactgggcagctagccagcgacacgacggcctcaaagcgaacagcagataccggggtcgttttagccgagaccattttgaactcaccagattccacacgcaggcttgagagtgtggcaagaatgaattatttacacgatcggtaccggaaagcaggcaagatttcagacgctgatttgctgtacacgctgagcctattcgcacttgag

SEQ ID NO: 28040 - DNA, 849 bp, Muscodor strobelii
  misc_feature: SGI cDNA ID NO. 569616
  misc_feature: Encodes the peptide sequence at SEQ ID NO 28041
atggcctcgagtagcacatcacttgaagacgagacttgtaacaatccgtacaaattcttggagcaatttgatactgtcttcctcatcgatgattcgtcgtctatgttcgaggacgatggccttcaaaaaccttctacaagagctaaagacgataatgacccaaatgaaagcggcaccggttacactaggtggttgcaggcaaaagatgttcttaagggggttgttagaatttgcatgcactatgatgaagacggcatcgacatctacttcctcaacaatcgcaacccggatagaaagacacgcgcccctggtggcggtttcaaaaatgtaaccgacataaagactgtccaaaccatttttcgaaaagtaataccacatggttacacacccactggcccgcgcctgagggatatcttagatccttatcttgaccgttataaacaagaacttgctgcacgtcacagaaagcctatgtgtatcaagcccatgaatatcatcgtcatcactgatggtgccccgactaagatggatgaaagaaatccttctggctggccagtggatgccactgacgacttaagagattacataatcgaatcagcgaggagacttgatgcattggatgcacctgcccaccaagtcggcattcagttcttccaggttggcacggacgaagacgcaactaaaagccttaaacaacttgatgacggtctgaagaaatcttttaagattcgtgacatggttgatcgttgcaagaaagagcctgatgagcctctctctgagcacatgatcctgaagactgttctcggcgctgtcaatagagatctcgacaattcgtcgaaccatgcttaa

SEQ ID NO: 28041 - protein, 282 aa, Muscodor strobelii
  misc_feature: SGI Peptide ID NO. 569616
  misc_feature (4)..(276): NCBI GI: 116200135 Blast Desc: CHGG_08223 [Chaetomium globosum CBS 148.51] gi|88179502|gb|EAQ86970.1| CHGG_08223 [Chaetomium globosum CBS 148.51]
  misc_feature (4)..(276): NCBI GI: 171690088 Blast Desc: protein product [Podospora anserina] gi|170944999|emb|CAP71110.1| protein product [Podospora anserina]
  misc_feature (4)..(276): NCBI GI: 261352979 Blast Desc: conserved [Verticillium albo-atrum VaMs.102]
  misc_feature (2)..(276): NCBI GI: 240274541 Blast Desc: conserved [Ajellomyces capsulatus H143]
  misc_feature (2)..(276): NCBI GI: 154282645 Blast Desc: [Ajellomyces capsulatus NAm1] gi|150410298|gb|EDN05686.1| [Ajellomyces capsulatus NAm1]
  misc_feature (2)..(276): NCBI GI: 225561439 Blast Desc: conserved [Ajellomyces capsulatus G186AR]
  misc_feature (13)..(276): NCBI GI: 240108680 Blast Desc: CPC735_010310 [Coccidioides posadasii C735 delta SOWgp]
  misc_feature (3)..(282): NCBI GI: 46121577 Blast Desc: FG05167.1 [Gibberella zeae PH-1]
  misc_feature (14)..(281): NCBI GI: 169598380 Blast Desc: SNOG_01992 [Phaeosphaeria nodorum SN15] gi|160704384|gb|EAT90204.2| SNOG_01992 [Phaeosphaeria nodorum SN15]
  misc_feature (3)..(279): NCBI GI: 256732974 Blast Desc: NECHADRAFT_92552 [Nectria haematococca mpVI 77-13-4]
MASSSTSLEDETCNNPYKFLEQFDTVFLIDDSSSMFEDDGLQKPSTRAKDDNDPNESGTGYTRWLQAKDVLKGVVRICMHYDEDGIDIYFLNNRNPDRKTRAPGGGFKNVTDIKTVQTIFRKVIPHGYTPTGPRLRDILDPYLDRYKQELAARHRKPMCIKPMNIIVITDGAPTKMDERNPSGWPVDATDDLRDYIIESARRLDALDAPAHQVGIQFFQVGTDEDATKSLKQLDDGLKKSFKIRDMVDRCKKEPDEPLSEHMILKTVLGAVNRDLDNSSNHA

SEQ ID NO: 28042 - DNA, 3606 bp, Muscodor strobelii
  misc_feature: SGI EST ID NO. CUFF.66079.0
  misc_feature: Variant of the nucleotide sequence at SEQ ID NO 28040
tgactgcctcagaaaatgaggctacagataatatttacagctcttcaagtccaagtcgttactggcacagggtggcttcaatgagcttatgaagcatcatgctaccgttttgtgacattatctcatgagacagagtttatgctctgctttctatggaacctggcgtctcctagcacatcgcaatgtttctctgagtataggaagcgctgtatatcgctatctaatgcttcggaaggttgcgttttcagtgcagaattatactcgtaattatcaaagtgcggagggtagtgttagtgggtcgaggtccggaccggcgctgttggggtgccgagtgacatttaacggcgttgcattaataatgataaggatctctaggaaaccagacgggagaccataggtcatctattaggcactggttgacagaacctgatgaagtttatcataggcaacgacaaaaatcgccgtgtcgaagatcaaaatgtcagactcaggtgctgcaccaccagttgaccttgagctccctctgcggaaggtcctgggcaagcagaccttcattccggctcctagcaaagcagcattccttgcgaaatttggcaatggctatccagaggcacaatatctcaattctgacctcgggacaacagctatgtacgacatccctcccccttcgggacagacgaaacgcaaagtcttgatacttcatggaataaacacacccgcgctcggaatgttgcctctggcaaaggcactgcaagctctggatccagatgctcacatcgtgctgttcgatctctggggacatggtctatcctctactcctcttgtcgctcacacgccccagatattccactatcaaatcttccaggtgttgggtttcatgaagtggacttctgcgcatttcgtcggattctcctttggtggagtgacatctgtcaaatttgcgatagataatccttgggttacagagtccgtcggaatacttgcacctgcaggcatgttaccagatcagttgcttggtcaacatctcgtggatctcttggaagattctaagggtaaagaaaccgaagcccaagaggcgatcttagacttccttgaaggtggcccacttgaggtaccagaggactgggaagctcgagtcaaagccggagacgtggttcctgaagcctttcgacggtgggagttagatgagcacaagggatatccacatagtgttctgagcatgtcgcgaaacgggattcgtggtagcgaggaggctttccgcacatttgcgctgtcgccagtgaagaagaccagcgtcgttgcggaattagaccctgtttgtagcaaagaaagactcgagaacgtgggatggagcaatgtccacgtggtgcctcaggcttaccatgggtttgtgcgcagccacgcgaaggacgttgctcgcattgtgcatgagttctggacacagtcgtgatagatgacggtacgtacgatcgatcatagggaatactagcagccgtatacaagaatctaatttgaatatatgatgtagttgacattgtgatgccgaaagagcctttagtgtggcggtacatggtgctttaacttgtgatacagacagtcgcctcatacgtacaaaggactggcatgataagccatcgtctagccaacattcacaaattttgcccacgatctaccgttacattacacaagaaggaatctagttggggattgccaacagggctctgacattccagtcacattgtgctcccgggaacaaagaagtgaccaccactgttgccacattctcccccacccaccctgcgagattaacgatttaaatcaaacctctttccgacgcgatatgatccatctgcatatatcatttcgtacctaaactatttcctactatatctcatctcagactagtcactttgtctgtgccgttctcaaattccgttacgctcggatcgtcaataccctttcttgtctctacctctaagtcgtggcagtaacttaatcaagtactatacacggatttgatctcatcatggagaagcgaaatcacatgatgctgagccctaatggtccaggtgacgataagcgatcttcatccaacccattctctaacctggtgagaagactcagtggccgcaaagacaaagaaaagggtcccgaggcgtcatcacagcctgtcgaccagtcagatggcaacaacccattcagagacccgcctcctgcttacagtacagtctccaccgagagtccaagaaatagttctcaagctcaaggtctattctccgagaaaacatcgctatcggagcccgtgagtgatgcgcaaaggatggcctcgagtagcacatcacttgaagacgagacttgtaacaatccgtacaaattcttggagcaatttgatactgtcttcctcatcgatgattcgtcgtctatgttcgaggacgatggccttcaaaaaccttctacaagagctaaagacgataatgacccaaatgaaagcggcaccggttacactaggtggttgcaggcaaaagatgttcttaagggggttgttagaatttgcatgcactatgatgaagacggcatcgacatctacttcctcaacaatcgcaacccggatagaaagacacgcgcccctggtggcggtttcaaaaatgtaaccgacataaagactgtccaaaccatttttcgaaaagtaataccacatggttacacacccactggcccgcgcctgagggatatcttagatccttatcttgaccgttataaacaagaacttgctgcacgtcacagaaagcctatgtgtatcaagcccatgaatatcatcgtcatcactgatggtgccccgactaagatggatgaaagaaatccttctggctggccagtggatgccactgacgacttaagagattacataatcgaatcagcgaggagacttgatgcattggatgcacctgcccaccaagtcggcattcagttcttccaggttggcacggacgaagacgcaactaaaagccttaaacaacttgatgacggtctgaagaaatcttttaagattcgtgacatggttgatcgttgcaagaaagagcctgatgagcctctctctgagcacatgatcctgaagactgttctcggcgctgtcaatagagatctcgacaattcgtcgaaccatgcttaagcctgaaaattgggttaaatcgacccgcatctcttagcgcggatgcttcaacaccttagactgtggtataaacaaatgacgttggtgctttcgttgctttgaactggctagtccgtgctaagagcctgctgcaaaacaaccttttatcttacttttcttactactgagactgaggatcggcagattgatactttttggatgtttgtcttgttgttattgatgttgttgctgttagctattagagggataccagtttgacggcggggaatctgcttcagatgggaaaaaaggttgaccgaaattgaatgtggtgggctaggctgaagatgtcattggaagaaaggatagaccgtttgattgtcgtattataaatgtagaacaatttttatgaatatcacctagtgaatcacttatccgactaacatcggttgagttat

SEQ ID NO: 28043 - DNA, 1143 bp, Muscodor strobelii
  misc_feature: SGI cDNA ID NO. 569617
  misc_feature: Encodes the peptide sequence at SEQ ID NO 28044
atggagaagcgaaatcacatgatgctgagccctaatggtccaggtgacgataagcgatcttcatccaacccattctctaacctggtgagaagactcagtggccgcaaagacaaagaaaagggtcccgaggcgtcatcacagcctgtcgaccagtcagatggcaacaacccattcagagacccgcctcctgcttacagtacagtctccaccgagagtccaagaaatagttctcaagctcaaggtctattctccgagaaaacatcgctatcggagcccgtgagtgatgcgcaaaggatggcctcgagtagcacatcacttgaagacgagacttgtaacaatccgtacaaattcttggagcaatttgatactgtcttcctcatcgatgattcgtcgtctatgttcgaggacgatggccttcaaaaaccttctacaagagctaaagacgataatgacccaaatgaaagcggcaccggttacactaggtggttgcaggcaaaagatgttcttaagggggttgttagaatttgcatgcactatgatgaagacggcatcgacatctacttcctcaacaatcgcaacccggatagaaagacacgcgcccctggtggcggtttcaaaaatgtaaccgacataaagactgtccaaaccatttttcgaaaagtaataccacatggttacacacccactggcccgcgcctgagggatatcttagatccttatcttgaccgttataaacaagaacttgctgcacgtcacagaaagcctatgtgtatcaagcccatgaatatcatcgtcatcactgatggtgccccgactaagatggatgaaagaaatccttctggctggccagtggatgccactgacgacttaagagattacataatcgaatcagcgaggagacttgatgcattggatgcacctgcccaccaagtcggcattcagttcttccaggttggcacggacgaagacgcaactaaaagccttaaacaacttgatgacggtctgaagaaatcttttaagattcgtgacatggttgatcgttgcaagaaagagcctgatgagcctctctctgagcacatgatcctgaagactgttctcggcgctgtcaatagagatctcgacaattcgtcgaaccatgcttaa

SEQ ID NO: 28044 - protein, 380 aa, Muscodor strobelii
  misc_feature: SGI Peptide ID NO. 569617
  misc_feature (102)..(374): NCBI GI: 116200135 Blast Desc: CHGG_08223 [Chaetomium globosum CBS 148.51] gi|88179502|gb|EAQ86970.1| CHGG_08223 [Chaetomium globosum CBS 148.51]
  misc_feature (102)..(374): NCBI GI: 171690088 Blast Desc: protein product [Podospora anserina] gi|170944999|emb|CAP71110.1| protein product [Podospora anserina]
  misc_feature (20)..(377): NCBI GI: 256732974 Blast Desc: NECHADRAFT_92552 [Nectria haematococca mpVI 77-13-4]
  misc_feature (102)..(374): NCBI GI: 261352979 Blast Desc: conserved [Verticillium albo-atrum VaMs.102]
  misc_feature (55)..(380): NCBI GI: 46121577 Blast Desc: FG05167.1 [Gibberella zeae PH-1]
  misc_feature (112)..(374): NCBI GI: 240108680 Blast Desc: CPC735_010310 [Coccidioides posadasii C735 delta SOWgp]
  misc_feature (112)..(374): NCBI GI: 240274541 Blast Desc: conserved [Ajellomyces capsulatus H143]
  misc_feature (112)..(374): NCBI GI: 225561439 Blast Desc: conserved [Ajellomyces capsulatus G186AR]
  misc_feature (100)..(374): NCBI GI: 154282645 Blast Desc: [Ajellomyces capsulatus NAm1] gi|150410298|gb|EDN05686.1| [Ajellomyces capsulatus NAm1]
  misc_feature (72)..(375): NCBI GI: 156064249 Blast Desc: SS1G_00132 [Sclerotinia sclerotiorum 1980] gi|154690994|gb|EDN90732.1| SS1G_00132 [Sclerotinia sclerotiorum 1980]
MEKRNHMMLSPNGPGDDKRSSSNPFSNLVRRLSGRKDKEKGPEASSQPVDQSDGNNPFRDPPPAYSTVSTESPRNSSQAQGLFSEKTSLSEPVSDAQRMASSSTSLEDETCNNPYKFLEQFDTVFLIDDSSSMFEDDGLQKPSTRAKDDNDPNESGTGYTRWLQAKDVLKGVVRICMHYDEDGIDIYFLNNRNPDRKTRAPGGGFKNVTDIKTVQTIFRKVIPHGYTPTGPRLRDILDPYLDRYKQELAARHRKPMCIKPMNIIVITDGAPTKMDERNPSGWPVDATDDLRDYIIESARRLDALDAPAHQVGIQFFQVGTDEDATKSLKQLDDGLKKSFKIRDMVDRCKKEPDEPLSEHMILKTVLGAVNRDLDNSSNHA

SEQ ID NO: 28045 - DNA, 3606 bp, Muscodor strobelii; identical to SEQ ID NO: 28042
  misc_feature: SGI EST ID NO. CUFF.66079.0
  misc_feature: Variant of the nucleotide sequence at SEQ ID NO 28043

SEQ ID NO: 28046 - DNA, 972 bp, Muscodor strobelii
  misc_feature: SGI cDNA ID NO. 569618
  misc_feature: Elevated expression when VOC is produced
  misc_feature: Encodes the peptide sequence at SEQ ID NO 28047
atgtcagactcaggtgctgcaccaccagttgaccttgagctccctctgcggaaggtcctgggcaagcagaccttcattccggctcctagcaaagcagcattccttgcgaaatttggcaatggctatccagaggcacaatatctcaattctgacctcgggacaacagctatgtacgacatccctcccccttcgggacagacgaaacgcaaagtcttgatacttcatggaataaacacacccgcgctcggaatgttgcctctggcaaaggcactgcaagctctggatccagatgctcacatcgtgctgttcgatctctggggacatggtctatcctctactcctcttgtcgctcacacgccccagatattccactatcaaatcttccaggtgttgggtttcatgaagtggacttctgcgcatttcgtcggattctcctttggtggagtgacatctgtcaaatttgcgatagataatccttgggttacagagtccgtcggaatacttgcacctgcaggcatgttaccagatcagttgcttggtcaacatctcgtggatctcttggaagattctaagggtaaagaaaccgaagcccaagaggcgatcttagacttccttgaaggtggcccacttgaggtaccagaggactgggaagctcgagtcaaagccggagacgtggttcctgaagcctttcgacggtgggagttagatgagcacaagggatatccacatagtgttctgagcatgtcgcgaaacgggattcgtggtagcgaggaggctttccgcacatttgcgctgtcgccagtgaagaagaccagcgtcgttgcggaattagaccctgtttgtagcaaagaaagactcgagaacgtgggatggagcaatgtccacgtggtgcctcaggcttaccatgggtttgtgcgcagccacgcgaaggacgttgctcgcattgtgcatgagttctggacacagtcgtga

SEQ ID NO: 28047 - protein, 323 aa, Muscodor strobelii
  misc_feature: SGI Peptide ID NO. 569618
  misc_feature (26)..(322): NCBI GI: 238500852 Blast Desc: valacyclovir hydrolase, [Aspergillus flavus NRRL3357] gi|220691897|gb|EED48244.1| valacyclovir hydrolase, [Aspergillus flavus NRRL3357]
  misc_feature (21)..(322): NCBI GI: 169782471 Blast Desc: [Aspergillus oryzae RIB40] gi|83774441|dbj|BAE64565.1| protein product [Aspergillus oryzae]
  misc_feature (26)..(320): NCBI GI: 242774117 Blast Desc: valacyclovir hydrolase, [Talaromyces stipitatus ATCC 10500] gi|218721996|gb|EED21414.1| valacyclovir hydrolase, [Talaromyces stipitatus ATCC 10500]
  misc_feature (10)..(320): NCBI GI: 39941336 Blast Desc: MGG_05579 [Magnaporthe grisea 70-15] gi|145022251|gb|EDK06271.1| MGG_05579 [Magnaporthe grisea 70-15]
  misc_feature (23)..(322): NCBI GI: 46116210 Blast Desc: FG03947.1 [Gibberella zeae PH-1]
  misc_feature (26)..(320): NCBI GI: 212531843 Blast Desc: valacyclovir hydrolase, [Penicillium marneffei ATCC 18224] gi|210071442|gb|EEA25531.1| valacyclovir hydrolase, [Penicillium marneffei ATCC 18224]
  misc_feature (23)..(322): NCBI GI: 256731248 Blast Desc: NECHADRAFT_71598 [Nectria haematococca mpVI 77-13-4]
  misc_feature (26)..(321): NCBI GI: 189207400 Blast Desc: conserved [Pyrenophora tritici-repentis Pt-1C-BFP] gi|187976127|gb|EDU42753.1| conserved [Pyrenophora tritici-repentis Pt-1C-BFP]
  misc_feature (26)..(293): NCBI GI: 67541573 Blast Desc: AN6950.2 [Aspergillus nidulans FGSC A4] gi|40738515|gb|EAA57705.1| AN6950.2 [Aspergillus nidulans FGSC A4] gi|259480561|tpe|CBF71807.1| TPA: conserved [Aspergillus FGSC
  misc_feature (26)..(293): NCBI GI: 115400007 Blast Desc: conserved [Aspergillus terreus NIH2624] gi|114191258|gb|EAU32958.1| conserved [Aspergillus terreus NIH2624]
  misc_feature: Useful for introducing or modulating the production of volatile compounds
MSDSGAAPPVDLELPLRKVLGKQTFIPAPSKAAFLAKFGNGYPEAQYLNSDLGTTAMYDIPPPSGQTKRKVLILHGINTPALGMLPLAKALQALDPDAHIVLFDLWGHGLSSTPLVAHTPQIFHYQIFQVLGFMKWTSAHFVGFSFGGVTSVKFAIDNPWVTESVGILAPAGMLPDQLLGQHLVDLLEDSKGKETEAQEAILDFLEGGPLEVPEDWEARVKAGDVVPEAFRRWELDEHKGYPHSVLSMSRNGIRGSEEAFRTFALSPVKKTSVVAELDPVCSKERLENVGWSNVHVVPQAYHGFVRSHAKDVARIVHEFWTQS

SEQ ID NO: 28048 - DNA, 3606 bp, Muscodor strobelii; identical to SEQ ID NO: 28042
  misc_feature: SGI EST ID NO. CUFF.66079.0
  misc_feature: Variant of the nucleotide sequence at SEQ ID NO 28046

SEQ ID NO: 28049 - DNA, 963 bp, Muscodor strobelii
  misc_feature: SGI cDNA ID NO. 569619
  misc_feature: Reduced expression when VOC is produced
  misc_feature: Encodes the peptide sequence at SEQ ID NO 28050
atgtcttcctctcccgtcgatgctgccgatgcccttgcccgcaaggctgcggccaacacccccgagaagctgagcggtgttgctctctactccagattcgcccttgccggtgccgtctgctgttccgtcacccacggtggtctcacccccgtcgatgtcgtcaagacgagaatccagcttgaccccgtcacctacaaccgtggcctgatcggtggcttccgccaggtcatcgccaacgagggtgccggtgctcttctgaccggcgctggccctaccttcgctggttacttcctccagggtgccttcaagttcggaggttacgagttcttcaagcagcagtccatcaacttgatcggtgttgagaatgccaccaactaccgcactggtgtctacttggcctcgtccgccgccgccgagttcttcgccgacattgccctctgccccctcgaggccacccgtatccgtctcgtctccgaacctacctacgccaacggcctgatcggcggcttcagcaagatgtacaagcaggagggcttcggtgctttctatgctggtttcggccccatcctgttcaagcaggttccttacaccatggccaagttcgcggtctacgagaaggtcgccgaggccatcttcaacagataccccaagaaggacatgtccgacggtatgcagaccaccgtcaacttgggatccggtctcatcgctggtttcgccgccgctatcgtctcccagcccgccgacaccatgttgtccaagatcaacaagaccaagggtgagcccggtgagggcaccgtcagccgtctcgtcaagatcggcaaggagctcggtttccgtggctcttatgccggtatcggtgcccgtctcttcatggtcggtaccttgaccgccggtcagttcgccatctacggtgacatcaagaaggctctcggtgccaccggcggtgtcgagatctccaagtaa

SEQ ID NO: 28050 - protein, 320 aa, Muscodor strobelii
  misc_feature: SGI Peptide ID NO. 569619
  misc_feature (127)..(215): Pfam Id: PF00153 Pfam Desc: Mitochondrial carrier protein
  misc_feature (29)..(118): Pfam Id: PF00153 Pfam Desc: Mitochondrial carrier protein
  misc_feature (225)..(314): Pfam Id: PF00153 Pfam Desc: Mitochondrial carrier protein
  misc_feature (10)..(319): NCBI GI: 154320231 Blast Desc: mitochondrial phosphate carrier protein [Botryotinia fuckeliana B05.10] gi|150854835|gb|EDN30027.1| mitochondrial phosphate carrier protein [Botryotinia fuckeliana B05.10]
  misc_feature (10)..(319): NCBI GI: 156065571 Blast Desc: mitochondrial phosphate carrier protein [Sclerotinia sclerotiorum 1980] gi|154691655|gb|EDN91393.1| mitochondrial phosphate carrier protein [Sclerotinia sclerotiorum 1980]
  misc_feature (10)..(319): NCBI GI: 256730750 Blast Desc: NECHADRAFT_102957 [Nectria haematococca mpVI 77-13-4]
  misc_feature (19)..(320): NCBI GI: 171690170 Blast Desc: protein product [Podospora anserina] gi|170945033|emb|CAP71144.1| protein product [Podospora anserina]
  misc_feature (10)..(320): NCBI GI: 169767354 Blast Desc: [Aspergillus oryzae RIB40] gi|238484217|ref|XP_002373347.1| mitochondrial phosphate carrier protein (Mir1), [Aspergillus flavus NRRL3357] protein product
  misc_feature (2)..(320): NCBI GI: 212531561 Blast Desc: mitochondrial phosphate carrier protein (Mir1), [Penicillium marneffei ATCC 18224] gi|210071301|gb|EEA25390.1| mitochondrial phosphate carrier protein (Mir1), [Penicillium ATCC
  misc_feature (23)..(320): NCBI GI: 115492591 Blast Desc: mitochondrial phosphate carrier protein [Aspergillus terreus NIH2624] gi|114197783|gb|EAU39483.1| mitochondrial phosphate carrier protein [Aspergillus terreus NIH2624]
  misc_feature (21)..(319): NCBI GI: 242773281 Blast Desc: mitochondrial phosphate carrier protein (Mir1), [Talaromyces stipitatus ATCC 10500] gi|218721827|gb|EED21245.1| mitochondrial phosphate carrier protein (Mir1), [Talaromyces ATCC
  misc_feature (2)..(320): NCBI GI: 238499271 Blast Desc: mitochondrial phosphate carrier protein, [Aspergillus flavus NRRL3357] gi|220692623|gb|EED48969.1| mitochondrial phosphate carrier protein, [Aspergillus flavus NRRL3357]
  misc_feature (17)..(320): NCBI GI: 169778713 Blast Desc: [Aspergillus oryzae RIB40] gi|83772560|dbj|BAE62688.1| protein product [Aspergillus oryzae]
  misc_feature: Useful for introducing or modulating the production of volatile compounds
MSSSPVDAADALARKAAANTPEKLSGVALYSRFALAGAVCCSVTHGGLTPVDVVKTRIQLDPVTYNRGLIGGFRQVIANEGAGALLTGAGPTFAGYFLQGAFKFGGYEFFKQQSINLIGVENATNYRTGVYLASSAAAEFFADIALCPLEATRIRLVSEPTYANGLIGGFSKMYKQEGFGAFYAGFGPILFKQVPYTMAKFAVYEKVAEAIFNRYPKKDMSDGMQTTVNLGSGLIAGFAAAIVSQPADTMLSKINKTKGEPGEGTVSRLVKIGKELGFRGSYAGIGARLFMVGTLTAGQFAIYGDIKKALGATGGVEISK

SEQ ID NO: 28051 - DNA, 1762 bp, Muscodor strobelii
  misc_feature: SGI EST ID NO. CUFF.66137.0
  misc_feature: Variant of the nucleotide sequence at SEQ ID NO 28049
cccagccgtcccgtctctttctcgtcgcaggtaggtctcgtctgctctgtgaaaaagcctcaacacgtcttttctccctccaccctccaaccaccgccttcattagaaccatcgccaggcatcgattcccgtcgagcctctttctcccctaatatccctagtacttcagtcgtcgacacttttctgtcgacaactcctccgactctccactcatccctagtcttcgtttctacctctctcctactccccccgttgccatgtcttcctctcccgtcgatgctgccgatgcccttgcccgcaaggctgcggccaacacccccgagaagctgagcggtgttgctctctactccagattcgcccttgccggtgccgtctgctgttccgtcacccacggtggtctcacccccgtcgatgtcgtcaagacgagaatccagcttgaccccgtcacctacaaccgtggcctgatcggtggcttccgccaggtcatcgccaacgagggtgccggtgctcttctgaccggcgctggccctaccttcgctggttacttcctccagggtgccttcaagttcggaggttacgagttcttcaagcagcagtccatcaacttgatcggtgttgagaatgccaccaactaccgcactggtgtctacttggcctcgtccgccgccgccgagttcttcgccgacattgccctctgccccctcgaggccacccgtatccgtctcgtctccgaacctacctacgccaacggcctgatcggcggcttcagcaagatgtacaagcaggagggcttcggtgctttctatgctggtttcggccccatcctgttcaagcaggttccttacaccatggccaagttcgcggtctacgagaaggtcgccgaggccatcttcaacagataccccaagaaggacatgtccgacggtatgcagaccaccgtcaacttgggatccggtctcatcgctggtttcgccgccgctatcgtctcccagcccgccgacaccatgttgtccaagatcaacaagaccaagggtgagcccggtgagggcaccgtcagccgtctcgtcaagatcggcaaggagctcggtttccgtggctcttatgccggtatcggtgcccgtctcttcatggtcggtaccttgaccgccggtcagttcgccatctacggtgacatcaagaaggctctcggtgccaccggcggtgtcgagatctccaagtaaacgacaacgccttgtacaatacggggtggtcgagacggataagagtgagggatggttctaatattggatacggcggactgccgcttcagtgccactaagcatcgaagtggacctggtccgtatcatcaagggcagctcggataggtagtccggcgcagctgctaggtttccttatgtttgcatttagacagggcgattggcgataccagatctggaattacaggctttccctggtagtgtcagccctgaaaccgggaaggggcatcgtttgcctgtgtcttcacgattcccacgaacatgtttacaatagacgcataaaagatagagccagaaaaggtatctataggcaagagacgacacttgctgaggagagttgtataatagactggtctaacagtgttcaaaactaccgtgccgcaatgcccgaacgtactagacactgatttccgtaaaaatttccatacaaatcggatgatgttgtattagtataggtgagaaatctacccacttaaggttgtcgcctgaaatagacttaatacagt

SEQ ID NO: 28052 - DNA, 873 bp, Muscodor strobelii
  misc_feature: SGI cDNA ID NO. 569620
  misc_feature: Elevated expression when VOC is produced
  misc_feature: Encodes the peptide sequence at SEQ ID NO 28053
atgaagttctccagcatcctttccggcctggcccttgccggtgccgctgtcgccgcccccggccgtggccatggtagcaaggacacgctgcctaccacgaagatcgccggtgtcgaggtcgtttacaccgatatcgtccaggctgccttcaagcagattgaggtcttcaagacctatcagccttacctttacaaccacgccgtccgcacgtggttgttcggagctgctggcttgaacaacaacgccactctcaaggcttcggtggatctcgagctccacgccgttggctcgatgctccacgatctgggctgggacatccgccccaactctccctgggtcacggaggagtacaccttcgaggttgactctgctcgatttgctgtccagtgggtcaaggactggtgcacgaagaacaaccgcaagcagtggaccgctgagcgtctggagaagctctacgacggtatcatgctgcagactttcatcggtgcccccgagttcaagaacatcgacaccaagtggatcgttcaatccatcaccttcgagttccccattggcgagtctcctctcatccagaagcacgactacgacaacgtctgggctgcctactccaacgctaccttcttccgtggtaccaacttcaccttcaccaactgggccgttcagaagcccgagcccaccaccaagaccttcatccgtgacttcggtgctgcctacgtccgcggctacaacgagtcccttgtcggccagcgcttgttcgacctcatcaacggtggtctccagctcgaacttcaccagtacggctccgttccctacgtccagaagctgcccgctggctgggacggtgctactcctttcgatgctgctgcccactaa

SEQ ID NO: 28053 - protein, 290 aa, Muscodor strobelii
  misc_feature: SGI Peptide ID NO. 569620
  misc_feature (4)..(253): NCBI GI: 116200323 Blast Desc: CHGG_08317 [Chaetomium globosum CBS 148.51] gi|88179596|gb|EAQ87064.1| CHGG_08317 [Chaetomium globosum CBS 148.51]
  misc_feature (21)..(253): NCBI GI: 256721693 Blast Desc: NECHADRAFT_44823 [Nectria haematococca mpVI 77-13-4]
  misc_feature (21)..(259): NCBI GI: 171681192 Blast Desc: protein product [Podospora anserina] gi|170940554|emb|CAP65782.1| protein product [Podospora anserina]
  misc_feature (35)..(257): NCBI GI: 116202473 Blast Desc: CHGG_09121 [Chaetomium globosum CBS 148.51] gi|88177639|gb|EAQ85107.1| CHGG_09121 [Chaetomium globosum CBS 148.51]
  misc_feature (31)..(253): NCBI GI: 171693093 Blast Desc: protein product [Podospora anserina] gi|170946495|emb|CAP73296.1| protein product [Podospora anserina]
  misc_feature (35)..(187): NCBI GI: 116204295 Blast Desc: CHGG_10031 [Chaetomium globosum CBS 148.51] gi|88176159|gb|EAQ83627.1| CHGG_10031 [Chaetomium globosum CBS 148.51]
  misc_feature (32)..(243): NCBI GI: 13471098 Blast Desc: mlr0982 [Mesorhizobium loti MAFF303099] gi|14021842|dbj|BAB48453.1| mlr0982 [Mesorhizobium loti MAFF303099]
  misc_feature (28)..(243): NCBI GI: 260460254 Blast Desc: conserved [Mesorhizobium opportunistum WSM2075] gi|259033899|gb|EEW35158.1| conserved [Mesorhizobium opportunistum WSM2075]
  misc_feature (20)..(243): NCBI GI: 162450515 Blast Desc: sce2243 [Sorangium cellulosum 'So ce 56'] gi|161161097|emb|CAN92402.1| [Sorangium cellulosum 'So ce 56']
  misc_feature (26)..(226): NCBI GI: 242795716 Blast Desc: conserved [Talaromyces stipitatus ATCC 10500] gi|218719237|gb|EED18657.1| conserved [Talaromyces stipitatus ATCC 10500]
  misc_feature: Useful for introducing or modulating the production of volatile compounds
MKFSSILSGLALAGAAVAAPGRGHGSKDTLPTTKIAGVEVVYTDIVQAAFKQIEVFKTYQPYLYNHAVRTWLFGAAGLNNNATLKASVDLELHAVGSMLHDLGWDIRPNSPWVTEEYTFEVDSARFAVQWVKDWCTKNNRKQWTAERLEKLYDGIMLQTFIGAPEFKNIDTKWIVQSITFEFPIGESPLIQKHDYDNVWAAYSNATFFRGTNFTFTNWAVQKPEPTTKTFIRDFGAAYVRGYNESLVGQRLFDLINGGLQLELHQYGSVPYVQKLPAGWDGATPFDAAAH

SEQ ID NO: 28054 - DNA, 1518 bp, Muscodor strobelii
  misc_feature: SGI EST ID NO. CUFF.66093.0
  misc_feature: Variant of the nucleotide sequence at SEQ ID NO 28052
cgggcaggcaagtgaaggctaagggtgacatttcagcccccaagctctccgctatattctttgcccggatgacaacgacttcactatttgttggaacctgccgcttgaacgccatatgcaatgcaatgttcatgctgtgaggcggctctccagctgaatgtcccctggacatcagcaagggttattttccccccttaactacaacaggaaaggggcctttcgccctgtccgcctgttcgacttctgctccggagattgagcgatgagaaatgtccaccagctagccgactagttgcgtgtaggagcagatcctaggcccttgcctgccatagcgcgtcgattattactgttcttggaatttgggtttttgtcatcgttcacgatggtaacaggatgtgaatatagtatataacttcatgttgagtcgcatcgtcagtttgaatttggactcttgctctccacctctctctaccacactctcctttcagccttatccagctccttcttcttctccaacatgaagttctccagcatcctttccggcctggcccttgccggtgccgctgtcgccgcccccggccgtggccatggtagcaaggacacgctgcctaccacgaagatcgccggtgtcgaggtcgtttacaccgatatcgtccaggctgccttcaagcagattgaggtcttcaagacctatcagccttacctttacaaccacgccgtccgcacgtggttgttcggagctgctggcttgaacaacaacgccactctcaaggcttcggtggatctcgagctccacgccgttggctcgatgctccacgatctgggctgggacatccgccccaactctccctgggtcacggaggagtacaccttcgaggttgactctgctcgatttgctgtccagtgggtcaaggactggtgcacgaagaacaaccgcaagcagtggaccgctgagcgtctggagaagctctacgacggtatcatgctgcagactttcatcggtgcccccgagttcaagaacatcgacaccaagtggatcgttcaatccatcaccttcgagttccccattggcgagtctcctctcatccagaagcacgactacgacaacgtctgggctgcctactccaacgctaccttcttccgtggtaccaacttcaccttcaccaactgggccgttcagaagcccgagcccaccaccaagaccttcatccgtgacttcggtgctgcctacgtccgcggctacaacgagtcccttgtcggccagcgcttgttcgacctcatcaacggtggtctccagctcgaacttcaccagtacggctccgttccctacgtccagaagctgcccgctggctgggacggtgctactcctttcgatgctgctgcccactaagcaaaccacttccgtggttcacttttccctgtgttggagatcttttttctgtatatagattttagatgagatggtcatatagagatatacaatcaatgagataccaagttatgaaacttacaaccccg

SEQ ID NO: 28055 - DNA, 726 bp, Muscodor strobelii
  misc_feature: SGI cDNA ID NO. 569621
  misc_feature: Reduced expression when VOC is produced
  misc_feature: Encodes the peptide sequence at SEQ ID NO 28056
atgtctgctcagggattaactttcacggatcgcaactttcctcagactcaagtctggacaaatgtggattcgtatcaagcggagaggctacaccctcccacaaagcccaaccataaggctctactagacgcgcttcggaattcgcgcgcaaatggtatacctgagatcgaaacagcgccggccgtggcgaaaatgtacgctctgcaatgcaaagcgcgaggagtgaaacacgctcttgagtttggtaccctcggcgggtacacgtcgatttggattgcgacagaaaaccccggcatccaggtgacgacgatcgaatttgatgagcaccatgcgaataccgcgcaagcaaatcttgacaatgctggcgtggcggatagagtcacgattcgtcgtggggcgggcctggatgtgctgcctgttctgcaggaggagatcaaggctgggcaaaaaccgaagctgggattcgtatatatcgacgctgataaagtgaacaattggaactacctcgatcgggtaatcagctcctgtgagcagggtgcctacatttacgtcgacaatatcgtacgtggagggaagctcgtcgatgagacgaagcaggatgcgagtacgctaggagctcgacacgttgttgaaatggcaggcaaagatgatcgcattgatagtgttgtcatgcagttcgttggagagaaggggtatgatggtatgctgatggcgattgtcagatga

SEQ ID NO: 28056 - protein, 241 aa, Muscodor strobelii
  misc_feature: SGI Peptide ID NO. 569621
  misc_feature (30)..(241): Pfam Id: PF01596 Pfam Desc: O-methyltransferase
  misc_feature (1)..(241): NCBI GI: 85074595 Blast Desc: NCU09674 [Neurospora crassa OR74A] gi|28922286|gb|EAA31528.1| [Neurospora crassa OR74A] gi|28949977|emb|CAD70738.1| conserved [Neurospora crassa]
  misc_feature (8)..(241): NCBI GI: 238497508 Blast Desc: O-methyltransferase, [Aspergillus flavus NRRL3357] gi|220693263|gb|EED49608.1| O-methyltransferase, [Aspergillus flavus NRRL3357]
  misc_feature (19)..(240): NCBI GI: 258634539 Blast Desc: O-methyltransferase family 3 [Pantoea sp. At-9b] gi|258536217|gb|EEW04567.1| O-methyltransferase family 3 [Pantoea sp. At-9b]
  misc_feature (21)..(239): NCBI GI: 145254140 Blast Desc: An18g00660 [Aspergillus niger] gi|134084113|emb|CAK43141.1| protein product [Aspergillus niger]
  misc_feature (16)..(240): NCBI GI: 54024501 Blast Desc: O-methyltransferase [Nocardia farcinica IFM 10152] gi|54016009|dbj|BAD57379.1| O-methyltransferase [Nocardia farcinica IFM 10152]
  misc_feature (19)..(240): NCBI GI: 257055378 Blast Desc: O-methyltransferase [Saccharomonospora viridis DSM 43017] gi|256585250|gb|ACU96383.1| O-methyltransferase [Saccharomonospora viridis DSM 43017]
  misc_feature (19)..(241): NCBI GI: 156741911 Blast Desc: O-methyltransferase family protein [Roseiflexus castenholzii DSM 13941] gi|156233239|gb|ABU58022.1| O-methyltransferase family 3 [Roseiflexus castenholzii DSM 13941]
  misc_feature (15)..(240): NCBI GI: 13470544 Blast Desc: O-methyltransferase [Mesorhizobium loti MAFF303099] gi|14021285|dbj|BAB47898.1| O-methyltransferase [Mesorhizobium loti MAFF303099]
  misc_feature (18)..(240): NCBI GI: 154248218 Blast Desc: O-methyltransferase family protein [Xanthobacter autotrophicus Py2] gi|154162303|gb|ABS69519.1| O-methyltransferase family 3 [Xanthobacter autotrophicus Py2]
  misc_feature (17)..(241): NCBI GI: 157691290 Blast Desc: O-methyltransferase [Bacillus pumilus SAFR-032] gi|157680048|gb|ABV61192.1| O-methyltransferase [Bacillus pumilus SAFR-032]
  misc_feature (68)..(194): SWISSPROT Homolog: EC 2.1.1.104 Caffeoyl-CoA O-methyltransferase
  misc_feature: Useful for introducing or modulating the production of volatile compounds
MSAQGLTFTDRNFPQTQVWTNVDSYQAERLHPPTKPNHKALLDALRNSRANGIPEIETAPAVAKMYALQCKARGVKHALEFGTLGGYTSIWIATENPGIQVTTIEFDEHHANTAQANLDNAGVADRVTIRRGAGLDVLPVLQEEIKAGQKPKLGFVYIDADKVNNWNYLDRVISSCEQGAYIYVDNIVRGGKLVDETKQDASTLGARHVVEMAGKDDRIDSVVMQFVGEKGYDGMLMAIVR

SEQ ID NO: 28057 - DNA, 3854 bp, Muscodor strobelii
  misc_feature: SGI EST ID NO. CUFF.66196.1
  misc_feature: Variant of the nucleotide sequence at SEQ ID NO 28055
tagacattggttttacaaatgaatcttctatccaacttgtttcaagcactgatgggaaaactggtcgctatctttgcttgagccactgctgggggtcaagcccacagttaatcacgacgaataatactctatcggattacctcaagctaattccgtggagcatattgcccaataccttcaaagacgcaattacggtggcaagaagactgggaatccaatatatttggattgattccttatgcattattcaggatagcccttcagactgggacaacgaagcttcgaaaatggccaccatctacaaaaacagctatctgaccatcgctgcaacatcttcagcagatggtacgggtgggctacacttgaataacaaaagacagcatggaataaacttgatcggggaaacatcgacaaagccatataacattcgggtgcagtacagtatccctccaaatactcaaatcgactctgaaacaccgggaaatatcattcaacaccctgactcaacttgcagtagtgtatatgacattggaaaaacgctacatgttttcccacttcttggccggggttgggtattccaggagcggttactctcaccgcgagttctgcatttcggcgctcatgaactgttctgggactgcggtcaatctatgctttgcgaatgtcgacagcggccaccggatctacctcagaatcaagtcagattggaagataacctagttgagacaacaatactagacaaaaatttgattccacatcagtggaggaaaatagtggagttttatagtacactggatctgacatacaactctgataagctccccgctttgttaggcctcgcgaagcaaatgggtgacatgaggccggatgcaacatatttggccggcctatggaacgactctttggatttggatctattatgggtgccctacgggtcggatcggatgtcatcatccagtaccagagagtatattgcaccaacctggtcctggtgtagctcaggaaggaagatcacataccctagcctatggcgatcaaaggaggcacgaccaagtgtgcgagttattgatcgttatttcaaggtggttgaagcttcttgtacggctgaccttggtggcagagtttctggaggacatctcgtactggacactcctctagcccccgtcaaggctttgcaagttgagaatgattggactgtatgctacggcgctgttgagtttcaggtttctcatgagtcggacagccttcgcagcaattggaaaatcccgtttacgtttgggaaccgtcgtgcctttttggatccttcttcgacgtcgcacttctcactcgacgaacatatccaatatcaggcttgtaggatcgcgcgtgtggagataaccgagaacagtcttttcttcctgaccttcgatgctagggagattgttcaagttgagttctgtctgctcctcacgcccactggtccttcatcctctacatatcaacgtattgggcttttaatggattaccgagtcatcgatggtcatcaaggtaacgcagaatcatgggagcacgatagaagctgctttgaagataccgatcgagctagaatcaccattatctaagatcagcctcaagcaactgaaattgaactggcctttcccctaccactgccgcttgcgccaggctcgttgttgcgttcgcaatcctatcctgaagtgtctacttatgcgagttaatattcgacacgtagcaatttagtcgaatcagaagagttccggtctatcagatgcgtttgtgtttcaagacgggccatatcctctaatcttgatatcgattttagaggtgatggtaccccatatgatgtcgcctaataacttaaaaattctaaaatcagtgttcgtcgaggtttcgatttgagtgaaaatttgcatccgaccaggagcgactttgatcctcagcttaacaatcctcagaattggtacgtcgctttgtcagataagtcttgttgtatttcctcggggtttccttgcatttgaaaacaagtatgcgccaacgcagagcatcccccgagttgaatgctaggtctttcctgtcaagcattcaatcttgcattatctcttacgtcgtcggaaggatcataaattcttaaactgctgcctggactatctgatcatcagataagatctcatactccatcttgccagctattattggactacgctgcggccgtaacggaatccgagcggaatacgtagaattcccgttgaaaaatccatcagatgagtcaaaggcgtagatccagggtctgacggtgtcgtaatcctccccggggtgaagttcggtcccattggcttaaaatcccgtgttcggccgacaactcggagatagtgagattcaggcactcccttaatataaggccacctcggagatcgagaattggtatttaagaagcgacaggatactccctgaccgtaagattattacgaaaatatcgtgcattagatccattgctcttcgactaggtccaagaactcaaacgtcaggcagcatacatcgtcatatttcgagccgtcggcaagctacagagtacaagagtacattagaagaaatgcctataaaacagtatactgttcacgagcttcgtcttctcctgggtctcgagctcgagcacacaggagactgcgaatactcccatcaacaccaagaatcatccatcttcacccccgaaaaccaacaagatgtctgctcagggattaactttcacggatcgcaactttcctcagactcaagtctggacaaatgtggattcgtatcaagcggagaggctacaccctcccacaaagcccaaccataaggctctactagacgcgcttcggaattcgcgcgcaaatggtatacctgagatcgaaacagcgccggccgtggcgaaaatgtacgctctgcaatgcaaagcgcgaggagtgaaacacgctcttgagtttggtaccctcggcgggtacacgtcgatttggattgcgacagaaaaccccggcatccaggtgacgacgatcgaatttgatgagcaccatgcgaataccgcgcaagcaaatcttgacaatgctggcgtggcggatagagtcacgattcgtcgtggggcgggcctggatgtgctgcctgttctgcaggaggagatcaaggctgggcaaaaaccgaagctgggattcgtatatatcgacgctgataaagtgaacaattggaactacctcgatcgggtaatcagctcctgtgagcagggtgcctacatttacgtcgacaatatcgtacgtggagggaagctcgtcgatgagacgaagcaggatgcgagtacgctaggagctcgacacgttgttgaaatggcaggcaaagatgatcgcattgatagtgttgtcatgcagttcgttggagagaaggggtatgatggtatgctgatggcgattgtcagatgagggcctgatcagaggggggttgtaggagaatgccggaccatcaagactcaagattcaaattcaataatacccttcgattgttttcgaacctttgatattctgtagggcgattctgggaaacgttaaggataaccttgagttagtatgggcgctataccgaactgccgatcttgttgagatcactaagtggtattgtatccgagattagggcacgagtagactctggtggcacaatgatagcatcatgctgcggctgataaaccagcggtcgggctagcatttttggccatgatgtgttttcgagatcatcccgctcacgtctagcttgaggcggctttctgcgcaataaacaaatccaagcttggcgaactgcttttggcaccgcgggcgcacagaaaacgaggagcacag

SEQ ID NO: 28058 - DNA, 1329 bp, Muscodor strobelii
  misc_feature: SGI cDNA ID NO. 569622
  misc_feature: Encodes the peptide sequence at SEQ ID NO 28059
atggaggaggatcgcgctcagacagatctgggcattgccgcagacattgaagaggcacatgccccgcccccaccaacaacagcagtgaagcaacccaagaaaagatttgtaggacgacgaactgcgaccaaaaatggaggagcagaacagaatggtagtgaaactggactggtacagacctcacagtcgcgaagaccggcgagattaataaaccaggtgccacctgagatcttggagaatccagagctgaaagaggcgatcgcattattgccggccaactattcgtttgagattccaaaaaccattcatcgcattcggtcttctggtgcgaagaaggtggcattacaaatgcccgaaggacttctgttgtttgctacaacgatatccgatatcctcacacagttctgccctggtgtcgagactctgattatgggcgatgtcacgtacggagcttgttgtatcgatgactacaccgcacgagctttgggatgcgatcttttggttcactatgcgcacagttgtttgatacctgtcgacgtgaccaaaatcaaagttttatatgtcttcgttgatataagcatcgacacagcgcatctactcgcaacaatggaacgcaactttgcatcgccgaagaccatcgctatggtaggaaccatacagttcaacgcgacgatacatggcgttcgggctgcgctagagaaggcagggttcaaagtgctgataccacaaatcgcaccgctatcgaaaggtgaaatcttaggatgcacctcaccgaaactgcctgactcggaagacgtggatattatcctatacctaggtgacggccgcttccacctcgaaagtattatgatacataatcccaaaatacccgcctacagatacgatccatactctaggaaactcacccgagagacgtacggccacgtggagatgcagaccctacgaagagacgctatcacaacggcgaagacggccaagaaatggggcctgattcttggctcgcttggtcgtcagggaaatccggcaacgatgtcgctcattgaaaataaattgaaggcgatgggcataccctgggttaatctccttttaagtgagatattccctggaaagcttgcaatgatgagtgatgtagagtgctgggtgcaggtcgcttgcccgagactgagtattgattggggatatgcatttcctcggccattattgactccatacgaggctcttgttgcactcaatgagaggcaagattggagcgaagctggggtgtacccgatggactattatgcaagagagggactgggaagaaccagaaatattcaggttccaacttga

SEQ ID NO: 28059 - protein, 442 aa, Muscodor strobelii
  misc_feature: SGI Peptide ID NO. 569622
  misc_feature (117)..(427): Pfam Id: PF01866 Pfam Desc: diphthamide synthesis protein
  misc_feature (1)..(440): NCBI GI: 261356726 Blast Desc: diphthamide biosynthesis protein [Verticillium albo-atrum VaMs.102]
  misc_feature (1)..(442): NCBI GI: 46107506 Blast Desc: FG00636.1 [Gibberella zeae PH-1] gi|84028906|sp|Q4IQ72.1|DPH1_GIBZE RecName: Full=Diphthamide biosynthesis protein 1
  misc_feature (1)..(440): NCBI GI: 171689250 Blast Desc: protein product [Podospora anserina] gi|170944587|emb|CAP70698.1| protein product [Podospora anserina]
  misc_feature (1)..(440): NCBI GI: 256734661 Blast Desc: [Nectria haematococca mpVI 77-13-4]
  misc_feature (1)..(436): NCBI GI: 85110382 Blast Desc: diphthamide biosynthesis protein 1 [Neurospora crassa OR74A] gi|74617621|sp|Q7SC98.1|DPH1_NEUCR RecName: Full=Diphthamide biosynthesis protein 1 diphthamide biosynthesis
  misc_feature (1)..(438): NCBI GI: 156043305 Blast Desc: conserved [Sclerotinia sclerotiorum 1980] gi|154695043|gb|EDN94781.1| conserved [Sclerotinia sclerotiorum 1980]
  misc_feature (1)..(436): NCBI GI: 145608282 Blast Desc: conserved [Magnaporthe grisea 70-15] gi|145015770|gb|EDK00260.1| conserved [Magnaporthe grisea 70-15]
  misc_feature (24)..(436): NCBI GI: 115384002 Blast Desc: diphthamide biosynthesis protein 1 [Aspergillus terreus NIH2624] gi|114196240|gb|EAU37940.1| diphthamide biosynthesis protein 1 [Aspergillus terreus NIH2624]
  misc_feature (24)..(439): NCBI GI: 169774771 Blast Desc: [Aspergillus oryzae RIB40] gi|238496629|ref|XP_002379550.1| diphthamide biosynthesis protein, [Aspergillus flavus NRRL3357] protein product oryzae]
  misc_feature (26)..(439): NCBI GI: 119481341 Blast Desc: diphthamide biosynthesis protein, [Neosartorya fischeri NRRL 181] gi|119408853|gb|EAW18802.1| diphthamide biosynthesis protein, [Neosartorya fischeri NRRL 181]
MEEDRAQTDLGIAADIEEAHAPPPPTTAVKQPKKRFVGRRTATKNGGAEQNGSETGLVQTSQSRRPARLINQVPPEILENPELKEAIALLPANYSFEIPKTIHRIRSSGAKKVALQMPEGLLLFATTISDILTQFCPGVETLIMGDVTYGACCIDDYTARALGCDLLVHYAHSCLIPVDVTKIKVLYVFVDISIDTAHLLATMERNFASPKTIAMVGTIQFNATIHGVRAALEKAGFKVLIPQIAPLSKGEILGCTSPKLPDSEDVDIILYLGDGRFHLESIMIHNPKIPAYRYDPYSRKLTRETYGHVEMQTLRRDAITTAKTAKKWGLILGSLGRQGNPATMSLIENKLKAMGIPWVNLLLSEIFPGKLAMMSDVECWVQVACPRLSIDWGYAFPRPLLTPYEALVALNERQDWSEAGVYPMDYYAREGLGRTRNIQVPT

SEQ ID NO: 28060 - DNA, 1561 bp, Muscodor strobelii
  misc_feature: SGI EST ID NO. CUFF.66129.0
  misc_feature: Variant of the nucleotide sequence at SEQ ID NO 28058
atcacattcattctcacttgactcgttgaacttaccacatccctctttctgagacctttgttccattcggtctctgaaagggcaatcaggttctcaaggagagatggaggaggatcgcgctcagacagatctgggcattgccgcagacattgaagaggcacatgccccgcccccaccaacaacagcagtgaagcaacccaagaaaagatttgtaggacgacgaactgcgaccaaaaatggaggagcagaacagaatggtagtgaaactggactggtacagacctcacagtcgcgaagaccggcgagattaataaaccaggtgccacctgagatcttggagaatccagagctgaaagaggcgatcgcattattgccggccaactattcgtttgagattccaaaaaccattcatcgcattcggtcttctggtgcgaagaaggtggcattacaaatgcccgaaggacttctgttgtttgctacaacgatatccgatatcctcacacagttctgccctggtgtcgagactctgattatgggcgatgtcacgtacggagcttgttgtatcgatgactacaccgcacgagctttgggatgcgatcttttggttcactatgcgcacagttgtttgatacctgtcgacgtgaccaaaatcaaagttttatatgtcttcgttgatataagcatcgacacagcgcatctactcgcaacaatggaacgcaactttgcatcgccgaagaccatcgctatggtaggaaccatacagttcaacgcgacgatacatggcgttcgggctgcgctagagaaggcagggttcaaagtgctgataccacaaatcgcaccgctatcgaaaggtgaaatcttaggatgcacctcaccgaaactgcctgactcggaagacgtggatattatcctatacctaggtgacggccgcttccacctcgaaagtattatgatacataatcccaaaatacccgcctacagatacgatccatactctaggaaactcacccgagagacgtacggccacgtggagatgcagaccctacgaagagacgctatcacaacggcgaagacggccaagaaatggggcctgattcttggctcgcttggtcgtcagggaaatccggcaacgatgtcgctcattgaaaataaattgaaggcgatgggcataccctgggttaatctccttttaagtgagatattccctggaaagcttgcaatgatgagtgatgtagagtgctgggtgcaggtcgcttgcccgagactgagtattgattggggatatgcatttcctcggccattattgactccatacgaggctcttgttgcactcaatgagaggcaagattggagcgaagctggggtgtacccgatggactattatgcaagagagggactgggaagaaccagaaatattcaggttccaacttgaatcaatcaaatttagtccaaatcggcattttgctgataactatgtgtttctgctcatgatacgttgcttgtgactatgttgatgaggaagctcgcgcacgttgtcacgtatatattcggcttgggtaag

SEQ ID NO: 28061 - DNA, 417 bp, Muscodor strobelii
  misc_feature: SGI cDNA ID NO. 569623
  misc_feature: Encodes the peptide sequence at SEQ ID NO 28062
atgtgcacctgcaacgcctacacctacgcttcctgccccaggggccactgcaaattcgagcccgtttccacctgcttgtccgcacgtctcggccttgccgagaaatgtcaagagcgtatcgtaaacggcaaagagggcgagcttcgcggttggccggtcatcgacgacatctgcccttattgctttcctgagaaggctgccgaacaagaaaagctcaagaaagaagaagctgcacaaaagaagaaagacgaggctgcgcagaagaagaaaggtggccatcaacctaagacaggtaatgtcgactcttttgctaatatcatgggagagttcttcacggtttcccctattcactcgttaacgaatttgcagccttcagattctggaacataccatgagtatggtgttcgcatcgtctaa

SEQ ID NO: 28062 - protein, 138 aa, Muscodor strobelii
  misc_feature: SGI Peptide ID NO. 569623
MCTCNAYTYASCPRGHCKFEPVSTCLSARLGLAEKCQERIVNGKEGELRGWPVIDDICPYCFPEKAAEQEKLKKEEAAQKKKDEAAQKKKGGHQPKTGNVDSFANIMGEFFTVSPIHSLTNLQPSDSGTYHEYGVRIV

SEQ ID NO: 28063 - DNA, 1116 bp, Muscodor strobelii
  misc_feature: SGI cDNA ID NO. 569624
  misc_feature: Encodes the peptide sequence at SEQ ID NO 28064
atggcgtcgctgcgccctattattcgtctagctcgcccgcgtcctaccttcgcgcgagctgcttgccgccggcgatatgcgacagcttccgacatcagagaacagccccgacaagacagtaatgtccgcattgtcgaggttggccccagagatggcctgcaaaatgagaagaaggcgatccctctagctaccaaaatcgaattgatcgaaagactagcaaagaccggtgtttctgttatcgaggccggttcctttgtctctccaaaatgggtaccccagatggataactccagcaaaataatggagcacatcctcacccaagatctgccctcgacaattcccatcacatattctttcctcgcgcccaacgctaaaggcgtcgaaaacgctacaagcatattacaacaacaccagggcgcattcttaacccaagtggactccttacgaggtataagcaacaagccggccatggagctggctgtattcgctgccgccacagagagcttctccaagaagaacctcaactgcgacatcgccacatcactcgagagattcagagacgttattcaaggcgcaaagcaattgggcatccgtgcccgagcttatatatcagtcgtattaggttgccccttcgagggctacgacgtcgacccgcacaaagtcgccgagatcgccacttcgctgctagagatgggggctgatgagatctccctgggcgacacaaccggcatgggcacggcaccacgtactcaggagctcctgagatgtatgacggctgctggaatccgaaatgaggatatcgccatgcatttccacgatacatatggccaggctctcgtcaacacggccatttcactcgagcggggcatcaggacgttcgatagttcagttggtggcctaggagggtgtccttatagccctggtgccactggaaacgtcgccacggagaacatggtctatttcctggagagtcttggcatgaacacggggattgaccttgatgctatgactgatattggacaatggatcacgggcgagcttgagaagccgaatgactcttcggttggtaaagcagttcttggcgcaaggaagacaaatgtcagcgcttctacgtag

SEQ ID NO: 28064 - protein, 371 aa, Muscodor strobelii
  misc_feature: SGI Peptide ID NO. 569624
  misc_feature (50)..(349): Pfam Id: PF00682 Pfam Desc: HMGL-like
  misc_feature (161)..(349): Pfam Id: PF00682 Pfam Desc: HMGL-like
  misc_feature (50)..(94): Pfam Id: PF00682 Pfam Desc: HMGL-like
  misc_feature (39)..(363): NCBI GI: 261353027 Blast Desc: hydroxymethylglutaryl-CoA lyase [Verticillium albo-atrum VaMs.102]
  misc_feature (21)..(361): NCBI GI: 256734659 Blast Desc: [Nectria haematococca mpVI 77-13-4]
  misc_feature (18)..(364): NCBI GI: 85074619 Blast Desc: hydroxymethylglutaryl-CoA lyase [Neurospora crassa OR74A] gi|9367485|emb|CAB97474.1| related to hydroxymethylglutaryl-CoA lyase [Neurospora crassa] lyase crassa
  misc_feature (1)..(363): NCBI GI: 39957543 Blast Desc: MGG_09181 [Magnaporthe grisea 70-15] gi|145013384|gb|EDJ98025.1| MGG_09181 [Magnaporthe grisea 70-15]
  misc_feature (21)..(363): NCBI GI: 46107510 Blast Desc: FG00638.1 [Gibberella zeae PH-1]
  misc_feature (9)..(363): NCBI GI: 156043355 Blast Desc: SS1G_10681 [Sclerotinia sclerotiorum 1980] gi|154695068|gb|EDN94806.1| SS1G_10681 [Sclerotinia sclerotiorum 1980]
  misc_feature (34)..(363): NCBI GI: 154316600 Blast Desc: BC1G_04231 [Botryotinia fuckeliana B05.10] gi|150846031|gb|EDN21224.1| BC1G_04231 [Botryotinia fuckeliana B05.10]
  misc_feature (24)..(364): NCBI GI: 171689644 Blast Desc: protein product [Podospora anserina] gi|170944784|emb|CAP70895.1| protein product [Podospora anserina]
  misc_feature (18)..(360): NCBI GI: 189200072 Blast Desc: hydroxymethylglutaryl-CoA lyase [Pyrenophora tritici-repentis Pt-1C-BFP] gi|187983472|gb|EDU48960.1| hydroxymethylglutaryl-CoA lyase [Pyrenophora tritici-repentis
  misc_feature (1)..(365): NCBI GI: 119190323 Blast Desc: CIMG_05209 [Coccidioides immitis RS]
  misc_feature (30)..(358): SWISSPROT Homolog: EC 4.1.3.4 Hydroxymethylglutaryl-CoA lyase
MASLRPIIRLARPRPTFARAACRRRYATASDIREQPRQDSNVRIVEVGPRDGLQNEKKAIPLATKIELIERLAKTGVSVIEAGSFVSPKWVPQMDNSSKIMEHILTQDLPSTIPITYSFLAPNAKGVENATSILQQHQGAFLTQVDSLRGISNKPAMELAVFAAATESFSKKNLNCDIATSLERFRDVIQGAKQLGIRARAYISVVLGCPFEGYDVDPHKVAEIATSLLEMGADEISLGDTTGMGTAPRTQELLRCMTAAGIRNEDIAMHFHDTYGQALVNTAISLERGIRTFDSSVGGLGGCPYSPGATGNVATENMVYFLESLGMNTGIDLDAMTDIGQWITGELEKPNDSSVGKAVLGARKTNVSAST

SEQ ID NO: 28065 - DNA, 1627 bp, Muscodor strobelii
  misc_feature: SGI EST ID NO. CUFF.66159.0
  misc_feature: Variant of the nucleotide sequence at SEQ ID NO 28063
cctgctcttaccatctaaatcatttgacacccaacgcactagagcaagaggatatattcgacacgtctaaacgacaaaagatatcaacgatgctcgtcatctgaaatcatggttacgtggatataagctactagagaagcggctaccaaatattcgaatttatccgtctcggagcttgagcagctgtattgcacgagcatacctcttgtaccccagtgagagaaagaatgagctagctggtatagtgatataaactgtttagcgtatcatgcatgcacttagtcaagcacactcagttgacgatgacttcattccccggccagctttgggtccagagcttaagccgctaatgcccgcccgttggtagcttcaactctgtcaattgaccaacgacgaagctatatcgaccaagagcctctcgcagcgtcttgcattctgacttcacagatgagataaattcaacatggcgtcgctgcgccctattattcgtctagctcgcccgcgtcctaccttcgcgcgagctgcttgccgccggcgatatgcgacagcttccgacatcagagaacagccccgacaagacagtaatgtccgcattgtcgaggttggccccagagatggcctgcaaaatgagaagaaggcgatccctctagctaccaaaatcgaattgatcgaaagactagcaaagaccggtgtttctgttatcgaggccggttcctttgtctctccaaaatgggtaccccagatggataactccagcaaaataatggagcacatcctcacccaagatctgccctcgacaattcccatcacatattctttcctcgcgcccaacgctaaaggcgtcgaaaacgctacaagcatattacaacaacaccagggcgcattcttaacccaagtggactccttacgaggtataagcaacaagccggccatggagctggctgtattcgctgccgccacagagagcttctccaagaagaacctcaactgcgacatcgccacatcactcgagagattcagagacgttattcaaggcgcaaagcaattgggcatccgtgcccgagcttatatatcagtcgtattaggttgccccttcgagggctacgacgtcgacccgcacaaagtcgccgagatcgccacttcgctgctagagatgggggctgatgagatctccctgggcgacacaaccggcatgggcacggcaccacgtactcaggagctcctgagatgtatgacggctgctggaatccgaaatgaggatatcgccatgcatttccacgatacatatggccaggctctcgtcaacacggccatttcactcgagcggggcatcaggacgttcgatagttcagttggtggcctaggagggtgtccttatagccctggtgccactggaaacgtcgccacggagaacatggtctatttcctggagagtcttggcatgaacacggggattgaccttgatgctatgactgatattggacaatggatcacgggcgagcttgagaagccgaatgactcttcggttggtaaagcagttcttggcgcaaggaagacaaatgtcagcgcttctacgtagctctgcggaccaattgcaataaaaacaagaaacaaaaatcgcacaaaa

SEQ ID NO: 28066 - DNA, 1542 bp, Muscodor strobelii
  misc_feature: SGI cDNA ID NO. 569625
  misc_feature: Encodes the peptide sequence at SEQ ID NO 28067
atggatccccgcgagtcttcctcgtactcggtggtaccgaggattcggtacaacaccgtcggtggtgtcaacggccctctagtcatcctcgagaacgtcaagttccccagatacaacgagatcgtccagctgacgctccccgacggaactgagagacagggccaggtcctcgaagctcgaggcgaccgagccgtcgtacaagtcttcgagggaacttcaggtatcgatgtcaagaaaaccaaggtcgagttcaccggcgagagcttgaagctcggtgtgtcggaggacatgcttggccgtatcttcgacggttcgggcagagctatcgacaagggacccaaagtcttggctgaagagtatctcgacatcaacggcagtcccatcaacccttactccagagtctaccccgaagaaatgatctcgaccggtatttcgaccatcgataccatgaactcgatcgctcgtggacagaagattcccatcttctctgctgctggtttaccgcataatgagattgctgctcagatttgtagacaagctggcctggtcaagcaaaaaggcgcaaccaacaagggtgtacacgacgaccacgaggaaaacttctccatcgtcttcgccgccatgggtgtcaacttggaaaccgccagattcttcactcgtgatttcgaggagaacggcagtttggagcgtgtcactctcttcctcaacttggctaacgatcctactattgaacgtattattactcctcgccttgccttgaccaccgccgaatactacgcctaccaactcgagaagcatgtcctcgttattcttaccgatcttacagcctattgcgatgccctccgtgaagtgtcagctgcccgtgaagaagtgcccggtcgacgtggttaccccggttacatgtacacggatttgtccaccatttacgagcgagccggtcgtgttgagggccgaaatggttctatcacccagatccctattcttaccatgcctaacgacgatatcactcaccctattcccgatttgacgggctacattaccgagggccagattttcgtcgatcgtcaacttgacaaccgtggtatctacccacccatcaatgtcctgccttcgctctcgcgtttgatgaagtccgccattggtgaaggcatgacgagaaaggatcacggtgatgcgtctaaccagctctatgccaaatacgccatcggtcgtgatgcggccgccatgaaggctgtcgtcggcgaggaggctttgtcggccgaggataaattgtctctggaattcttagaaaagttcgagcggcagttcgtggcccaaggtgcgtacgagtctcgatccatcttcgactcgttggatatcgcctggagcttgttgcgtatctatcccaaggagttgctcaaccgcatcccggccaagatcattcaagagtactatcaccgctccgctgccgatcgcaagggcaaaggcaaggagaagaacgacaagggcgtgcgcgacacagaggatcagccccaggaggaggagaaccttgttgacgtataa

SEQ ID NO: 28067 - protein, 513 aa, Muscodor strobelii
  misc_feature: SGI Peptide ID NO. 569625
  misc_feature (13)..(84): Pfam Id: PF09378 Pfam Desc: HAS barrel domain
  misc_feature (142)..(373): Pfam Id: PF00006 Pfam Desc: ATP synthase alpha/beta family, nucleotide-binding domain
  misc_feature (390)..(493): Pfam Id: PF00306 Pfam Desc: ATP synthase alpha/beta chain, C terminal domain
  misc_feature (20)..(86): Pfam Id: PF02874 Pfam Desc: ATP synthase alpha/beta family, beta-barrel domain
  misc_feature (2)..(512): NCBI GI: 46107508 Blast Desc: VATB_NEUCR Vacuolar ATP synthase subunit B (V-ATPase B subunit) (Vacuolar proton pump B subunit) (V-ATPase 57 kDa subunit) [Gibberella zeae PH-1]
  misc_feature (2)..(512): NCBI GI: 256734660 Blast Desc: [Nectria haematococca mpVI 77-13-4]
  misc_feature (2)..(512): NCBI GI: 156043357 Blast Desc: SS1G_10682 [Sclerotinia sclerotiorum 1980] gi|154695069|gb|EDN94807.1| SS1G_10682 [Sclerotinia sclerotiorum 1980]
  misc_feature (2)..(512): NCBI GI: 154316602 Blast Desc: vacuolar ATP synthase subunit B [Botryotinia fuckeliana B05.10] gi|150846032|gb|EDN21225.1| vacuolar ATP synthase subunit B [Botryotinia fuckeliana B05.10]
  misc_feature (2)..(512): NCBI GI: 85109951 Blast Desc: vacuolar ATP synthase subunit B [Neurospora crassa OR74A] gi|137468|sp|P11593.1|VATB_NEUCR RecName: Full=V-type proton ATPase subunit B; Short=V-ATPase subunit B; AltName: pump
  misc_feature (2)..(512): NCBI GI: 171689236 Blast Desc: protein product [Podospora anserina] gi|170944580|emb|CAP70691.1| protein product [Podospora anserina]
  misc_feature (2)..(512): NCBI GI: 39942328 Blast Desc: vacuolar ATP synthase subunit B [Magnaporthe grisea 70-15] gi|145015760|gb|EDK00250.1| vacuolar ATP synthase subunit B [Magnaporthe grisea 70-15]
  misc_feature (1)..(513): NCBI GI: 189200180 Blast Desc: vacuolar ATP synthase subunit B [Pyrenophora tritici-repentis Pt-1C-BFP] gi|187983526|gb|EDU49014.1| vacuolar ATP synthase subunit B [Pyrenophora tritici-repentis Pt-1C-BFP]
  misc_feature (2)..(511): NCBI GI: 212533835 Blast Desc: V-type ATPase, B subunit, [Penicillium marneffei ATCC 18224] gi|210072438|gb|EEA26527.1| V-type ATPase, B subunit, [Penicillium marneffei ATCC 18224]
  misc_feature (2)..(513): NCBI GI: 240278215 Blast Desc: vacuolar ATP synthase subunit B [Ajellomyces capsulatus H143]
  misc_feature (1)..(382): SWISSPROT Homolog: EC 3.6.3.14 H(+)-transporting two-sector ATPase
MDPRESSSYSVVPRIRYNTVGGVNGPLVILENVKFPRYNEIVQLTLPDGTERQGQVLEARGDRAVVQVFEGTSGIDVKKTKVEFTGESLKLGVSEDMLGRIFDGSGRAIDKGPKVLAEEYLDINGSPINPYSRVYPEEMISTGISTIDTMNSIARGQKIPIFSAAGLPHNEIAAQICRQAGLVKQKGATNKGVHDDHEENFSIVFAAMGVNLETARFFTRDFEENGSLERVTLFLNLANDPTIERIITPRLALTTAEYYAYQLEKHVLVILTDLTAYCDALREVSAAREEVPGRRGYPGYMYTDLSTIYERAGRVEGRNGSITQIPILTMPNDDITHPIPDLTGYITEGQIFVDRQLDNRGIYPPINVLPSLSRLMKSAIGEGMTRKDHGDASNQLYAKYAIGRDAAAMKAVVGEEALSAEDKLSLEFLEKFERQFVAQGAYESRSIFDSLDIAWSLLRIYPKELLNRIPAKIIQEYYHRSAADRKGKGKEKNDKGVRDTEDQPQEEENLVDV

SEQ ID NO: 28068 - DNA, 2120 bp, Muscodor strobelii
  misc_feature: SGI EST ID NO. CUFF.66626.0
  misc_feature: Variant of the nucleotide sequence at SEQ ID NO 28066
ctgctacccatctggagctccccatctgcagtctaacgtcaatacctcagtggctggagctaggttggtcactgtccgcaggtgacgattgcttcatacccacccccgtgcgacagcaaccattccaccctcaagctcccatcaactccatcccatccaaagggagctccgaagcctctcctctacaccccggacctcctgcctgtcgcccgcggccgacatcatggatccccgcgagtcttcctcgtactcggtggtaccgaggattcggtacaacaccgtcggtggtgtcaacggccctctagtcatcctcgagaacgtcaagttccccagatacaacgagatcgtccagctgacgctccccgacggaactgagagacagggccaggtcctcgaagctcgaggcgaccgagccgtcgtacaagtcttcgagggaacttcaggtatcgatgtcaagaaaaccaaggtcgagttcaccggcgagagcttgaagctcggtgtgtcggaggacatgcttggccgtatcttcgacggttcgggcagagctatcgacaagggacccaaagtcttggctgaagagtatctcgacatcaacggcagtcccatcaacccttactccagagtctaccccgaagaaatgatctcgaccggtatttcgaccatcgataccatgaactcgatcgctcgtggacagaagattcccatcttctctgctgctggtttaccgcataatgagattgctgctcagatttgtagacaagctggcctggtcaagcaaaaaggcgcaaccaacaagggtgtacacgacgaccacgaggaaaacttctccatcgtcttcgccgccatgggtgtcaacttggaaaccgccagattcttcactcgtgatttcgaggagaacggcagtttggagcgtgtcactctcttcctcaacttggctaacgatcctactattgaacgtattattactcctcgccttgccttgaccaccgccgaatactacgcctaccaactcgagaagcatgtcctcgttattcttaccgatcttacagcctattgcgatgccctccgtgaagtgtcagctgcccgtgaagaagtgcccggtcgacgtggttaccccggttacatgtacacggatttgtccaccatttacgagcgagccggtcgtgttgagggccgaaatggttctatcacccagatccctattcttaccatgcctaacgacgatatcactcaccctattcccgatttgacgggctacattaccgagggccagattttcgtcgatcgtcaacttgacaaccgtggtatctacccacccatcaatgtcctgccttcgctctcgcgtttgatgaagtccgccattggtgaaggcatgacgagaaaggatcacggtgatgcgtctaaccagctctatgccaaatacgccatcggtcgtgatgcggccgccatgaaggctgtcgtcggcgaggaggctttgtcggccgaggataaattgtctctggaattcttagaaaagttcgagcggcagttcgtggcccaaggtgcgtacgagtctcgatccatcttcgactcgttggatatcgcctggagcttgttgcgtatctatcccaaggagttgctcaaccgcatcccggccaagatcattcaagagtactatcaccgctccgctgccgatcgcaagggcaaaggcaaggagaagaacgacaagggcgtgcgcgacacagaggatcagccccaggaggaggagaaccttgttgacgtataattggaagcacgttctgtcggagttgtgtgtataggtttagtgaacagtcgtacatcgcaggagtatggggctgcactttttaacagcattcaatacagtttctatctcgaatccacaccatttttagttgttggcgatggcggctgtcccaagcatactagtccgagccaaagcatgtgtgatggagtcgcgaaataatcaaacctgaatacttaaagtaccattttcacaagcaccttctgcatcagtggaatcgtgctacgaagatagagatgctatgagattaaacgcttaaggtcaatgtttcttctatggttcaatttgtattaatggcagcgtgtttgacgtaacgaaa

SEQ ID NO: 28069 - DNA, 588 bp, Muscodor strobelii
  misc_feature: SGI cDNA ID NO. 569626
  misc_feature: Encodes the peptide sequence at SEQ ID NO 28070
atgcgtacagctagtttggcttcgttgggagctttgttgctcccaatcgtctcggcagactatactactggtcccgacaaggatgggctctattggattgagagcgaacacctctcggccggcttcattccctacggagcctccatctcgagacttctcatcaatgaccaatacggcatttctagagacatagttgctggatgggacaacgccagctactactcaattgatgctcagcaccctcactttggaggtgtccctggccgatacgccaaccgtatcaagaacagcacctttgagattgatggcgagacctaccacatcacaccgaatgagaacaagacacccgatgcgcctgaaggtgctgatacacttcatggtggtcctgacggttgggactggagaaacttcacagtcgtctcgcacagcaaagacagcatcaccttctcgatcgttgaccctgatggcaaggaaggtttccctggcgaggtcgtctcatacatcacctatacagtatcaggctggacatgggatctcaacatggtcgctatcccaacaaccaagaagaccccccattatgttgtctag

SEQ ID NO: 28070 - protein, 195 aa, Muscodor strobelii
  misc_feature: SGI Peptide ID NO. 569626
  misc_feature (29)..(191): Pfam Id: PF01263 Pfam Desc: Aldose 1-epimerase
  misc_feature (11)..(191): NCBI GI: 46109894 Blast Desc: FG01829.1 [Gibberella zeae PH-1]
  misc_feature (1)..(191): NCBI GI: 261356747 Blast Desc: aldose 1-epimerase [Verticillium albo-atrum VaMs.102]
  misc_feature (5)..(191): NCBI GI: 171689234 Blast Desc: protein product [Podospora anserina] gi|170944579|emb|CAP70690.1| protein product [Podospora anserina]
  misc_feature (19)..(191): NCBI GI: 156043359 Blast Desc: SS1G_10683 [Sclerotinia sclerotiorum 1980] gi|154695070|gb|EDN94808.1| SS1G_10683 [Sclerotinia sclerotiorum 1980]
  misc_feature (22)..(191): NCBI GI: 145608268 Blast Desc: MGG_03245 [Magnaporthe grisea 70-15] gi|145015759|gb|EDK00249.1| MGG_03245 [Magnaporthe grisea 70-15]
  misc_feature (9)..(191): NCBI GI: 85109953 Blast Desc: NCU08516 [Neurospora crassa OR74A] gi|28924831|gb|EAA33930.1| conserved [Neurospora crassa OR74A] gi|38524222|emb|CAE75689.1| related to aldose 1-epimerase crassa]
  misc_feature (1)..(191): NCBI GI: 116204569 Blast Desc: CHGG_10168 [Chaetomium globosum CBS 148.51] gi|88176296|gb|EAQ83764.1| CHGG_10168 [Chaetomium globosum CBS 148.51]
  misc_feature (1)..(191): NCBI GI: 189190906 Blast Desc: aldose 1-epimerase [Pyrenophora tritici-repentis Pt-1C-BFP] gi|187973398|gb|EDU40897.1| aldose 1-epimerase [Pyrenophora tritici-repentis Pt-1C-BFP]
  misc_feature (19)..(191): NCBI GI: 154316604 Blast Desc: BC1G_04233 [Botryotinia fuckeliana B05.10] gi|150846033|gb|EDN21226.1| BC1G_04233 [Botryotinia fuckeliana B05.10]
  misc_feature (7)..(191): NCBI GI: 169606580 Blast Desc: SNOG_06335 [Phaeosphaeria nodorum SN15] gi|111065046|gb|EAT86166.1| SNOG_06335 [Phaeosphaeria nodorum SN15]
  misc_feature (17)..(183): SWISSPROT Homolog: EC 5.1.3.3 Aldose 1-epimerase
MRTASLASLGALLLPIVSADYTTGPDKDGLYWIESEHLSAGFIPYGASISRLLINDQYGISRDIVAGWDNASYYSIDAQHPHFGGVPGRYANRIKNSTFEIDGETYHITPNENKTPDAPEGADTLHGGPDGWDWRNFTVVSHSKDSITFSIVDPDGKEGFPGEVVSYITYTVSGWTWDLNMVAIPTTKKTPHYVV

SEQ ID NO: 28071 - DNA, 1898 bp, Muscodor strobelii
  misc_feature: SGI EST ID NO. CUFF.66186.1
  misc_feature: Variant of the nucleotide sequence at SEQ ID NO 28069
gcggagtagcttgtttatcccagccttcgcccaggcacaattcatcctagctcatcaacagctcgcattgtgattcgacggcaacaagctcgatgaagtaagattatcaaattccccggatctcatgcttcttgatctgatccctcggcgcccgctactcaattgtcccgtgattcgcgtggtaccattattcaatggctctactgttcacgttttcctgcgggatctgcgtgacgctaccctcaatgcagcatgcattcaatggaccaggtttactacgtgaactttgtccataaagagccctgacgttcctcgaggctcaatcacgatttctcgtattgcccaaccttttccctcccctcacttacgtgacgctcagtttaccttcaagcgttccgctactaggaattggtccccaccaacacgtggtcatctccggaacatacattgaccattagcaagttgttgtcgccacaaagccaaaatgcgtacagctagtttggcttcgttgggagctttgttgctcccaatcgtctcggcagactatactactggtcccgacaaggatgggctctattggattgagagcgaacacctctcggccggcttcattccctacggagcctccatctcgagacttctcatcaatgaccaatacggcatttctagagacatagttgctggatgggacaacgccagctactactcaattgatgctcagcaccctcactttggaggtgtccctggccgatacgccaaccgtatcaagaacagcacctttgagattgatggcgagacctaccacatcacaccgaatgagaacaagacacccgatgcgcctgaaggtgctgatacacttcatggtggtcctgacggttgggactggagaaacttcacagtcgtctcgcacagcaaagacagcatcaccttctcgatcgttgaccctgatggcaaggaaggtttccctggcgaggtcgtctcatacatcacctatacagtatcaggctggacatgggatctcaacatggtcgctatcccaacaaccaagaagaccccccattatgttgtctagtcacacttactggaatctggacgggtttgccaacaacgagaccaacactgccctgaaccacaccttgttcatgccatactctggccagcgcgtcgatgctgacaacatcctcattccaactgggaacattctcgcaaaccaacgaggttcagtcaacgatttctggagcgagcccaagcagatcggcaaatccttctctgaccccgaggcctatggtaactgcggtttcaactgcacgggctacgacacttgctacatcttcaaccgggacgagcgtgccgcctatgagtggcgcaaggaagataactttgtcgcccgcctcgcgtccgagtggtccggcattcaagtcgatatctacaccgaccaagacgctttccaagtttactcatgcggtggccagaacggctctgtagcattgaagaagacacaaggtcttttcgacaacgccgatttccctcgtacgatccctcagtatggctgcatcgttatggaggttgaggactggattgacggcatcaaccagcccgagtggggacgcaagcagatcttcggacctggcgacgacccttatgttctgcaggctagctatgtcttctccatcaaccccacctcatcgtcttaggatgacgattgtggtaatctgagtggtaatgcgactagttcggcgacgtggagtcctacggctacgccgacgatggtaagccctgtgcctaccagtgcggctcaagccaagaattgcgccgctctgctggtcttgatgttgaccataatggctatgctatagtaattagaccttaatgagaataattgacaatcaataatgcgg

SEQ ID NO: 28072 - DNA, 552 bp, Muscodor strobelii
  misc_feature: SGI cDNA ID NO. 569627
  misc_feature: Encodes the peptide sequence at SEQ ID NO 28073
atgccatactctggccagcgcgtcgatgctgacaacatcctcattccaactgggaacattctcgcaaaccaacgaggttcagtcaacgatttctggagcgagcccaagcagatcggcaaatccttctctgaccccgaggcctatggtaactgcggtttcaactgcacgggctacgacacttgctacatcttcaaccgggacgagcgtgccgcctatgagtggcgcaaggaagataactttgtcgcccgcctcgcgtccgagtggtccggcattcaagtcgatatctacaccgaccaagacgctttccaagtttactcatgcggtggccagaacggctctgtagcattgaagaagacacaaggtcttttcgacaacgccgatttccctcgtacgatccctcagtatggctgcatcgttatggaggttgaggactggattgacggcatcaaccagcccgagtggggacgcaagcagatcttcggacctggcgacgacccttatgttctgcaggctagctatgtcttctccatcaaccccacctcatcgtcttag

SEQ ID NO: 28073 - protein, 183 aa, Muscodor strobelii
  misc_feature: SGI Peptide ID NO. 569627
  misc_feature (1)..(180): NCBI GI: 156043359 Blast Desc: SS1G_10683 [Sclerotinia sclerotiorum 1980] gi|154695070|gb|EDN94808.1| SS1G_10683 [Sclerotinia sclerotiorum 1980]
  misc_feature (1)..(180): NCBI GI: 154316604 Blast Desc: BC1G_04233 [Botryotinia fuckeliana B05.10] gi|150846033|gb|EDN21226.1| BC1G_04233 [Botryotinia fuckeliana B05.10]
  misc_feature (1)..(177): NCBI GI: 145608268 Blast Desc: MGG_03245 [Magnaporthe grisea 70-15] gi|145015759|gb|EDK00249.1| MGG_03245 [Magnaporthe grisea 70-15]
  misc_feature (1)..(177): NCBI GI: 256722045 Blast Desc: [Nectria haematococca mpVI 77-13-4]
  misc_feature (1)..(177): NCBI GI: 46109894 Blast Desc: FG01829.1 [Gibberella zeae PH-1]
  misc_feature (1)..(177): NCBI GI: 116204569 Blast Desc: CHGG_10168 [Chaetomium globosum CBS 148.51] gi|88176296|gb|EAQ83764.1| CHGG_10168 [Chaetomium globosum CBS 148.51]
  misc_feature (1)..(178): NCBI GI: 261356747 Blast Desc: aldose 1-epimerase [Verticillium albo-atrum VaMs.102]
  misc_feature (1)..(176): NCBI GI: 189190906 Blast Desc: aldose 1-epimerase [Pyrenophora tritici-repentis Pt-1C-BFP] gi|187973398|gb|EDU40897.1| aldose 1-epimerase [Pyrenophora tritici-repentis Pt-1C-BFP]
  misc_feature (1)..(176): NCBI GI: 169606580 Blast Desc: SNOG_06335 [Phaeosphaeria nodorum SN15] gi|111065046|gb|EAT86166.1| SNOG_06335 [Phaeosphaeria nodorum SN15]
  misc_feature (1)..(178): NCBI GI: 171689234 Blast Desc: protein product [Podospora anserina] gi|170944579|emb|CAP70690.1| protein product [Podospora anserina]
  misc_feature (8)..(177): SWISSPROT Homolog: EC 5.1.3.3 Aldose 1-epimerase
MPYSGQRVDADNILIPTGNILANQRGSVNDFWSEPKQIGKSFSDPEAYGNCGFNCTGYDTCYIFNRDERAAYEWRKEDNFVARLASEWSGIQVDIYTDQDAFQVYSCGGQNGSVALKKTQGLFDNADFPRTIPQYGCIVMEVEDWIDGINQPEWGRKQIFGPGDDPYVLQASYVFSINPTSSS

SEQ ID NO: 28074 - DNA, 1898 bp, Muscodor strobelii; identical to SEQ ID NO: 28071
  misc_feature: SGI EST ID NO. CUFF.66186.1
  misc_feature: Variant of the nucleotide sequence at SEQ ID NO 28072

SEQ ID NO: 28075 - DNA, 1737 bp, Muscodor strobelii
  misc_feature: SGI cDNA ID NO. 569628
  misc_feature: Elevated expression when VOC is produced
  misc_feature: Encodes the peptide sequence at SEQ ID NO 28076
atggaattcaaaatgacgcaaaatgggacaaccaatggccatagcacaggccaaacgaatggcgcgacgaacggggacgcaacagtgaccgctagcccccctgacttcccacatgagtctaaacatgatggaagtttcattactaccatgaacggggctcccgtacaaagaccagcagcaagtcaacgcatcggtaatcagcttagagcaacattactattgcaagacatcaaccttctggagcttatccaacatgtcacacacgagcgtattcccgagcgactcgtgcacgcccgtgggttcaatgcgttcgggtatttcgaagtcaccgatgatatcacggagtacacaagcgccgcgttcctgaacaaagtgggcaagaggacgcctttgcttacacgattctcgaccgtcgccggtgagcgcggatcagccgagactgtccgagacacgcgaggatttgctttcaaaatgcgtaccgaggaaggtattctggactggctgttcctctcgacgcccgtctttccgattcgcgacggagccaagttcccatctttcacgcacgccacgaagcggaacccaaagagtgggctgccagaccacactatgttctgggactacttcaataataaccaggaggccattcactttttgatgttcttgttcagtgatagggcgacgcctgtggactttcaacatgctgattgcttcagtatcaacagctatcgcttcactaagccggatggcaagttcgtatacgtcaaaatccacgtgaagacaaaccaaggcgtaaagaacttcacggcggaagaggctcagaccgtagcgggccaagacccagaccatcaaacacggtcgctgttcaatgaactcgaagagaaggagggaactccatcatgggatgtctacgcgcagattatcgagcccgaaaaggcagcgaaatatcccatcaacatcttcgacgccacaaagactcttccattcgctgattttcccctcaagaagtttggcagaattgtactcgataagaatgtggataacttctttgctgagagcgaacagagcgctttcagccccacgaatctcgttccgggttgggcattgagtcctgatcctatccttcagaccagagctctcgcctatgccgatacgcaacgtcatcgtctgggaacgaacttcatccagcttccaattaataagccggcgcacagcttcaatccagtcaatcgcgacggcgccgctacgattaacaatctcggagcgacgccaaactacttcccttccagcttcttcaactatggcgtcgcccctcaggtggcgcagcctgatgaggagcattggctcggaaccgtcgtagatttccagtcgcaggtcgtccccgccgactacgaacaggcgcgcatcttctggcgtgagacgctggccggagagccgggtcagcaggagcatttcgtcagcaatgttgcggggcatttgagtcaagctgtcaggtctgtgcgagaagctacttatgccatgtttacaaaagtctcacctgatctaggcgagagaatcaatacagccacagaggctcaggtcgcaaagaagcagaagacgggcagtggcagcgtgacgacgaagttggagaacatgaagattggcgatatacatgccaagaagcagactgcccatgagcagaacgactttgcgcataacttcgatctgtttgcgcacaagcagtggaatttacatcattga

SEQ ID NO: 28076 - protein, 578 aa, Muscodor strobelii
  misc_feature: SGI Peptide ID NO. 569628
  misc_feature (48)..(434): Pfam Id: PF00199 Pfam Desc: Catalase
  misc_feature (2)..(546): NCBI GI: 156045730 Blast Desc: catalase [Sclerotinia sclerotiorum 1980] gi|154693537|gb|EDN93275.1| catalase [Sclerotinia sclerotiorum 1980]
  misc_feature (47)..(546): NCBI GI: 154321896 Blast Desc: BC1G_01095 [Botryotinia fuckeliana B05.10] gi|150850342|gb|EDN25535.1| BC1G_01095 [Botryotinia fuckeliana B05.10]
  misc_feature (47)..(493): NCBI GI: 1705621 Blast Desc: CATA_BOTFU RecName: Full=Catalase A gi|1017413|emb|CAA91159.1| catalase [Botryotinia fuckeliana]
  misc_feature (48)..(528): NCBI GI: 258575777 Blast Desc: catalase [Uncinocarpus reesii 1704] gi|237902336|gb|EEP76737.1| catalase [Uncinocarpus reesii 1704]
  misc_feature (48)..(541): NCBI GI: 156065073 Blast Desc: peroxisomal catalase [Sclerotinia sclerotiorum 1980] gi|154691406|gb|EDN91144.1| peroxisomal catalase [Sclerotinia sclerotiorum 1980]
  misc_feature (48)..(527): NCBI GI: 154272205 Blast Desc: catalase B [Ajellomyces capsulatus NAm1] gi|150408942|gb|EDN04398.1| catalase B [Ajellomyces capsulatus NAm1]
  misc_feature (48)..(541): NCBI GI: 154319975 Blast Desc: BC1G_01968 [Botryotinia fuckeliana B05.10] gi|150854707|gb|EDN29899.1| BC1G_01968 [Botryotinia fuckeliana B05.10]
  misc_feature (48)..(526): NCBI GI: 145231892 Blast Desc: An02g02750 [Aspergillus niger] gi|134056324|emb|CAK47559.1| protein product [Aspergillus niger]
  misc_feature (48)..(532): NCBI GI: 6014693 Blast Desc: AF189369_1 catalase isozyme P [Ajellomyces capsulatus] gi|23344117|gb|AAN28380.1| catalase isozyme P [Ajellomyces capsulatus]
  misc_feature (48)..(532): NCBI GI: 225556206 Blast Desc: catalase isozyme P [Ajellomyces capsulatus G186AR]
  misc_feature (47)..(493): SWISSPROT Homolog: EC 1.11.1.6 Catalase
  misc_feature: Useful for introducing or modulating the production of volatile compounds
MEFKMTQNGTTNGHSTGQTNGATNGDATVTASPPDFPHESKHDGSFITTMNGAPVQRPAASQRIGNQLRATLLLQDINLLELIQHVTHERIPERLVHARGFNAFGYFEVTDDITEYTSAAFLNKVGKRTPLLTRFSTVAGERGSAETVRDTRGFAFKMRTEEGILDWLFLSTPVFPIRDGAKFPSFTHATKRNPKSGLPDHTMFWDYFNNNQEAIHFLMFLFSDRATPVDFQHADCFSINSYRFTKPDGKFVYVKIHVKTNQGVKNFTAEEAQTVAGQDPDHQTRSLFNELEEKEGTPSWDVYAQIIEPEKAAKYPINIFDATKTLPFADFPLKKFGRIVLDKNVDNFFAESEQSAFSPTNLVPGWALSPDPILQTRALAYADTQRHRLGTNFIQLPINKPAHSFNPVNRDGAATINNLGATPNYFPSSFFNYGVAPQVAQPDEEHWLGTVVDFQSQVVPADYEQARIFWRETLAGEPGQQEHFVSNVAGHLSQAVRSVREATYAMFTKVSPDLGERINTATEAQVAKKQKTGSGSVTTKLENMKIGDIHAKKQTAHEQNDFAHNFDLFAHKQWNLHH

SEQ ID NO: 28077 - DNA, 1938 bp, Muscodor strobelii
  misc_feature: SGI EST ID NO. CUFF.66144.0
  misc_feature: Variant of the nucleotide sequence at SEQ ID NO 28075
ctcaacttaactactcatcgaatagtattagctatggaattcaaaatgacgcaaaatgggacaaccaatggccatagcacaggccaaacgaatggcgcgacgaacggggacgcaacagtgaccgctagcccccctgacttcccacatgagtctaaacatgatggaagtttcattactaccatgaacggggctcccgtacaaagaccagcagcaagtcaacgcatcggtaatcagcttagagcaacattactattgcaagacatcaaccttctggagcttatccaacatgtcacacacgagcgtattcccgagcgactcgtgcacgcccgtgggttcaatgcgttcgggtatttcgaagtcaccgatgatatcacggagtacacaagcgccgcgttcctgaacaaagtgggcaagaggacgcctttgcttacacgattctcgaccgtcgccggtgagcgcggatcagccgagactgtccgagacacgcgaggatttgctttcaaaatgcgtaccgaggaaggtattctggactggctgttcctctcgacgcccgtctttccgattcgcgacggagccaagttcccatctttcacgcacgccacgaagcggaacccaaagagtgggctgccagaccacactatgttctgggactacttcaataataaccaggaggccattcactttttgatgttcttgttcagtgatagggcgacgcctgtggactttcaacatgctgattgcttcagtatcaacagctatcgcttcactaagccggatggcaagttcgtatacgtcaaaatccacgtgaagacaaaccaaggcgtaaagaacttcacggcggaagaggctcagaccgtagcgggccaagacccagaccatcaaacacggtcgctgttcaatgaactcgaagagaaggagggaactccatcatgggatgtctacgcgcagattatcgagcccgaaaaggcagcgaaatatcccatcaacatcttcgacgccacaaagactcttccattcgctgattttcccctcaagaagtttggcagaattgtactcgataagaatgtggataacttctttgctgagagcgaacagagcgctttcagccccacgaatctcgttccgggttgggcattgagtcctgatcctatccttcagaccagagctctcgcctatgccgatacgcaacgtcatcgtctgggaacgaacttcatccagcttccaattaataagccggcgcacagcttcaatccagtcaatcgcgacggcgccgctacgattaacaatctcggagcgacgccaaactacttcccttccagcttcttcaactatggcgtcgcccctcaggtggcgcagcctgatgaggagcattggctcggaaccgtcgtagatttccagtcgcaggtcgtccccgccgactacgaacaggcgcgcatcttctggcgtgagacgctggccggagagccgggtcagcaggagcatttcgtcagcaatgttgcggggcatttgagtcaagctgtcaggtctgtgcgagaagctacttatgccatgtttacaaaagtctcacctgatctaggcgagagaatcaatacagccacagaggctcaggtcgcaaagaagcagaagacgggcagtggcagcgtgacgacgaagttggagaacatgaagattggcgatatacatgccaagaagcagactgcccatgagcagaacgactttgcgcataacttcgatctgtttgcgcacaagcagtggaatttacatcattgaaaaaggtggttaataggtatttgtagttagatgcaacgatagcgagtatcattgtcttggcaagtcccagttgtgacttataggatagtcttacggagttgagattggtgatcgtggaagcttacgggtgtgctgtagatgctcatgtgagaagggtaacaatggaac

SEQ ID NO: 28078 - DNA, 2130 bp, Muscodor strobelii
  misc_feature: SGI cDNA ID NO. 569629
  misc_feature: Encodes the peptide sequence at SEQ ID NO 28079
atggcggtgcagtccaaactcgtattgcccgaccggtctcttaagagcatcgtagcccaattgaccgacctatatctcgcaaaccgcacccgcatctctcgcgccgtctacctaactcttctcctcgccctcgtgaaccgcatccgcaatgccatctccgaacagaaagccgcgtccgcccgcgaggcagccaagagacactctggaacgacatccagcgatacgcccgacagtgcgagcaagaagaaagtagagctgaaccgggaattcttccgctctttattacggctgctaaagatcgtcatcccgagcgctagcagccatgagtccagattgctcatgagccatagcttcttccttgtgatacgcacgctcatcagcttaaaggtcgccgagatggatggtgcgattgtgaaggcactggtcaagggcagtgggaaggagttcctgacgaggatcgtctggtggatgttgattgctgtgcctgcgacttttacaaattccatgttgtcataccatcaagccgagctctcgctcaaataccggacacgactcactcagtacatacacgacaaatacttgtcgcaactcacgttctacggcatatctgcgctcgacgacagaataaagaacccagaccagctgatcgctgttgacgtagccaagttctcgaatagcttggctgaactatacagcaatttggccaagccgatattagatatgacaatctacacctggtcactctcaaagagtgtcggtggcgaaggtgtcgttttcatggccttgttggtccagctatcagccgccgtcatgcgtgccctcactccgcccttcggcaaatatgttgccgacgaggcacgactagaaggcgaatttcgatttcagcattcgcgacttatcgaccatagcgaagaggtcgcgctctaccacggccatgaggcggaaaaggataccctcgataaagggtattttacactcatcaaacacgtgaattacatattacgtcgacgattctaccacggcgtcatggaggatttcgtcataaaatacttctggggtgctctgggtctcatgctttgcagtgtgcccgtattcttcaagcttcctggtcagctcagcgacgttgtcagtatgggtgacaggacagagagcttcgtcacgaatcgtcgtatgctgcttagtgcttcggatgcgttcggtcgtgttatgttctcctaccgtgaggttatggagctagctggctacacgtctcgtgttgcttcgctactggaggttatggatgatatacaagcgggccatttcgaaaagaaactcgtttcgagctcgggcaccgaggaacatgaggctgtgttgaagggccgcggcaaagtggtggagagtaaggatattgagtttatcaatgtgcctatcatctctccgaatggcgatgtgctggtgaaggcactatcgttttcgctaaaacagggagatcatttactggttgtgggtccgaatggatgcggaaagtcgagtcttttccgcatccttggtggactttggcctgtatacggtgggacagtatataaaccgccgttcaccgatatcttctacattcctcaacggccatacctatcgagaggaagcctgcgacagcaaatcacttacccagatagtctgcgcacggtccgctcgcggggtgtgacggatgcagagctactcgatattctgaaaactctgtcattggagcatctagttgatctctatcccgagggctgggacgccgaggcagagtggcgcgatgtgctatctggtggtctacaacagcgcgtcgctatggctcggttattctaccacaagccgaggtacgcgattttggacgagtgcacgagtagtgtcacgctagagacggagaaggttatgtacgataatgcaaaagcgctgggcattacattgatgacggtgtctcatcgcaggagtttgtggaaataccatagcaggattctgcagtttgatgggcaggggaactttgtgtttaccgcgctggatgcagagaagagattaaggctggaggacgagaaggaggatttggaggtcaagcttagacaggttcctgagattgagaggaggattggggagttgagcgctgcatga

SEQ ID NO: 28079 - protein, 709 aa, Muscodor strobelii
  misc_feature: SGI Peptide ID NO. 569629
  misc_feature (84)..(365): Pfam Id: PF06472 Pfam Desc: ABC transporter transmembrane region 2
  misc_feature (489)..(666): Pfam Id: PF00005 Pfam Desc: ABC transporter
  misc_feature (1)..(708): NCBI GI: 164660660 Blast Desc: MGL_1636 [Malassezia globosa CBS 7966] gi|159105353|gb|EDP44239.1| MGL_1636 [Malassezia globosa CBS 7966]
  misc_feature (13)..(696): NCBI GI: 170085435 Blast Desc: [Laccaria bicolor S238N-H82] gi|164651493|gb|EDR15733.1| [Laccaria bicolor S238N-H82]
  misc_feature (83)..(708): NCBI GI: 169844603 Blast Desc: CC1G_01702 [Coprinopsis cinerea okayama7#130] gi|116509762|gb|EAU92657.1| CC1G_01702 [Coprinopsis cinerea okayama7#130]
  misc_feature (5)..(708): NCBI GI: 85083734 Blast Desc: NCU01751 [Neurospora crassa OR74A] gi|16416093|emb|CAB91246.2| related to adrenoleukodystrophy protein [Neurospora crassa] gi|28918261|gb|EAA27938.1| NCU01751
  misc_feature (11)..(707): NCBI GI: 171689226 Blast Desc: protein product [Podospora anserina] gi|170944575|emb|CAP70686.1| protein product [Podospora anserina]
  misc_feature (1)..(709): NCBI GI: 256732551 Blast Desc: [Nectria haematococca mpVI 77-13-4]
  misc_feature (1)..(709): NCBI GI: 46123269 Blast Desc: FG06012.1 [Gibberella zeae PH-1]
  misc_feature (1)..(709): NCBI GI: 145606032 Blast Desc: conserved [Magnaporthe grisea 70-15] gi|145013775|gb|EDJ98416.1| conserved [Magnaporthe grisea 70-15]
  misc_feature (12)..(709): NCBI GI: 116204597 Blast Desc: CHGG_10182 [Chaetomium globosum CBS 148.51] gi|88176310|gb|EAQ83778.1| CHGG_10182 [Chaetomium globosum CBS 148.51]
  misc_feature (1)..(709): NCBI GI: 189199640 Blast Desc: ATP-binding cassette protein [Pyrenophora tritici-repentis Pt-1C-BFP] gi|187983256|gb|EDU48744.1| ATP-binding cassette protein [Pyrenophora tritici-repentis
  misc_feature (93)..(669): SWISSPROT Homolog: EC 3.6.3.47 Fatty-acyl-CoA-transporting ATPase
MAVQSKLVLPDRSLKSIVAQLTDLYLANRTRISRAVYLTLLLALVNRIRNAISEQKAASAREAAKRHSGTTSSDTPDSASKKKVELNREFFRSLLRLLKIVIPSASSHESRLLMSHSFFLVIRTLISLKVAEMDGAIVKALVKGSGKEFLTRIVWWMLIAVPATFTNSMLSYHQAELSLKYRTRLTQYIHDKYLSQLTFYGISALDDRIKNPDQLIAVDVAKFSNSLAELYSNLAKPILDMTIYTWSLSKSVGGEGVVFMALLVQLSAAVMRALTPPFGKYVADEARLEGEFRFQHSRLIDHSEEVALYHGHEAEKDTLDKGYFTLIKHVNYILRRRFYHGVMEDFVIKYFWGALGLMLCSVPVFFKLPGQLSDVVSMGDRTESFVTNRRMLLSASDAFGRVMFSYREVMELAGYTSRVASLLEVMDDIQAGHFEKKLVSSSGTEEHEAVLKGRGKVVESKDIEFINVPIISPNGDVLVKALSFSLKQGDHLLVVGPNGCGKSSLFRILGGLWPVYGGTVYKPPFTDIFYIPQRPYLSRGSLRQQITYPDSLRTVRSRGVTDAELLDILKTLSLEHLVDLYPEGWDAEAEWRDVLSGGLQQRVAMARLFYHKPRYAILDECTSSVTLETEKVMYDNAKALGITLMTVSHRRSLWKYHSRILQFDGQGNFVFTALDAEKRLRLEDEKEDLEVKLRQVPEIERRIGELSAA

SEQ ID NO: 28080 - DNA, 2649 bp, Muscodor strobelii
  misc_feature: SGI EST ID NO. CUFF.66153.0
  misc_feature: Variant of the nucleotide sequence at SEQ ID NO 28078
cactttgacgctgcgccgagagacgtcgccgagggacgtgctgtgccaatccaatcctctgagcttccccattcaccactccagttgctaagagtccgcaacgacatacctacatctcttccgaccatgtaacaacaaatcaaataaatagacaatttcatttttccgatcaatggcattagattgttccatacattcgagttatgctgcatacccataaagtaattcgccctcatctcgtgccgcatcgtcatcaataggtaaaccctccagatccgcgcatagggagcgcatactccccattccgccgccatggcggtgcagtccaaactcgtattgcccgaccggtctcttaagagcatcgtagcccaattgaccgacctatatctcgcaaaccgcacccgcatctctcgcgccgtctacctaactcttctcctcgccctcgtgaaccgcatccgcaatgccatctccgaacagaaagccgcgtccgcccgcgaggcagccaagagacactctggaacgacatccagcgatacgcccgacagtgcgagcaagaagaaagtagagctgaaccgggaattcttccgctctttattacggctgctaaagatcgtcatcccgagcgctagcagccatgagtccagattgctcatgagccatagcttcttccttgtgatacgcacgctcatcagcttaaaggtcgccgagatggatggtgcgattgtgaaggcactggtcaagggcagtgggaaggagttcctgacgaggatcgtctggtggatgttgattgctgtgcctgcgacttttacaaattccatgttgtcataccatcaagccgagctctcgctcaaataccggacacgactcactcagtacatacacgacaaatacttgtcgcaactcacgttctacggcatatctgcgctcgacgacagaataaagaacccagaccagctgatcgctgttgacgtagccaagttctcgaatagcttggctgaactatacagcaatttggccaagccgatattagatatgacaatctacacctggtcactctcaaagagtgtcggtggcgaaggtgtcgttttcatggccttgttggtccagctatcagccgccgtcatgcgtgccctcactccgcccttcggcaaatatgttgccgacgaggcacgactagaaggcgaatttcgatttcagcattcgcgacttatcgaccatagcgaagaggtcgcgctctaccacggccatgaggcggaaaaggataccctcgataaagggtattttacactcatcaaacacgtgaattacatattacgtcgacgattctaccacggcgtcatggaggatttcgtcataaaatacttctggggtgctctgggtctcatgctttgcagtgtgcccgtattcttcaagcttcctggtcagctcagcgacgttgtcagtatgggtgacaggacagagagcttcgtcacgaatcgtcgtatgctgcttagtgcttcggatgcgttcggtcgtgttatgttctcctaccgtgaggttatggagctagctggctacacgtctcgtgttgcttcgctactggaggttatggatgatatacaagcgggccatttcgaaaagaaactcgtttcgagctcgggcaccgaggaacatgaggctgtgttgaagggccgcggcaaagtggtggagagtaaggatattgagtttatcaatgtgcctatcatctctccgaatggcgatgtgctggtgaaggcactatcgttttcgctaaaacagggagatcatttactggttgtgggtccgaatggatgcggaaagtcgagtcttttccgcatccttggtggactttggcctgtatacggtgggacagtatataaaccgccgttcaccgatatcttctacattcctcaacggccatacctatcgagaggaagcctgcgacagcaaatcacttacccagatagtctgcgcacggtccgctcgcggggtgtgacggatgcagagctactcgatattctgaaaactctgtcattggagcatctagttgatctctatcccgagggctgggacgccgaggcagagtggcgcgatgtgctatctggtggtctacaacagcgcgtcgctatggctcggttattctaccacaagccgaggtacgcgattttggacgagtgcacgagtagtgtcacgctagagacggagaaggttatgtacgataatgcaaaagcgctgggcattacattgatgacggtgtctcatcgcaggagtttgtggaaataccatagcaggattctgcagtttgatgggcaggggaactttgtgtttaccgcgctggatgcagagaagagattaaggctggaggacgagaaggaggatttggaggtcaagcttagacaggttcctgagattgagaggaggattggggagttgagcgctgcatgagtgggaggtaaaaggaaaggaaggggatgtattgatacgtatgagagaaatgagcaggcaatattggatgttcgtgatcgattttgatctccactgatgatgaacgcgcgtgctggtttctcttgatccgactgttagtctggacttaatgtgagaaagagggctcgaagctatccggcaatgaagtcggtaaccattcgagccaga

SEQ ID NO: 28081 - DNA, 291 bp, Muscodor strobelii
  misc_feature: SGI cDNA ID NO. 569630
  misc_feature: Encodes the peptide sequence at SEQ ID NO 28082
atggcggacgaagaagaaattgcagtgtacgatgaggtcgaaatcgaagacatgacctttgacgagaccatgcaaatctaccattacccatgtccctgtggcgaccgattcgagattgcgctttgcgaccttcaggacgagtctaccgacatcgctgtctgccctagttgcagcttgatgattcgcgtcatctatgatcaggataacctctttaagcctcccgaggaccccgagccagagcccgaaaccaaggagcaggagcagcctcaacaggtccccgtcgccgcttga

SEQ ID NO: 28082 - protein, 96 aa, Muscodor strobelii
  misc_feature: SGI Peptide ID NO. 569630
  misc_feature (11)..(66): Pfam Id: PF05207 Pfam Desc: CSL zinc finger
  misc_feature (1)..(96): NCBI GI: 39968675 Blast Desc: MGG_02430 [Magnaporthe grisea 70-15] gi|145013969|gb|EDJ98610.1| MGG_02430 [Magnaporthe grisea 70-15]
  misc_feature (1)..(96): NCBI GI: 261357179 Blast Desc: diphthamide biosynthesis protein [Verticillium albo-atrum VaMs.102]
  misc_feature (1)..(74): NCBI GI: 116205307 Blast Desc: CHGG_10537 [Chaetomium globosum CBS 148.51] gi|88176665|gb|EAQ84133.1| CHGG_10537 [Chaetomium globosum CBS 148.51]
  misc_feature (1)..(72): NCBI GI: 225682581 Blast Desc: diphthamide biosynthesis protein [Paracoccidioides brasiliensis Pb03]
  misc_feature (3)..(70): NCBI GI: 171689792 Blast Desc: protein product [Podospora anserina] gi|170944858|emb|CAP70970.1| protein product [Podospora anserina]
  misc_feature (1)..(72): NCBI GI: 226289994 Blast Desc: diphthamide biosynthesis protein [Paracoccidioides brasiliensis Pb18]
  misc_feature (1)..(76): NCBI GI: 145258225 Blast Desc: An04g06150 [Aspergillus niger] gi|134074583|emb|CAK38876.1| protein product [Aspergillus niger]
  misc_feature (1)..(85): NCBI GI: 212542077 Blast Desc: CSL family zinc fnger-containing protein [Penicillium marneffei ATCC 18224] gi|210066100|gb|EEA20193.1| CSL family zinc fnger-containing protein [Penicillium marneffei ATCC 18224]
  misc_feature (1)..(86): NCBI GI: 242769787 Blast Desc: CSL family zinc finger-containing protein [Talaromyces stipitatus ATCC 10500] gi|218725041|gb|EED24458.1| CSL family zinc finger-containing protein [Talaromyces stipitatus ATCC
  misc_feature (1)..(87): NCBI GI: 67523057 Blast Desc: AN1985.2 [Aspergillus nidulans FGSC A4] gi|40744730|gb|EAA63886.1| AN1985.2 [Aspergillus nidulans FGSC A4]
MADEEEIAVYDEVEIEDMTFDETMQIYHYPCPCGDRFEIALCDLQDESTDIAVCPSCSLMIRVIYDQDNLFKPPEDPEPEPETKEQEQPQQVPVAA

SEQ ID NO: 28083 - DNA, 1856 bp, Muscodor strobelii
  misc_feature: SGI EST ID NO. CUFF.66604.0
  misc_feature: Variant of the nucleotide sequence at SEQ ID NO 28081
cgcggggttcccaagaattttggccgtgaagtggcgtaaagcctaccaagacgcagatttctttgctgtcgcataccaccgcatcgatccttttacgttgccacaacaagtcaacaaaaatggcggacgaagaagaaattgcagtgtacgatgaggtcgaaatcgaagacatgacctttgacgagaccatgcaaatctaccattacccatgtccctgtggcgaccgattcgagattgcgctttgcgaccttcaggacgagtctaccgacatcgctgtctgccctagttgcagcttgatgattcgcgtcatctatgatcaggataacctctttaagcctcccgaggaccccgagccagagcccgaaaccaaggagcaggagcagcctcaacaggtccccgtcgccgcttgattgaacgaagcactctgtcttgcatagaatgaggggaagagataggtccaacgagcaaactaagtcgggtcgagaagcgatttgcgccacgaagcgcaaacgatgaagcgacgaagacggggaactcattagcgcccgcgaattaaaataaagtcaaagcaatcgcatctgctgcggctatgctgcactcacgaccaagcatcgcatatcagtggcgggcaaagccgtaagtaccatgggtcggatacaactgtcctgtggttgaccacatcacaatacaacccaacgcgaccgaagcgcaatgcacaaaacgccgcgccgcgccgagtcaaatatgacctgtggcaacgaaatatgatggcaatacggagtattagctcacgaggggaacataaaaaggtccgaaggtagttcggtctagggaatgaaaagaatcaaaagcccaaatgttgttgggtaatcaattcgacttgttcagtcagtcatcgcagtagagggtatataaacacaaatccagataccgatcagaaacgccccagtccatgctccctgtgaaaccgacatctaccctgtcccctcgatgctgtccccggaatgctatcaccagccctgtcccccagaacgccattgaaatgcaagagtgccgctgctgtctgtcgagagtgcgacgtgatcataacaagaccagtccaacagcagagaagacgaccagacccatgattgaggcctcgagtgcgggtttctctggtaccaccgtcgagagcggtaatgtctcagtggtgatagtcgtgtggttacttgtgtcttcaagtactgccatagttgtcagcaccattgtccccaaaacaaacaacttgcttacgccgtggacatactgatcggatgaggcgcattcgttccataggcattggcgggtacactctgataagccgctgcgcacgcaacagaagcggcgacaaggatagcgtgtaatcgcatgttgatgtggaaatttgaatgttgtgttttgtattttccttccagaagtcgaggaatttccaggtgcaacagaaaatggctaaggctgagctgatagagttcaaatggtgttgggcaaaactcaaagcggcctcagctgggtagggagctctgcaattattgacagctcagctgtacctcgaaactctgcgttgcacggtgacaggcagtttatgtaattgcccacgtttattcgagactgcgtgaatcagataatcgaggaaaatcctaacagatccccgtcgtagaagagaggtccgatcagctaattatgcgagcatgaaagtttgaggatccggtctgtgtcgtttgctgctcgtcacagaccagcagaccgatagaaggaggaagtgggatgaaatggctcttaaacacagcttggaaaactccccagtaggaaatgcctgctcgctcaagaacttacaaaaa

SEQ ID NO: 28084 - DNA, 243 bp, Muscodor strobelii
  misc_feature: SGI cDNA ID NO. 569631
  misc_feature: Reduced expression when VOC is produced
  misc_feature: Encodes the peptide sequence at SEQ ID NO 28085
atgcgattacacgctatccttgtcgccgcttctgttgcgtgcgcagcggcttatcagagtgtacccgccaatgcctatggaacgaatgcgcctcatccgatcatacttgaagacacaagtaaccacacgactatcaccactgagacattaccgctctcgacggtggtaccagagaaacccgcactcgaggcctcaatcatgggtctggtcgtcttctctgctgttggactggtcttgttatga

SEQ ID NO: 28085 - protein, 80 aa, Muscodor strobelii
  misc_feature: SGI Peptide ID NO. 569631
  misc_feature: Useful for introducing or modulating the production of volatile compounds
MRLHAILVAASVACAAAYQSVPANAYGTNAPHPIILEDTSNHTTITTETLPLSTVVPEKPALEASIMGLVVFSAVGLVLL

SEQ ID NO: 28086 - DNA, 1845 bp, Muscodor strobelii
  misc_feature: SGI EST ID NO. CUFF.66605.1
  misc_feature: Variant of the nucleotide sequence at SEQ ID NO 28084
tttttgtaagttcttgagcgagcaggcatttcctactggggagttttccaagctgtgtttaagagccatttcatcccacttcctccttctatcggtctgctggtctgtgacgagcagcaaacgacacagaccggatcctcaaactttcatgctcgcataattagctgatcggacctctcttctacgacggggatctgttaggattttcctcgattatctgattcacgcagtctcgaataaacgtgggcaattacataaactgcctgtcaccgtgcaacgcagagtttcgaggtacagctgagctgtcaataattgcagagctccctacccagctgaggccgctttgagttttgcccaacaccatttgaactctatcagctcagccttagccattttctgttgcacctggaaattcctcgacttctggaaggaaaatacaaaacacaacattcaaatttccacatcaacatgcgattacacgctatccttgtcgccgcttctgttgcgtgcgcagcggcttatcagagtgtacccgccaatgcctatggaacgaatgcgcctcatccgatcatacttgaagacacaagtaaccacacgactatcaccactgagacattaccgctctcgacggtggtaccagagaaacccgcactcgaggcctcaatcatgggtctggtcgtcttctctgctgttggactggtcttgttatgatcacgtcgcactctcgacagacagcagcggcactcttgcatttcaatggcgttctgggggacagggctggtgatagcattccggggacagcatcgaggggacagggtagatgtcggtttcacagggagcatggactggggcgtttctgatcggtatctggatttgtgtttatataccctctactgcgatgactgactgaacaagtcgaattgattacccaacaacatttgggcttttgattcttttcattccctagaccgaactaccttcggacctttttatgttcccctcgtgagctaatactccgtattgccatcatatttcgttgccacaggtcatatttgactcggcgcggcgcggcgttttgtgcattgcgcttcggtcgcgttgggttgtattgtgatgtggtcaaccacaggacagttgtatccgacccatggtacttacggctttgcccgccactgatatgcgatgcttggtcgtgagtgcagcatagccgcagcagatgcgattgctttgactttattttaattcgcgggcgctaatgagttccccgtcttcgtcgcttcatcgtttgcgcttcgtggcgcaaatcgcttctcgacccgacttagtttgctcgttggacctatctcttcccctcattctatgcaagacagagtgcttcgttcaatcaagcggcgacggggacctgttgaggctgctcctgctccttggtttcgggctctggctcggggtcctcgggaggcttaaagaggttatcctgtcacgacgtcagttttgcctggttgagaaaagggtgtattgtattgacctgatcatagatgacgcgaatcatcaagctgcaactagggcagacagcgatgtcggtagactcgtcctgaaggtcgcaaagcgcaatctcgaatcggtcgccacagggacatgggtaatggtagatttgcatggtctcgtcaaaggtcatgtcttcgatttcgacctcatcgtacactgcaatttcttcttcgtccgccatttttgttgacttgttgtggcaacgtaaaaggatcgatgcggtggtatgcgacagcaaagaaatctgcgtcttggtaggctttacgccacttcacggccaaaattcttgggaaccccgcg

SEQ ID NO: 28087 - DNA, 1563 bp, Muscodor strobelii
  misc_feature: SGI cDNA ID NO. 569632
  misc_feature: Encodes the peptide sequence at SEQ ID NO 28088
atgacggtgaagacgcccttcggtctccagggctcagcccttagtaggatgcaactggctctcattgtggccccatccttcatactcttcggttacaatcaagctggacttggtggactcttaacagagaaggattgggtcgcgacgtttccacaaattgacacaatacacacgcttggatcagagaagagtcgcgattcgactcttcaaggtctcgttgtcgcggttttcgtgctcggagcactctcgggtgcgctgagttgttcatggtctggcgaccgctttggtcgccgaaatgtcatcttcgttggcgctatttgcacgcttattggaactatcttggagagttcggcttttggtctcccacagctcattgtgggacgagtcattttaggtctcggagttggtcaactgagctccattgtacccgtatggcagagtgagacctctggagcagcaaatcgcgggcgtcatgtagttctcgacggcttgttcatctgcttggggtatgttttagaatcatggatcgatttaggattcttcgaattcgacaatgggcctgtcacgtggcgtccgcccatcgcaatttcggcagttttctcgatcgttcttatggcgtccgtctacagcttcccagagagtccgagatggcttcttatgaagaacaagggtacacaagctcgcgccagtcttgccgtgcttcgagggcttgatgagaactcgtcggaggttgagctagagatccagggcgttgaggtctcgcttgagatcacgcgccactctgctgcaaaactgggcgatatgttgaagatgggcgaggataagcttgcctaccgttttggtctttgcatcttattgcaattctaccagcaactttcgggaacaaacctaattagcgtctacgcaacgattctcttccagcagaaccttggcctcggcagtgagatctcacgcgtgctgtctgctggggcactgacatggaaattcttgtcgtcgtttctagcattcatcgtcatcgatcgattcggccgcagagccgtcttcatcatcagtggctgcggaatgagcgcttgcatgatcgcgttggctgtcgcgacctcttttagcaccgagaatcggggggcgcagatcacggctggagtgttcatctacctcttcaacacgttcgtgccgatcgggtttctgggtgctaactttttgtactgcaccgagatcgcgccgttgaggctgcgcatggccatgagctctatctcgactgcaaaccactggctttggaattttgtcatcgctttgatcacaccagtcgcgattaacaccatcggctggcaatactacatcgtattcgcggtagttggcgctgtcataccagtctcggtgtatttcttataccctgagacgatggggcgcagcctcgaggagatcgacttgatcttcaagcaaagtccgtctgtattgggcacagtgaagtttgccaagtctcaacctgttggtatgatgctcgagtacacgaccgacgataagggagtgcaccatcaggacgagtataaagctgtctccgactga

SEQ ID NO: 28088 - protein, 520 aa, Muscodor strobelii
  misc_feature: SGI Peptide ID NO. 569632
  misc_feature (19)..(433): Pfam Id: PF07690 Pfam Desc: Major Facilitator Superfamily
  misc_feature (19)..(478): Pfam Id: PF00083 Pfam Desc: Sugar (and other) transporter
  misc_feature (66)..(433): Pfam Id: PF07690 Pfam Desc: Major Facilitator Superfamily
  misc_feature (1)..(514): NCBI GI: 46124173 Blast Desc: FG06464.1 [Gibberella zeae PH-1]
  misc_feature (1)..(514): NCBI GI: 157674371 Blast Desc: sugar transporter [Gibberella moniliformis]
  misc_feature (7)..(520): NCBI GI: 39943392 Blast Desc: MGG_10916 [Magnaporthe grisea 70-15] gi|145009642|gb|EDJ94298.1| MGG_10916 [Magnaporthe grisea 70-15]
  misc_feature (8)..(514): NCBI GI: 238507624 Blast Desc: sugar transporter, [Aspergillus flavus NRRL3357] gi|220688532|gb|EED44884.1| sugar transporter, [Aspergillus flavus NRRL3357]
  misc_feature (8)..(516): NCBI GI: 169785126 Blast Desc: [Aspergillus oryzae RIB40] gi|83775771|dbj|BAE65891.1| protein product [Aspergillus oryzae]
  misc_feature (9)..(515): NCBI GI: 169620343 Blast Desc: SNOG_13373 [Phaeosphaeria nodorum SN15] gi|111058137|gb|EAT79257.1| SNOG_13373 [Phaeosphaeria nodorum SN15]
  misc_feature (8)..(520): NCBI GI: 189197987 Blast Desc: sugar transporter STL1 [Pyrenophora tritici-repentis Pt-1C-BFP] gi|187981279|gb|EDU47905.1| sugar transporter STL1 [Pyrenophora tritici-repentis Pt-1C-BFP]
  misc_feature (9)..(495): NCBI GI: 145248846 Blast Desc: An14g01350 [Aspergillus niger] gi|134081433|emb|CAK41915.1| protein product [Aspergillus niger]
  misc_feature (3)..(513): NCBI GI: 67524253 Blast Desc: AN2584.2 [Aspergillus nidulans FGSC A4] gi|40745533|gb|EAA64689.1| AN2584.2 [Aspergillus nidulans FGSC A4] gi|259488021|tpe|CBF87147.1| TPA: MFS sugar transporter, FGSC
  misc_feature (9)..(514): NCBI GI: 255948060 Blast Desc: Pc22g07810 [Penicillium chrysogenum Wisconsin 54-1255] gi|211591814|emb|CAP98069.1| Pc22g07810 [Penicillium chrysogenum Wisconsin 54-1255]
MTVKTPFGLQGSALSRMQLALIVAPSFILFGYNQAGLGGLLTEKDWVATFPQIDTIHTLGSEKSRDSTLQGLVVAVFVLGALSGALSCSWSGDRFGRRNVIFVGAICTLIGTILESSAFGLPQLIVGRVILGLGVGQLSSIVPVWQSETSGAANRGRHVVLDGLFICLGYVLESWIDLGFFEFDNGPVTWRPPIAISAVFSIVLMASVYSFPESPRWLLMKNKGTQARASLAVLRGLDENSSEVELEIQGVEVSLEITRHSAAKLGDMLKMGEDKLAYRFGLCILLQFYQQLSGTNLISVYATILFQQNLGLGSEISRVLSAGALTWKFLSSFLAFIVIDRFGRRAVFIISGCGMSACMIALAVATSFSTENRGAQITAGVFIYLFNTFVPIGFLGANFLYCTEIAPLRLRMAMSSISTANHWLWNFVIALITPVAINTIGWQYYIVFAVVGAVIPVSVYFLYPETMGRSLEEIDLIFKQSPSVLGTVKFAKSQPVGMMLEYTTDDKGVHHQDEYKAVSD

SEQ ID NO: 28089 - DNA, 3405 bp, Muscodor strobelii
  misc_feature: SGI EST ID NO. CUFF.66162.1
  misc_feature: Variant of the nucleotide sequence at SEQ ID NO 28087
gctcgcatatcgctcgatgcgcaaatggcacggactggttctcacgacgcccatggggctccaactcggggtcaagataaagccggggcccgtcgtgacgccgcatgcggagtgggaggagcaagtgagtccctgagtagataaattgtggaaggaagtacgggcaagctagaaggcacgcatcacacattactaaatcaaatttcggatgtgaaatatgatatagctattccggaaaccgtccctcgcatatttcccacatcatcctataactccccaacagtatcgcttagtttgtcaacctccagtcgcctgtattgttatatattgtgtcttacccgtgggcttagagtttggataatcagtactatcagtacacagttttgagactgtatcacaacatctggtgctccctctatctaggaatcgcccaggtagacgctgtcaccagggcagaatgacggtgaagacgcccttcggtctccagggctcagcccttagtaggatgcaactggctctcattgtggccccatccttcatactcttcggttacaatcaagctggacttggtggactcttaacagagaaggattgggtcgcgacgtttccacaaattgacacaatacacacgcttggatcagagaagagtcgcgattcgactcttcaaggtctcgttgtcgcggttttcgtgctcggagcactctcgggtgcgctgagttgttcatggtctggcgaccgctttggtcgccgaaatgtcatcttcgttggcgctatttgcacgcttattggaactatcttggagagttcggcttttggtctcccacagctcattgtgggacgagtcattttaggtctcggagttggtcaactgagctccattgtacccgtatggcagagtgagacctctggagcagcaaatcgcgggcgtcatgtagttctcgacggcttgttcatctgcttggggtatgttttagaatcatggatcgatttaggattcttcgaattcgacaatgggcctgtcacgtggcgtccgcccatcgcaatttcggcagttttctcgatcgttcttatggcgtccgtctacagcttcccagagagtccgagatggcttcttatgaagaacaagggtacacaagctcgcgccagtcttgccgtgcttcgagggcttgatgagaactcgtcggaggttgagctagagatccagggcgttgaggtctcgcttgagatcacgcgccactctgctgcaaaactgggcgatatgttgaagatgggcgaggataagcttgcctaccgttttggtctttgcatcttattgcaattctaccagcaactttcgtacgtaaaggccgcacgaaagtcgaaatactgaatacgactaacacgccgtgctgcaggggaacaaacctaattagcgtctacgcaacgattctcttccagcagaaccttggcctcggcagtgagatctcacgcgtgctgtctgctggggcactgacatggaaattcttgtcgtcgtttctagcattcatcgtcatcgatcgattcggccgcagagccgtcttcatcatcagtggctgcggaatgagcgcttgcatgatcgcgttggctgtcgcgacctcttttagcaccgagaatcggggggcgcagatcacggctggagtgttcatctacctcttcaacacgttcgtgccgatcgggtttctgggtgctaactttttgtactgcaccgagatcgcgccgttgaggctgcgcatggccatgagctctatctcgactgcaaaccactggctttggaattttgtcatcgctttgatcacaccagtcgcgattaacaccatcggctggcaatactacatcgtattcgcggtagttggcgctgtcataccagtctcggtgtatttcttataccctgagacgatggggcgcagcctcgaggagatcgacttgatcttcaagcaaagtccgtctgtattgggcacagtgaagtttgccaagtctcaacctgttggtatgatgctcgagtacacgaccgacgataagggagtgcaccatcaggacgagtataaagctgtctccgactgatgggaatatatcgaacatgcaaatactgggattattggatttaaacagataggaagaaacccacgattcataatacagggatactattggtcctacgtcaccttgtgtttcattctaaagctggccttggctggtacatcaattgcaatgaaaccatgcatgatcatgcggaaactgaatttcatcatgtttgcgtaaagcttcgagtagctttccccaacgcaacctgatgttatcggcccgccgaactgaagatgcggctttttgttgtttgtccccatctggcgactattgaaacggaccatgacgtcaggtaaatgccccacaaggcgatttcaaaagcttgatggaaaaatgccagggggggaggggaaaatcagaaatacgaggggtcagagggaagagcatcgtcgtcggcccatgccgcccacacccatccaagaacgtgcattacgaggcagagccaagactcgttacggcacgtttagctgcgctgctgcagtctcttcatgcacgaggtgacattgttatcttttaagtacttcagacattcgttgcagtgttgtggaatctgccgaagctgaaagtcgagacctgcattagctgcgataatgtccgttctgccagctccaagccgcgtacacgtcggcatcacgcagcctcaagtgatgtgtccacggttcgcaacatggtgtcaattaccaagtcccgtaattgcccagcttttgtcggcgaggccagttgcatccacaatcgatgctccaacttgggtggcctattctggaaacatggcattggcttcgaaatagggcgggccggttattcggaacagaccaagttgctgatcaaagataaccaacaaaattgtcgtcgcttgcccctccaagagaaacggactgacgcaagactggcaagggtgagtgccgagagaagttgtgttccgcaactggcagatctctaccctcgtgttgtcttctttgtgcgatcaacctccatgacattgcgcgtgctgtttcagatgttcttgctttttgtcgcagcaacgccaagcgtctcgagcatacgtgtaagctaacgacgaaagcgcaatgctgctcaccgtcgaaaagatcgatcagaatgtccgtgggggaaaaagagataaacagaggcttgcagatagatggcccactagcagcaaggtcgagcaaggccgaaagtgcaatggctggatgtgattaccgaaagcgtcttagaacggccctatttgtagccaaagctggcaaatctgcgcactaggttgcgctccaggccctgttggcaccacgacgcgatcccctgcttctg

SEQ ID NO: 28090 - DNA, 456 bp, Muscodor strobelii
  misc_feature: SGI cDNA ID NO. 569633
  misc_feature: Encodes the peptide sequence at SEQ ID NO 28091
atgagtacttcaaagaaggtttcggttagtggtgtaggcgtcgacgccgcccaggtccttgagtacatgaagaacaacatgcatactggctggactgtcaagaaccccggcgatactgtgtccgcctgcgtttgtggcaagtacgaggtccgcggcaattgtggtcaccctgttctatctgaggacatacgctgccgtgctgacagtcgcggtgccagccgcactcctggatcatatcagatctgtcgtggcggcgacaccaaggcgctccacactatcgacgcctcttacttctatgtccaggatcgcaagtgtcgcggatgcatgcaaaagcctcgcaagaaacaaaccagggactggaagaggcagaacaagaaagacatggaagaccccgattttgtcgacactatggcggagcttcaggctgaagaactcggagcgcatcaccgacgttag

SEQ ID NO: 28091 - protein, 151 aa, Muscodor strobelii
  misc_feature: SGI Peptide ID NO. 569633
MSTSKKVSVSGVGVDAAQVLEYMKNNMHTGWTVKNPGDTVSACVCGKYEVRGNCGHPVLSEDIRCRADSRGASRTPGSYQICRGGDTKALHTIDASYFYVQDRKCRGCMQKPRKKQTRDWKRQNKKDMEDPDFVDTMAELQAEELGAHHRR

SEQ ID NO: 28092 - DNA, 158 bp, Muscodor strobelii
  misc_feature: SGI EST ID NO. CUFF.66168.0
  misc_feature: Variant of the nucleotide sequence at SEQ ID NO 28090
ctgcgtttgtggcaagtacgaggtccgcggcaattgtggtcaccctgttctatctgaggacatacgctgccgtgctgacagtcgcggtgccagccgcactcctggatcatatcagatctgtcgtggcggcgacaccaaggcgctccacactatcgacg

SEQ ID NO: 28093 - DNA, 2532 bp, Muscodor strobelii
  misc_feature: SGI cDNA ID NO. 569634
  misc_feature: Reduced expression when VOC is produced
  misc_feature: Encodes the peptide sequence at SEQ ID NO 28094
atggctgcagccctggcccacattgacaccccaggcatgctgagtcgcatctggtggaacgaccccggtcagatctggatctttgaaggcatggcttgtcataaagccgatgtcttccgctctggccaagaagtcaccctcgccatctactacttccttaacctagacactcgtgcagactatctcgtcgcatttgccctgaatgtcgacgacccctacgacccctcaagtcgccccaacctcccagagagcctacgcctcctgcaagactgggccccgtctctggattccagcgaccgcttgatcatcttcgatgagaaaagaaatttgagagtacgagcgtcgaaccctcttgactacatcgataggttcaagcgcggcctgaacactccagaggaccctatcccccgcccccgccttgacgctacgccctcgatccacggcatcgagaccgtttgtcgatcacagcttgctgaagtcgaccgactggcccccatagtagatctcgtggaggaccttacccgccctggcgagcgcatggtggcaaaatggtttttgttcaaggggagcctgagcacgacgtggcaagaaatgcataccctcaagtcgatccccccacacccacacatagtcccgatccgcagcattatcatcgataacgaagacgagaaacgaatcttgggtttctctatgaagcaagtcgagggctatgatttagggctcaacaagagcaccttcaagatgaagtggctcaagcaactcaccgataccatcgactatatgcatctcgagctcggcatcgtccatggtgacatattccccaagaatatcatgatagacaccataaccgatgaccttgtgctcgtcgatctggaaggtaccggacccgcagatgatctccatgttcgttccgagcttgactgtatcaagtgggcggtcttcgaagtcatcactcatgacacagcactactctcacatagatgggccgtaatgagatactgggaagagcactatggagacttagaggcaagaattcgcgccgccgaagccgattccgagttggaggagaagctgcggcaagaacaggatgaagcccaaaagtggattgatgccactgacaccgagacaattgatcaaatgccagaatgggaggcacgcgcgagcttggactgcacatctcaggatgtaagacaataccttgacgactggatcaagcggcgcaaggctcaagactacaccctaccagccaaccccatgacttttgagtgggaagatcgcgttccggagcgaagttatgggtcttctcagactatagagtgtctacgaagctcgtgcgctggagcggagatcaaccacgacgtgaagggcttgaaggcatctacttctccaaagtcaaagatcaactgggaaagaccagcataccgagacgcataccctgatcttgcatgtggtgatactgagaagtttattgccctcgactcaaaggacagcccaagccattgtatcaatcaatcactatcctgcgagaatttagacatgccagatgagaatctcgagactagtgatgagtctggagagtctgacgaatctatgttgtctaacgattctatgttgtcgagtgatggcttagatccagcgacagagccgcctgaagtcgaaacgacctgcgagcataccacagtcaaggtggtggatatttctggcgaaaaaattgacatcttagattccctgacggacattgagatgccagacgagcttgttgcagacgacaccaaggacacttctgaggagttcgtcggcagtggagtgatatctgaagatctaaaaatgacgcaccagtctaccggtaagcacgaagcaaaggaacaagacgattctgaagagcaggacaagtctgaagagcaggacaagtctgaagagcaggacaagtctgaagagcaggacaagtctgaagagcaggacaagtcttgtgagacggaggagttgtctcccttgatcaacgtcgcagaattacctgcagatattgaagccaaagattggattatcgaacacgacaccaacggcaaatcagattccgcaactattatctcagattctcaggctgagatcgagatggctgaatgtcctacagaaagtgacgaagaactcgatgtggatgacgagcttgagaacatggacgggtttcaagagagtctgcaagatatcatcgatactgcaacggctatgggtagtccaggaaacaaaaaaatgacattctggacgggtatagagggaatcgagaagtctctcaaaaagctcgctcggctgaagatgaaggcaactgataaattctgcaaggccatgcgacgcgttaacaaggatagtgtcaagtcttcggagaagaagagacagtccccatcacccgagattgacgatcaggcgcgggagaagatcagagtatccaaagacgaaaccatgtcttcgggaaagaagcgacctttcacatcgcttgaaggcgaagatcatccgcagaagaaagtcagattgtcgtag

SEQ ID NO: 28094 - protein, 843 aa, Muscodor strobelii
  misc_feature: SGI Peptide ID NO. 569634
  misc_feature (135)..(409): NCBI GI: 156060073 Blast Desc: SS1G_02174 [Sclerotinia sclerotiorum 1980] gi|154699583|gb|EDN99321.1| SS1G_02174 [Sclerotinia sclerotiorum 1980]
  misc_feature (138)..(370): NCBI GI: 256724465 Blast Desc: NECHADRAFT_54750 [Nectria haematococca mpVI 77-13-4]
  misc_feature (135)..(409): NCBI GI: 154312063 Blast Desc: BC1G_06065 [Botryotinia fuckeliana B05.10] gi|150850715|gb|EDN25908.1| BC1G_06065 [Botryotinia fuckeliana B05.10]
  misc_feature (145)..(323): NCBI GI: 255941746 Blast Desc: Pc16g13430 [Penicillium chrysogenum Wisconsin 54-1255] gi|211586265|emb|CAP94013.1| Pc16g13430 [Penicillium chrysogenum Wisconsin 54-1255]
  misc_feature (145)..(425): NCBI GI: 255940220 Blast Desc: Pc16g05370 [Penicillium chrysogenum Wisconsin 54-1255] gi|211585502|emb|CAP93207.1| Pc16g05370 [Penicillium chrysogenum Wisconsin 54-1255]
  misc_feature (145)..(409): NCBI GI: 238496241 Blast Desc: conserved [Aspergillus flavus NRRL3357] gi|220694236|gb|EED50580.1| conserved [Aspergillus flavus NRRL3357]
  misc_feature (145)..(409): NCBI GI: 169775137 Blast Desc: [Aspergillus oryzae RIB40] gi|83769899|dbj|BAE60034.1| protein product [Aspergillus oryzae]
  misc_feature (149)..(292): NCBI GI: 116206338 Blast Desc: CHGG_02462 [Chaetomium globosum CBS 148.51] gi|88183059|gb|EAQ90527.1| CHGG_02462 [Chaetomium globosum CBS 148.51]
  misc_feature (111)..(415): NCBI GI: 256726562 Blast Desc: NECHADRAFT_39507 [Nectria haematococca mpVI 77-13-4]
  misc_feature (148)..(325): NCBI GI: 46117518 Blast Desc: FG04601.1 [Gibberella zeae PH-1]
  misc_feature: Useful for introducing or modulating the production of volatile compounds
MAAALAHIDTPGMLSRIWWNDPGQIWIFEGMACHKADVFRSGQEVTLAIYYFLNLDTRADYLVAFALNVDDPYDPSSRPNLPESLRLLQDWAPSLDSSDRLIIFDEKRNLRVRASNPLDYIDRFKRGLNTPEDPIPRPRLDATPSIHGIETVCRSQLAEVDRLAPIVDLVEDLTRPGERMVAKWFLFKGSLSTTWQEMHTLKSIPPHPHIVPIRSIIIDNEDEKRILGFSMKQVEGYDLGLNKSTFKMKWLKQLTDTIDYMHLELGIVHGDIFPKNIMIDTITDDLVLVDLEGTGPADDLHVRSELDCIKWAVFEVITHDTALLSHRWAVMRYWEEHYGDLEARIRAAEADSELEEKLRQEQDEAQKWIDATDTETIDQMPEWEARASLDCTSQDVRQYLDDWIKRRKAQDYTLPANPMTFEWEDRVPERSYGSSQTIECLRSSCAGAEINHDVKGLKASTSPKSKINWERPAYRDAYPDLACGDTEKFIALDSKDSPSHCINQSLSCENLDMPDENLETSDESGESDESMLSNDSMLSSDGLDPATEPPEVETTCEHTTVKVVDISGEKIDILDSLTDIEMPDELVADDTKDTSEEFVGSGVISEDLKMTHQSTGKHEAKEQDDSEEQDKSEEQDKSEEQDKSEEQDKSEEQDKSCETEELSPLINVAELPADIEAKDWIIEHDTNGKSDSATIISDSQAEIEMAECPTESDEELDVDDELENMDGFQESLQDIIDTATAMGSPGNKKMTFWTGIEGIEKSLKKLARLKMKATDKFCKAMRRVNKDSVKSSEKKRQSPSPEIDDQAREKIRVSKDETMSSGKKRPFTSLEGEDHPQKKVRLS

SEQ ID NO: 28095 - DNA, 3589 bp, Muscodor strobelii
  misc_feature: SGI EST ID NO. CUFF.66174.0
  misc_feature: Variant of the nucleotide sequence at SEQ ID NO 28093
ctttgtcattgaatgtgctatgtgctggcgtacatcgccactacaagacacggcggctccgtccgagaaatctttggacgggtaggtaagatgattagatgaatgggtaggtgccttgaaagaatcggatccatgttggagcgtccgtgaggaatctttacttctagagcaatcttttcttctgtccttcgaacttcctcctctcacaaggcgcactaaatacttggttgacggttaacttgattttctgctcgcccaactaccaactattcctatccattctgtccacctgcgcgttccttcgctacgcgcaccttcctcgacgcaccttcccttacagacacaaacgaaaaaggaattcacaacttgaacatctacttctggctaccgccttccccaccgccttctttctgccggtctctgccagcctcctctccgagtgtgtgcacttaagcacgcaccattaagaatcaccagcacattcactcacattcttccaatctcaccaagcatattactttgcatctgtcatcaacctcctacgccttaggcaaggcattcccacaagcgcgaacaagcaccgcgcaacaacttgcgcatcaaacattcaagacatccgagcgacattcatcgtctcgatctcttgcccctcccccaccttcctcgaggccttctcacctagcaatccccgtccagtcatctacaacatcactctgagaaccgttcttcgcaagatggctgcagccctggcccacattgacaccccaggcatgctgagtcgcatctggtggaacgaccccggtcagatctggatctttgaaggcatggcttgtcataaagccgatgtcttccgctctggccaagaagtcaccctcgccatctactacttccttaacctagacactcgtgcagactatctcgtcgcatttgccctgaatgtcgacgacccctacgacccctcaagtcgccccaacctcccagagagcctacgcctcctgcaagactgggccccgtctctggattccagcgaccgcttgatcatcttcgatgagaaaagaaatttgagagtacgagcgtcgaaccctcttgactacatcgataggttcaagcgcggcctgaacactccagaggaccctatcccccgcccccgccttgacgctacgccctcgatccacggcatcgagaccgtttgtcgatcacagcttgctgaagtcgaccgactggcccccatagtagatctcgtggaggaccttacccgccctggcgagcgcatggtggcaaaatggtttttgttcaaggggagcctgagcacgacgtggcaagaaatgcataccctcaagtcgatccccccacacccacacatagtcccgatccgcagcattatcatcgataacgaagacgagaaacgaatcttgggtttctctatgaagcaagtcgagggctatgatttagggctcaacaagagcaccttcaagatgaagtggctcaagcaactcaccgataccatcgactatatgcatctcgagctcggcatcgtccatggtgacatattccccaagaatatcatgatagacaccataaccgatgaccttgtgctcgtcgatctggaaggtaccggacccgcagatgatctccatgttcgttccgagcttgactgtatcaagtgggcggtcttcgaagtcatcactcatgacacagcactactctcacatagatgggccgtaatgagatactgggaagagcactatggagacttagaggcaagaattcgcgccgccgaagccgattccgagttggaggagaagctgcggcaagaacaggatgaagcccaaaagtggattgatgccactgacaccgagacaattgatcaaatgccagaatgggaggcacgcgcgagcttggactgcacatctcaggatgtaagacaataccttgacgactggatcaagcggcgcaaggctcaagactacaccctaccagccaaccccatgacttttgagtgggaagatcgcgttccggagcgaagttatgggtcttctcagactatagagtgtctacgaagctcgtgcgctggagcggagatcaaccacgacgtgaagggcttgaaggcatctacttctccaaagtcaaagatcaactgggaaagaccagcataccgagacgcataccctgatcttgcatgtggtgatactgagaagtttattgccctcgactcaaaggacagcccaagccattgtatcaatcaatcactatcctgcgagaatttagacatgccagatgagaatctcgagactagtgatgagtctggagagtctgacgaatctatgttgtctaacgattctatgttgtcgagtgatggcttagatccagcgacagagccgcctgaagtcgaaacgacctgcgagcataccacagtcaaggtggtggatatttctggcgaaaaaattgacatcttagattccctgacggacattgagatgccagacgagcttgttgcagacgacaccaaggacacttctgaggagttcgtcggcagtggagtgatatctgaagatctaaaaatgacgcaccagtctaccggtaagcacgaagcaaaggaacaagacgattctgaagagcaggacaagtctgaagagcaggacaagtctgaagagcaggacaagtctgaagagcaggacaagtctgaagagcaggacaagtcttgtgagacggaggagttgtctcccttgatcaacgtcgcagaattacctgcagatattgaagccaaagattggattatcgaacacgacaccaacggcaaatcagattccgcaactattatctcagattctcaggctgagatcgagatggctgaatgtcctacagaaagtgacgaagaactcgatgtggatgacgagcttgagaacatggacgggtttcaagagagtctgcaagatatcatcgatactgcaacggctatgggtagtccaggaaacaaaaaaatgacattctggacgggtatagagggaatcgagaagtctctcaaaaagctcgctcggctgaagatgaaggcaactgataaattctgcaaggccatgcgacgcgttaacaaggatagtgtcaagtcttcggagaagaagagacagtccccatcacccgagattgacgatcaggcgcgggagaagatcagagtatccaaagacgaaaccatgtcttcgggaaagaagcgacctttcacatcgcttgaaggcgaagatcatccgcagaagaaagtcagattgtcgtagactgcgacgatcaggaagatagagaacaaagtaattttcacatgggagctattgagaggcaagtaatgaagcgaagaaattttcagagaagtgttttcgataattagcataccaagcgtagcaaactgtttgttacttttatcaagttcttcataccaggagaacgtaatcgattacctccaaaatatcaaatgagctaggaatagagttatatgtcgagcttgagtattgtgatggtaatatgttgaatctgttcttgtctatcgttgtttttgtctagagtagtctcgacatagcgatgcgcagtctatcaatcactacct

SEQ ID NO: 28096 - DNA, 1362 bp, Muscodor strobelii
  misc_feature: SGI cDNA ID NO. 569635
  misc_feature: Encodes the peptide sequence at SEQ ID NO 28097
atgacttctacttcaaacaacgagcaaagcactcgtagaagaaaaaccaaagatctaccacgacggcctaaactgaatccgatagggagcgctgtgaagtcatggcttgaggtctatagcccgtctctcacaagccataaagcaagcgacctagtcgcacaagcaccaaaaagatggacggcatacggaccgatggtgcttctccccgctggatctttcacaaatacagcttggcaggacgtcctcaaatcaagccacgatatctctgtggtcgatgagaacgacaaaggatcgaatggactctggaggaaaatcctcaacgagattgcaagctcgtccaaaatatcatacactcatctcgcagtgaacgagggcataccgctacagaccaaaaacagcgacgaagagaacatcctgcggagtcctagcggtctacggatgctatacggagacttcggcccttctacgctcatcaacccagagcagggagtgacgcaagacgactttgcgcaggcattctgggtctcgacgaaacagagcggtattacgcagatatgggctcctagatggactatgttcagtcgcggtaatatcaaggagaaagctagagtacttgatttccacactcgcgtatctgatgcggggagagaaggagatatggcgctgtcgcatcgactcatgcctgcgagtcggcgcagaggcaaagtggctgttgatctgtatgctgggattggatacttcgcgctgtgctatgcttcacttggcttccgtgtcttgtgctgggagttgaatccgcggagcgtggagggtttgaggagaggtgcggttgctaatggatatggtgtgaagatcgtcaggctaactggggaagaggatgatgataatgttgtaagggatgtgatgggaggtgatgagacaatgattgtgtttctggaggataatgcgaaagcaccgggcaggatcagaaagtgggacgaattgacacggcaacgagaagaagagctgcaagaagctgacacgtcgtacactggactccgaaagaacgatgtcttgcatgtcaattgcggtcttctacccacaagcgaggggtcttgggatgctgcttgggatatagcgaaggagtccaagaccgcttggctgcatatccatgaaaatgttggcgcggtcgatatcgagtcaaagaaaggtcagattgaagactggttctctgaacgggcgaagatggcggggggttgcagtgcgaagacacgggtccacgtcgaacatgtcgagcaggtcaagacgtttgcgccgggtgtttggcactgtgtgtttgatttgtatatcagtagatcttctgatgagacgaatgtcataacgtga

SEQ ID NO: 28097 - protein, 453 aa, Muscodor strobelii
  misc_feature: SGI Peptide ID NO. 569635
  misc_feature (20)..(444): NCBI GI: 46109166 Blast Desc: FG01465.1 [Gibberella zeae PH-1]
  misc_feature (20)..(442): NCBI GI: 256730823 Blast Desc: NECHADRAFT_30345 [Nectria haematococca mpVI 77-13-4]
  misc_feature (65)..(444): NCBI GI: 154314046 Blast Desc: BC1G_04966 [Botryotinia fuckeliana B05.10] gi|150849112|gb|EDN24305.1| BC1G_04966 [Botryotinia fuckeliana B05.10]
  misc_feature (1)..(424): NCBI GI: 145607017 Blast Desc: MGG_12102 [Magnaporthe grisea 70-15] gi|145014629|gb|EDJ99197.1| MGG_12102 [Magnaporthe grisea 70-15]
  misc_feature (15)..(444): NCBI GI: 156060689 Blast Desc: SS1G_02487 [Sclerotinia sclerotiorum 1980] gi|154699891|gb|EDN99629.1| SS1G_02487 [Sclerotinia sclerotiorum 1980]
  misc_feature (147)..(442): NCBI GI: 261352986 Blast Desc: tRNA wybutosine-synthesizing protein [Verticillium albo-atrum VaMs.102]
  misc_feature (13)..(444): NCBI GI: 67515697 Blast Desc: AN0130.2 [Aspergillus nidulans FGSC A4] gi|40746152|gb|EAA65308.1| AN0130.2 [Aspergillus nidulans FGSC A4] gi|259489674|tpe|CBF90139.1| TPA: conserved [Aspergillus FGSC
  misc_feature (3)..(440): NCBI GI: 115387555 Blast Desc: conserved [Aspergillus terreus NIH2624] gi|114195367|gb|EAU37067.1| conserved [Aspergillus terreus NIH2624]
  misc_feature (51)..(442): NCBI GI: 189206109 Blast Desc: conserved [Pyrenophora tritici-repentis Pt-1C-BFP] gi|187975482|gb|EDU42108.1| conserved [Pyrenophora tritici-repentis Pt-1C-BFP]
  misc_feature (26)..(442): NCBI GI: 169611050 Blast Desc: SNOG_08634 [Phaeosphaeria nodorum SN15] gi|160702210|gb|EAT83802.2| SNOG_08634 [Phaeosphaeria nodorum SN15]
MTSTSNNEQSTRRRKTKDLPRRPKLNPIGSAVKSWLEVYSPSLTSHKASDLVAQAPKRWTAYGPMVLLPAGSFTNTAWQDVLKSSHDISVVDENDKGSNGLWRKILNEIASSSKISYTHLAVNEGIPLQTKNSDEENILRSPSGLRMLYGDFGPSTLINPEQGVTQDDFAQAFWVSTKQSGITQIWAPRWTMFSRGNIKEKARVLDFHTRVSDAGREGDMALSHRLMPASRRRGKVAVDLYAGIGYFALCYASLGFRVLCWELNPRSVEGLRRGAVANGYGVKIVRLTGEEDDDNVVRDVMGGDETMIVFLEDNAKAPGRIRKWDELTRQREEELQEADTSYTGLRKNDVLHVNCGLLPTSEGSWDAAWDIAKESKTAWLHIHENVGAVDIESKKGQIEDWFSERAKMAGGCSAKTRVHVEHVEQVKTFAPGVWHCVFDLYISRSSDETNVIT

SEQ ID NO: 28098 - DNA, 1424 bp, Muscodor strobelii
  misc_feature: SGI EST ID NO. CUFF.66183.0
  misc_feature: Variant of the nucleotide sequence at SEQ ID NO 28096
ttcaaacaacgagcaaagcactcgtagaagaaaaaccaaagatctaccacgacggcctaaactgaatccgatagggagcgctgtgaagtcatggcttgaggtctatagcccgtctctcacaagccataaagcaagcgacctagtcgcacaagcaccaaaaagatggacggcatacggaccgatggtgcttctccccgctggatctttcacaaatacagcttggcaggacgtcctcaaatcaagccacgatatctctgtggtcgatgagaacgacaaaggatcgaatggactctggaggaaaatcctcaacgagattgcaagctcgtccaaaatatcatacactcatctcgcagtgaacgagggcataccgctacagaccaaaaacagcgacgaagagaacatcctgcggagtcctagcggtctacggatgctatacggagacttcggcccttctacgctcatcaacccagagcagggagtgacgcaagacgactttgcgcaggcattctgggtctcgacgaaacagagcggtattacgcagatatgggctcctagatggactatgttcagtcgcggtaatatcaaggagaaagctagagtacttgatttccacactcgcgtatctgatgcggggagagaaggagatatggcgctgtcgcatcgactcatgcctgcgagtcggcgcagaggcaaagtggctgttgatctgtatgctgggattggatacttcgcgctgtgctatgcttcacttggcttccgtgtcttgtgctgggagttgaatccgcggagcgtggagggtttgaggagaggtgcggttgctaatggatatggtgtgaagatcgtcaggctaactggggaagaggatgatgataatgttgtaagggatgtgatgggaggtgatgagacaatgattgtgtttctggaggataatgcgaaagcaccgggcaggatcagaaagtgggacgaattgacacggcaacgagaagaagagctgcaagaagctgacacgtcgtacactggactccgaaagaacgatgtcttgcatgtcaattgcggtcttctacccacaagcgaggggtcttgggatgctgcttgggatatagcgaaggagtccaagaccgcttggctgcatatccatgaaaatgttggcgcggtcgatatcgagtcaaagaaaggtcagattgaagactggttctctgaacgggcgaagatggcggggggttgcagtgcgaagacacgggtccacgtcgaacatgtcgagcaggtcaagacgtttgcgccgggtgtttggcactgtgtgtttgatttgtatatcagtagatcttctgatgagacgaatgtcataacgtgagctacgtttcgatcttattgaagtgtgttttgagattatgctcattcaactctggagattgttcttcccttcg

SEQ ID NO: 28099 - DNA, 606 bp, Muscodor strobelii
  misc_feature: SGI cDNA ID NO. 569636
  misc_feature: Encodes the peptide sequence at SEQ ID NO 28100
atgcgctccacaacctttgcggccctgagcctgctggcacctgcggtcctcggccacggcagccacgaccagaagcccatggtcgccgacgatgccaattggatgactaaacacatggccgaggaacatcacatgaccgacttcgacccctcttccttcttcaccctacacgactacaacggcaacggccgctgggaacccgatgagatcctccgcacatatggcttgatggacgagtccaacaaggacgtaccctattcaaaacggcaagaattacaaaaacagataatgcaactcctcgaccaggataatgatggactagtctcccgcaacgagtttttgggcttcatatcaggcggcggtacacttcccgatctcggtacgggaccagggcatcacggcgacgacgaatacgagtatgagattcatcactgggagaagtaccacgatgagaataccaagctcgaggatttgactcacccggaggatattgagcattttaggaaacatgaggagatggaagacgctgaggaccgtctcgagcaactcgagcgcatgatgatcgttgcggcgaatatccctagcaagttccggagagcgagctaa

SEQ ID NO: 28100 - protein, 201 aa, Muscodor strobelii
  misc_feature: SGI Peptide ID NO. 569636
  misc_feature (1)..(199): NCBI GI: 46109168 Blast Desc: FG01466.1 [Gibberella zeae PH-1]
  misc_feature (1)..(201): NCBI GI: 256730606 Blast Desc: [Nectria haematococca mpVI 77-13-4]
  misc_feature (3)..(200): NCBI GI: 85068494 Blast Desc: NCU03423 [Neurospora crassa OR74A] gi|18376357|emb|CAD21135.1| related to secretory protein SSP120 [Neurospora crassa] gi|28916757|gb|EAA26525.1| NCU03423 crassa
  misc_feature (1)..(199): NCBI GI: 39943864 Blast Desc: MGG_03943 [Magnaporthe grisea 70-15] gi|145014651|gb|EDJ99219.1| MGG_03943 [Magnaporthe grisea 70-15]
  misc_feature (40)..(201): NCBI GI: 116199925 Blast Desc: CHGG_08118 [Chaetomium globosum CBS 148.51] gi|88179397|gb|EAQ86865.1| CHGG_08118 [Chaetomium globosum CBS 148.51]
  misc_feature (5)..(200): NCBI GI: 121713698 Blast Desc: secretory pathway protein Ssp120, [Aspergillus clavatus NRRL 1] gi|119402613|gb|EAW13034.1| secretory pathway protein Ssp120, [Aspergillus clavatus NRRL 1]
  misc_feature (7)..(199): NCBI GI: 119479003 Blast Desc: secretory pathway protein Ssp120, [Neosartorya fischeri NRRL 181] gi|119407684|gb|EAW17633.1| secretory pathway protein Ssp120, [Neosartorya fischeri NRRL 181]
  misc_feature (7)..(201): NCBI GI: 70997477 Blast Desc: secretory pathway protein Ssp120 [Aspergillus fumigatus Af293] gi|66851122|gb|EAL91448.1| secretory pathway protein Ssp120, [Aspergillus fumigatus Af293]
  misc_feature (1)..(199): NCBI GI: 156060687 Blast Desc: SS1G_02486 [Sclerotinia sclerotiorum 1980] gi|154699890|gb|EDN99628.1| SS1G_02486 [Sclerotinia sclerotiorum 1980]
  misc_feature (7)..(201): NCBI GI: 159126785 Blast Desc: secretory pathway protein Ssp120, [Aspergillus fumigatus A1163]
MRSTTFAALSLLAPAVLGHGSHDQKPMVADDANWMTKHMAEEHHMTDFDPSSFFTLHDYNGNGRWEPDEILRTYGLMDESNKDVPYSKRQELQKQIMQLLDQDNDGLVSRNEFLGFISGGGTLPDLGTGPGHHGDDEYEYEIHHWEKYHDENTKLEDLTHPEDIEHFRKHEEMEDAEDRLEQLERMMIVAANIPSKFRRAS

SEQ ID NO: 28101 - DNA, 2976 bp, Muscodor strobelii
  misc_feature: SGI EST ID NO. CUFF.66224.1
  misc_feature: Variant of the nucleotide sequence at SEQ ID NO 28099
ggaaaatagattgattgacgacatttgactcgtgatctagctccaatacggtggcgaacgtctacggatgggtagcgatcgtcgcttggggtagcatccccaaagaccacgcttatggttatcgttgttggagatttggagtacttggtagaagtctgctgaagccggtacgatgcatacctttcagcttaagtaggtggtgcatgtagagaatcgtgagaaatgtctcaaatactcatgtgactgacagagtattataagttacttgactgggtatcttaaacattgccgtgattaaacagcggcatcaacatccatttccgcggcctgtgagcgttccttctcttggattaaccgcagcatctcctctttccactggcgatattcagctctcttctcatccgtcatgtcccatctactctgcaacatcgtgtctgctctctggaggtgcagtttttcaatgacccgttggccatcatcctcatctacgtgcatgacatcgtcaacctcggcgtccaactcctgttggtctgaccctgttgttttcatactctcctcgaacccgacaaaccagtcttctttctgccagccttgtctgatgacctcagccatggccttgtccacgtccttagcggtgacatcagaccatccgatccaaagctcatcctcatccatgccctgaactttgatcttctcctgtgcttgctcaagaaccttcagtacagactttcgtatccttgtgtactgtctgctgtctagttccttgccttgcttgaatacaaagagctgcccagatacgagacaatacacgccggctaggagatgtgttaagtggtcatttacccatgcatcctttgtccgtctgccattaggggcaacgatagtctgcatgccagctaggacagtgcgtccgatacggtcttgatctagttccttgcaaagaagttgaatcgtaggccgtatccaggcaggtagggtgcttccgatgccgcctgctttcctcttagcggggatggcaggaggcttggatgctgacttggtgggagtgccgtctcccctaactgcgggagacctaaacttggctagagtggactctttactgggcgtcccacgcgacggtattcgcttctcactcccgaatagatctgcccctcttgctttggaggagggtgtccggacgcgccgcggcgtgccgacggaggtctgtggaagcacattgtcgagatgtgtatatagacgcttgtatagtctgggcgggatgggcggcctggcttggatcgggggcaaatcaagagatatcttgaggcgttcgcaggcgatgtgggcacatgcatatgatcgggcaacctcttcctcagcctttagagcgccggcactgttgcgcgattgggcgagtagagaggatgcgagttcgagtagaggctgtggcagggtgtctgagtatgagggtagtagtgaatagagcgtcggctctaatgttcgactcattgcgacgtgaacaaaggcccgcgccctctgcttctcgagtgggacgcagccacacgcgtaattgtcgcttgtgtgcgaaagaagccgaagtagaccgagtaaattgaccagcaataagttgatatcggattgatactactagactttgtcgtcggatatcgggatcgaatggcgagttcggatggcgttgctcgggtttgctcctcccctcgtggtacgccgcatgcgtgacaagctctacttccggctcggtcgctgtaattgatgtcaattgacgtcgtggtgacggaaacattggacgattgctcagtgcgacattagcgcatacatccctgtaacgcttcgagcttcaacggctaaaacgaaacgccaagacggccgagatctggccccctgcagtaactgtcgatccggatcgcctctggacagcaaccacgaggcttcaaactcccagcaacgctttcgaactattttctgcatcccttcaagacccaaatgctgcctatccgctaggcgcacttatattgatgaaacgagagaaatcggaatactaaatacgagagatcatttgcgcaagtcgtcgtcatcaccggtgctatttgagcttactcgcgaacgcgcaagccacagcaacatgcgctccacaacctttgcggccctgagcctgctggcacctgcggtcctcggccacggcagccacgaccagaagcccatggtcgccgacgatgccaattggatgactaaacacatggccgaggaacatcacatgaccgacttcgacccctcttccttcttcaccctacacgactacaacggcaacggccgctgggaacccgatgagatcctccgcacatatggcttgatggacgagtccaacaaggacgtaccctattcaaaacggcaagaattacaaaaacagataatgcaactcctcgaccaggataatgatggactagtctcccgcaacgagtttttgggcttcatatcaggcggcggtacacttcccgatctcggtacgggaccagggcatcacggcgacgacgaatacgagtatgagattcatcactgggagaagtaccacgatgagaataccaagctcgaggatttgactcacccggaggatattgagcattttaggaaacatgaggagatggaagacgctgaggaccgtctcgagcaactcgagcgcatgatgatcgttgcggcgaatatccctagcaagttccggagagcgagctaatttgccgttatgtaaatggacaatagatacgacatggctgagcatatcatgtataatgagtgtaatttttgggatggtcctacgtaacatgcgtatgtatttgtacgcattgctcgcggatgtgtatgtgcgagactcggtgattgtgtttgatgactttttccgatcgacgacaggcttgcacctacctaaattttcgaataactgtcaccgtaaccaaccgtttagtctacagggaggtatacagc

SEQ ID NO: 28102 - DNA, 1194 bp, Muscodor strobelii
  misc_feature: SGI cDNA ID NO. 569637
  misc_feature: Encodes the peptide sequence at SEQ ID NO 28103
atgagtcgaacattagagccgacgctctattcactactaccctcatactcagacaccctgccacagcctctactcgaactcgcatcctctctactcgcccaatcgcgcaacagtgccggcgctctaaaggctgaggaagaggttgcccgatcatatgcatgtgcccacatcgcctgcgaacgcctcaagatatctcttgatttgcccccgatccaagccaggccgcccatcccgcccagactatacaagcgtctatatacacatctcgacaatgtgcttccacagacctccgtcggcacgccgcggcgcgtccggacaccctcctccaaagcaagaggggcagatctattcgggagtgagaagcgaataccgtcgcgtgggacgcccagtaaagagtccactctagccaagtttaggtctcccgcagttaggggagacggcactcccaccaagtcagcatccaagcctcctgccatccccgctaagaggaaagcaggcggcatcggaagcaccctacctgcctggatacggcctacgattcaacttctttgcaaggaactagatcaagaccgtatcggacgcactgtcctagctggcatgcagactatcgttgcccctaatggcagacggacaaaggatgcatgggtaaatgaccacttaacacatctcctagccggcgtgtattgtctcgtatctgggcagctctttgtattcaagcaaggcaaggaactagacagcagacagtacacaaggatacgaaagtctgtactgaaggttcttgagcaagcacaggagaagatcaaagttcagggcatggatgaggatgagctttggatcggatggtctgatgtcaccgctaaggacgtggacaaggccatggctgaggtcatcagacaaggctggcagaaagaagactggtttgtcgggttcgaggagagtatgaaaacaacagggtcagaccaacaggagttggacgccgaggttgacgatgtcatgcacgtagatgaggatgatggccaacgggtcattgaaaaactgcacctccagagagcagacacgatgttgcagagtagatgggacatgacggatgagaagagagctgaatatcgccagtggaaagaggagatgctgcggttaatccaagagaaggaacgctcacaggccgcggaaatggatgttgatgccgctgtttaa

SEQ ID NO: 28103 - protein, 397 aa, Muscodor strobelii
  misc_feature: SGI Peptide ID NO. 569637
  misc_feature (1)..(394): NCBI GI: 256730822 Blast Desc: NECHADRAFT_57041 [Nectria haematococca mpVI 77-13-4]
  misc_feature (1)..(394): NCBI GI: 46109170 Blast Desc: FG01467.1 [Gibberella zeae PH-1]
  misc_feature (1)..(381): NCBI GI: 171688930 Blast Desc: protein product [Podospora anserina] gi|170944427|emb|CAP70538.1| protein product [Podospora anserina]
  misc_feature (1)..(389): NCBI GI: 21622384 Blast Desc: [Neurospora crassa]
  misc_feature (1)..(138): NCBI GI: 261352984 Blast Desc: conserved [Verticillium albo-atrum VaMs.102]
  misc_feature (1)..(395): NCBI GI: 154314052 Blast Desc: BC1G_04969 [Botryotinia fuckeliana B05.10] gi|150849115|gb|EDN24308.1| BC1G_04969 [Botryotinia fuckeliana B05.10]
  misc_feature (2)..(380): NCBI GI: 255956513 Blast Desc: Pc21g20190 [Penicillium chrysogenum Wisconsin 54-1255] gi|211590720|emb|CAP96916.1| Pc21g20190 [Penicillium chrysogenum Wisconsin 54-1255]
  misc_feature (2)..(389): NCBI GI: 145243084 Blast Desc: An11g00790 [Aspergillus niger] gi|134078756|emb|CAK40553.1| protein product [Aspergillus niger]
  misc_feature (2)..(382): NCBI GI: 119471503 Blast Desc: NFIA_056270 [Neosartorya fischeri NRRL 181] gi|119406327|gb|EAW16278.1| conserved [Neosartorya fischeri NRRL 181]
  misc_feature (2)..(388): NCBI GI: 238490576 Blast Desc: conserved [Aspergillus flavus NRRL3357] gi|220696938|gb|EED53279.1| conserved [Aspergillus flavus NRRL3357]
MSRTLEPTLYSLLPSYSDTLPQPLLELASSLLAQSRNSAGALKAEEEVARSYACAHIACERLKISLDLPPIQARPPIPPRLYKRLYTHLDNVLPQTSVGTPRRVRTPSSKARGADLFGSEKRIPSRGTPSKESTLAKFRSPAVRGDGTPTKSASKPPAIPAKRKAGGIGSTLPAWIRPTIQLLCKELDQDRIGRTVLAGMQTIVAPNGRRTKDAWVNDHLTHLLAGVYCLVSGQLFVFKQGKELDSRQYTRIRKSVLKVLEQAQEKIKVQGMDEDELWIGWSDVTAKDVDKAMAEVIRQGWQKEDWFVGFEESMKTTGSDQQELDAEVDDVMHVDEDDGQRVIEKLHLQRADTMLQSRWDMTDEKRAEYRQWKEEMLRLIQEKERSQAAEMDVDAAV

SEQ ID NO: 28104 - DNA, 3621 bp, Muscodor strobelii
  misc_feature: SGI EST ID NO. CUFF.66223.0
  misc_feature: Variant of the nucleotide sequence at SEQ ID NO 28102
gctgtatacctccctgtagactaaacggttggttacggtgacagttattcgaaaatttaggtaggtgcaagcctgtcgtcgatcggaaaaagtcatcaaacacaatcaccgagtctcgcacatacacatccgcgagcaatgcgtacaaatacatacgcatgttacgtaggaccatcccaaaaattacactcattatacatgatatgctcagccatgtcgtatctattgtccatttacataacggcaaattagctcgctctccggaacttgctagggatattcgccgcaacgatcatcatgcgctcgagttgctcgagacggtcctcagcgtcttccatctcctcatgtttcctaaaatgctcaatatcctccgggtgagtcaaatcctcgagcttggtattctcatcgtggtacttctcccagtgatgaatctcatactcgtattcgtcgtcgccgtgatgccctggtcccgtaccgagatcgggaagtgtaccgccgcctgatatgaagcccaaaaactcgttgcgggagactagtccatcattatcctggtcgaggagttgcattatctgtttttgtaattcttgccgttttgaatagggtacgtccttgttggactcgtccatcaagccatatgtgcggaggatctcatcgggttcccagcggccgttgccgttgtagtcgtgtagggtgaagaaggaagaggggtcgaagtcggtcatgtgatgttcctctgttttcgtgtcgagtcagtgttttgttctctactatttgtctttgcggttgtttgctctgcggtgctcgaaaccgaggcgccgggagttgcacgacgtgaggacagaacgtaccggccatgtgtttagtcatccaattggcatcgtcggcgaccatgggcttctggtcgtggctgccgtggccgaggaccgcaggtgccagcaggctcagggccgcaaaggttgtggagcgcatgttgctgtggcttgcgcgttcgcgagtaagctcaaatagcaccggtgatgacgacgacttgcgcaaatgatctctcgtatttagtattccgatttctctcgtttcatcaatataagtgcgcctagcggataggcagcatttgggtcttgaagggatgcagaaaatagttcgaaagcgttgctgggagtttgaagcctcgtggttgctgtccagaggcgatccggatcgacagttactgcagggggccagatctcggccgtcttggcgtttcgttttagccgttgaagctcgaagcgttacagggatgtatgcgctaatgtcgcactgagcaatcgtccaatgtttccgtcaccacgacgtcaattgacatcaattacagcgaccgagccggaagtagagcttgtcacgcatgcggcgtaccacgaggggaggagcaaacccgagcaacgccatccgaactcgccattcgatcccgatatccgacgacaaagtctagtagtatcaatccgatatcaacttattgctggtcaatttactcggtctacttcggcttctttcgcacacaagcgacaattacgcgtgtggctgcgtcccactcgagaagcagagggcgcgggcctttgttcacgtcgcaatgagtcgaacattagagccgacgctctattcactactaccctcatactcagacaccctgccacagcctctactcgaactcgcatcctctctactcgcccaatcgcgcaacagtgccggcgctctaaaggctgaggaagaggttgcccgatcatatgcatgtgcccacatcgcctgcgaacgcctcaagatatctcttgatttgcccccgatccaagccaggccgcccatcccgcccagactatacaagcgtctatatacacatctcgacaatgtgcttccacagacctccgtcggcacgccgcggcgcgtccggacaccctcctccaaagcaagaggggcagatctattcgggagtgagaagcgaataccgtcgcgtgggacgcccagtaaagagtccactctagccaagtttaggtctcccgcagttaggggagacggcactcccaccaagtcagcatccaagcctcctgccatccccgctaagaggaaagcaggcggcatcggaagcaccctacctgcctggatacggcctacgattcaacttctttgcaaggaactagatcaagaccgtatcggacgcactgtcctagctggcatgcagactatcgttgcccctaatggcagacggacaaaggatgcatgggtaaatgaccacttaacacatctcctagccggcgtgtattgtctcgtatctgggcagctctttgtattcaagcaaggcaaggaactagacagcagacagtacacaaggatacgaaagtctgtactgaaggttcttgagcaagcacaggagaagatcaaagttcagggcatggatgaggatgagctttggatcggatggtctgatgtcaccgctaaggacgtggacaaggccatggctgaggtcatcagacaaggctggcagaaagaagactggtttgtcgggttcgaggagagtatgaaaacaacagggtcagaccaacaggagttggacgccgaggttgacgatgtcatgcacgtagatgaggatgatggccaacgggtcattgaaaaactgcacctccagagagcagacacgatgttgcagagtagatgggacatgacggatgagaagagagctgaatatcgccagtggaaagaggagatgctgcggttaatccaagagaaggaacgctcacaggccgcggaaatggatgttgatgccgctgtttaatcacggcaatgtttaagatacccagtcaagtaacttataatactctgtcagtcacatgagtatttgagacatttctcacgattctctacatgcaccacctacttaagctgaaaggtatgcatcgtaccggcttcagcagacttctaccaagtactccaaatctccaacaacgataaccataagcgtggtctttggggatgctaccccaagcgacgatcgctacccatccgtagacgttcgccaccgtattggagctagatcacgagtcaaatgtcgtcaatcaatctattttcctgctgatcctggtggtacaaaacgtcattctaattgcgccagagcaaggacgaacacacatataaacccagcggtcatcgcgatagaatagtatccacatttcgttctcatcacaccataacttctaataaagataagcaaaatcaagcaaaatgaagaacttcttccacaaacatcacacaacgcacgacgcacagccgtcgcattcaaaagacgtagcgcaagaaccaccagctgatgcttccaagaacgaatggaagttcaagggcgctactgatgccagcgaactagacaacaattttcctggtaccaatccgaggcacgagactgggcctccgcatgaagcgggcaacaatttcccgggagccagccctaatgatttgggacgatagaggtggtttggttgattaacttctacgctggactaaaattgatctaagattgtattgatatctgttagagagtaccattctaaggaaacattgcacatgctaggctttgaattttgtccacggcctcctatctaagga

SEQ ID NO: 28105 - DNA, 372 bp, Muscodor strobelii
  misc_feature: SGI cDNA ID NO. 569638
  misc_feature: Encodes the peptide sequence at SEQ ID NO 28106
atgccaagctacgagcagcacaggcagataggagtctatattcaagatctcctcaatgctggacaaggcctcccaaacccatctaaaaagggctgctactgcggcacctacgagataacgatgactaagcccgagtgtggtcatattctggagctacaagagtcgtacacaaaaatacgaacctcagcttcaaagaaatcgttgtggcgcagccttggaggaactggcttacaagttcttcaagatcttcaagcaaatctgactggtctttctcgaactggtgttgcgaaacggaaatttgaggaagctgaggaggtcgaagaatacgaggctgacggaactcaagagaagaagactttcaagaaagcgtga

SEQ ID NO: 28106 - protein, 123 aa, Muscodor strobelii
  misc_feature: SGI Peptide ID NO. 569638
MPSYEQHRQIGVYIQDLLNAGQGLPNPSKKGCYCGTYEITMTKPECGHILELQESYTKIRTSASKKSLWRSLGGTGLQVLQDLQANLTGLSRTGVAKRKFEEAEEVEEYEADGTQEKKTFKKA

SEQ ID NO: 28107 - DNA, 393 bp, Muscodor strobelii
  misc_feature: SGI cDNA ID NO. 569639
  misc_feature: Reduced expression when VOC is produced
  misc_feature: Encodes the peptide sequence at SEQ ID NO 28108
atgtatgcgactcgagtcctgcgccaggcggccgcccatgccgagcgcactcccttaattcgattcattggcaagcgagagattccctccaagatcgaccacacccctcaccctcacccagcctcgccatctggctctctgcccgccaacttcggcaagggcaacaacggcaactctcacacttctttctcttcgtatcgtgactccgcccagcagcacggccccctgggcaagtccattggtagaatccccgccgctcagctcggcccagtcgaggctcccaagggcacctacttcgaccgcagcgacctgccggcacgcttcagacgatcgcctttgaccatagccgaaattgaggccattgagactggtggcgccgctctcttcggatga

SEQ ID NO: 28108 - protein, 130 aa, Muscodor strobelii
  misc_feature: SGI Peptide ID NO. 569639
  misc_feature (1)..(129): NCBI GI: 116205696 Blast Desc: CHGG_02141 [Chaetomium globosum CBS 148.51] gi|88182738|gb|EAQ90206.1| CHGG_02141 [Chaetomium globosum CBS 148.51]
  misc_feature (1)..(130): NCBI GI: 171678223 Blast Desc: protein product [Podospora anserina] gi|170937181|emb|CAP61838.1| protein product [Podospora anserina]
  misc_feature (3)..(130): NCBI GI: 46138481 Blast Desc: FG10755.1 [Gibberella zeae PH-1]
  misc_feature (3)..(130): NCBI GI: 261354351 Blast Desc: conserved [Verticillium albo-atrum VaMs.102]
  misc_feature (3)..(124): NCBI GI: 85092531 Blast Desc: NCU08137 [Neurospora crassa OR74A] gi|28920868|gb|EAA30208.1| conserved [Neurospora crassa OR74A]
  misc_feature (3)..(124): NCBI GI: 256729173 Blast Desc: [Nectria haematococca mpVI 77-13-4]
  misc_feature (1)..(128): NCBI GI: 156059884 Blast Desc: SS1G_03955 [Sclerotinia sclerotiorum 1980] gi|154701741|gb|EDO01480.1| SS1G_03955 [Sclerotinia sclerotiorum 1980]
  misc_feature (1)..(129): NCBI GI: 39963404 Blast Desc: MGG_09743 [Magnaporthe grisea 70-15] gi|145015475|gb|EDK00012.1| MGG_09743 [Magnaporthe grisea 70-15]
  misc_feature (1)..(128): NCBI GI: 154292216 Blast Desc: BC1G_14191 [Botryotinia fuckeliana B05.10] gi|150846211|gb|EDN21404.1| BC1G_14191 [Botryotinia fuckeliana B05.10]
  misc_feature (1)..(129): NCBI GI: 70991457 Blast Desc: conserved [Aspergillus fumigatus Af293] gi|66848210|gb|EAL88539.1| conserved [Aspergillus fumigatus Af293] gi|159124133|gb|EDP49251.1| conserved [Aspergillus A1163]
  misc_feature: Useful for introducing or modulating the production of volatile compounds
MYATRVLRQAAAHAERTPLIRFIGKREIPSKIDHTPHPHPASPSGSLPANFGKGNNGNSHTSFSSYRDSAQQHGPLGKSIGRIPAAQLGPVEAPKGTYFDRSDLPARFRRSPLTIAEIEAIETGGAALFG

SEQ ID NO: 28109 - DNA, 1623 bp, Muscodor strobelii
  misc_feature: SGI EST ID NO. CUFF.66478.0
  misc_feature: Variant of the nucleotide sequence at SEQ ID NO 28107
tgcaaagtccgaagccgcaggagcgtagaaagtcggggaggaagagcacatcgtaccatcgaaaatcagcagggcgtgctgggattatcggcgctcggcgactagtactagagtacttcagttccgaaagctcccatcgaccgacttcttgacatttcgcccatctcaccgtgttctctttctctctgtccacctcagataaaccgtaatttcccttctctttctgccaattcgtttccctcgagaaagtcgtctcgaaatagactatcccaccatttgctttggacgtcatttcgactacaccaagcttagcaatccctgccaaccaagcgatcctagtcttgcaattagaatcaaaataaacttgaacaatcctcactagctttgcgataattatccgcttgccctcgacaccacctactaacgcgctcaacactgctttctgtgcatctcaaagcacctactatcttcgaccacaactacactttcaactgacgacttgtcaatccactgctgacgcctcgagctcttgcaccggaactccgagaatttcccgccaagttgactctcgcataaccggctgtcaaacaaagatccagaccctaggtcgcctcttttctctgtttcacaacacataacgtattcgcaatgtatgcgactcgagtcctgcgccaggcggccgcccatgccgagcgcactcccttaattcgattcattggcaagcgagagattccctccaagatcgaccacacccctcaccctcacccagcctcgccatctggctctctgcccgccaacttcggcaagggcaacaacggcaactctcacacttctttctcttcgtatcgtgactccgcccagcagcacggccccctgggcaagtccattggtagaatccccgccgctcagctcggcccagtcgaggctcccaagggcacctacttcgaccgcagcgacctgccggcacgcttcagacgatcgcctttgaccatagccgaaattgaggccattgagactggtggcgccgctctcttcggatgatatatctccgagagacgtggtcgagagttgtgtgaggcaaatgaagatgcgctctgattttgtacgataattgatgactgtgtatgaccaatcaaaagtggtgcaaaaaggagcgaaccgagacccatcacagaccgtttaatcagctcgtgaggggaccaagaagtaaaaagtggccgtgaaatcggtaaatcggagttccggcattgaccgcgatggagatgaagatgctcaaggaagctttaacaaagcatatactgctccttgagaatctgtttatcgcgtgattttgcgtatttgcaatattcgtattggggtcaccactataatctagatcgctggggaactatgataagattgtctacgagactcaatcttacagagaggggcgcgagacagtggtgtgtcgataggtatctacagaaataggcacgcaatgacattcgtcaaatcactcctcatcaatcccatttttttctctatgatctcgctcttcatgattgagcgaacaagtgacacggattttcaggttgaatcaagggccttcattggcgtacatgttctgtatacagcactcggccg

SEQ ID NO: 28110 - DNA, 468 bp, Muscodor strobelii
  misc_feature: SGI cDNA ID NO. 569640
  misc_feature: Reduced expression when VOC is produced
  misc_feature: Encodes the peptide sequence at SEQ ID NO 28111
atgtcgctcgtgtccggcgaaaagagcaacttccagttcatcatccgtttgttgaacacaaacgtcgacggcaagcagaatgccttgtactccttgacttccatcaagggtatcggtccccgtttcgccgacttgatcctcaagaaggccgatatcgacaagagcaagcgcgctggtgagctcactgccgaagagctcgagcgtgtcgtccagatcgtcaaggaccccgctgcctacaagattccttcctggttcctcaacagacagcgtgacatcgtcaccggccaagactctcactccatctcagctgctgttgacagcaagctccgtgaggatcttgagcgcctcaagaagatccgcgcccaccgtggtctccgtcactactggggccttcgtgtccgtggtcagcacaccaagaccactggccgccgcggtcgtaccgtcggtgtgtctaagaagaagggatag

SEQ ID NO: 28111 - protein, 155 aa, Muscodor strobelii
  misc_feature: SGI Peptide ID NO. 569640
  misc_feature (16)..(144): Pfam Id: PF00416 Pfam Desc: Ribosomal protein S13/S18
  misc_feature (1)..(155): NCBI GI: 39941500 Blast Desc: 40S ribosomal protein S18 [Magnaporthe grisea 70-15] gi|59802871|gb|AAX07649.1| 40S ribosomal protein S18-like protein [Magnaporthe grisea] gi|145022352|gb|EDK06372.1| 40S ribosomal
  misc_feature (1)..(155): NCBI GI: 119473095 Blast Desc: ribosomal protein S13p/S18e [Neosartorya fischeri NRRL 181] gi|119406646|gb|EAW16597.1| ribosomal protein S13p/S18e [Neosartorya fischeri NRRL 181]
  misc_feature (2)..(155): NCBI GI: 242772774 Blast Desc: ribosomal protein S13p/S18e [Talaromyces stipitatus ATCC 10500] gi|218721724|gb|EED21142.1| ribosomal protein S13p/S18e [Talaromyces stipitatus ATCC 10500]
  misc_feature (1)..(155): NCBI GI: 212531369 Blast Desc: ribosomal protein S13p/S18e [Penicillium marneffei ATCC 18224] gi|210071205|gb|EEA25294.1| ribosomal protein S13p/S18e [Penicillium marneffei ATCC 18224]
  misc_feature (1)..(155): NCBI GI: 164429137 Blast Desc: 40S ribosomal protein S18 [Neurospora crassa OR74A] gi|157072424|gb|EAA27558.2| 40S ribosomal protein S18 [Neurospora crassa OR74A]
  misc_feature (1)..(155): NCBI GI: 116207686 Blast Desc: CHGG_03136 [Chaetomium globosum CBS 148.51] gi|88183733|gb|EAQ91201.1| CHGG_03136 [Chaetomium globosum CBS 148.51]
  misc_feature (1)..(155): NCBI GI: 119196879 Blast Desc: 40S ribosomal protein S18 [Coccidioides immitis RS] gi|240110760|gb|EER28916.1| 40S ribosomal protein S18, [Coccidioides posadasii C735 delta SOWgp]
  misc_feature (1)..(154): NCBI GI: 121700288 Blast Desc: ribosomal protein S13p/S18e [Aspergillus clavatus NRRL 1] gi|119396551|gb|EAW06983.1| ribosomal protein S13p/S18e [Aspergillus clavatus NRRL 1]
  misc_feature (1)..(155): NCBI GI: 169598492 Blast Desc: SNOG_02050 [Phaeosphaeria nodorum SN15] gi|160704404|gb|EAT90262.2| SNOG_02050 [Phaeosphaeria nodorum SN15]
  misc_feature (1)..(155): NCBI GI: 255946732 Blast Desc: Pc22g00880 [Penicillium chrysogenum Wisconsin 54-1255] gi|211591150|emb|CAP97376.1| Pc22g00880 [Penicillium chrysogenum Wisconsin 54-1255]
  misc_feature: Useful for introducing or modulating the production of volatile compounds
MSLVSGEKSNFQFIIRLLNTNVDGKQNALYSLTSIKGIGPRFADLILKKADIDKSKRAGELTAEELERVVQIVKDPAAYKIPSWFLNRQRDIVTGQDSHSISAAVDSKLREDLERLKKIRAHRGLRHYWGLRVRGQHTKTTGRRGRTVGVSKKKG

SEQ ID NO: 28112 - DNA, 1360 bp, Muscodor strobelii
  misc_feature: SGI EST ID NO. CUFF.66950.0
  misc_feature: Variant of the nucleotide sequence at SEQ ID NO 28110
cggagcggggttctagggtaggcccgcaatacagtgaggcgagccaattaaacaggcaaggcttcggtgccggaagaatctagcgcccggaccacacccgcacacacaaccctcctctaccaaaaatcgcccaaaaagttgtatcgtgatctgttccgcttcttcacatccatcaccgatcgtcaaccacacaagccgccaccatgtcgctcgtgtccggcgaaaagagcaacttccagttcatcatccgtttgttgaacacaaacgtcgacggcaagcagaatgccttgtactccttgacttccatcaagggtatcggtccccgtttcgccgacttgatcctcaagaaggccgatatcgacaagagcaagcgcgctggtgagctcactgccgaagagctcgagcgtgtcgtccagatcgtcaaggaccccgctgcctacaagattccttcctggttcctcaacagacagcgtgacatcgtcaccggccaagactctcactccatctcagctgctgttgacagcaagctccgtgaggatcttgagcgcctcaagaagatccgcgcccaccgtggtctccgtcactactggggccttcgtgtccgtggtcagcacaccaagaccactggccgccgcggtcgtaccgtcggtgtgtctaagaagaagggatagagaacgacagtggatgtggtgggaaatggatgatctttgggacggcgttgagggcatacacccaactgcgaacctattatactggattttcggcgtactagctgtgtaaatgctggacgaggtctgagattcacggtttttcaaaaggttcttctgcacccatgaataaataagcatgaaatgacgttacccaaataattctcgattctgtttcgagagctcgtgagcagtcccatggcttgagttgggttgtccttctgtgatgtgcgaaatatgacaagtgtctacatgtttctatgggtgcgaaacctggtcgatttcgaaatggcatatggcatgtggctcatgaataaagctgagtggctgtcagaatccatctagagtcgaggtctaagtttgtgactaaataccccaaagccgactcccgagtttcttactcgaaatgctgatctattatgtataccctcagtctaatggcaatgtccatgaacagcaaaaatgggcaacagtcttgaaattagcacgctacaaacactccccgctaagcacttcaaaggagatatcaggcgccagttgacacgcactaagatgttgcaaacactgtggcgatggcaacaatacatagtatgtacgcaactaggcatatccagcatgtaccgatagcgcaccgcaatatgtgactagtcaag

SEQ ID NO: 28113 - DNA, 3315 bp, Muscodor strobelii
  misc_feature: SGI cDNA ID NO. 569641
  misc_feature: Encodes the peptide sequence at SEQ ID NO 28114
atggcatcgattggcagaattacctcagctgctttgtcgcagtctaatgagcttactgtggcagccgcgaccttcaatctcgactttgcgctcttgaaattcgaggctccaagagaatttagcgcctgcgggaatgcactgtctctgtccagacgcaccgatgcagaagatggacaagcacatgttactgcaaggaagctcggtgctcttttccaatccatcgtaccccagatacctcatctcattaaagcttatggcacacgtgtatcagaaatatctgtatctgcggagactaagtgcgataaacatggcaccggtatcttcgcaaaacatacgggcttcgatggtacaagtatctgggccgcggcaacttctggccaaggagccattgcagttcatctacttgcgtgtatgatcgcacgaatgtggaatggcaacgaagctacagctgtatgggtcgagctagtagagaagcgtaaggaacaaatattaggagggttcgaagaaggaagtgtttccgcacttgggagcatcatggctgctcggcaagaattgagccgtgatcgtctatcgagatgggatgcaagcgctcgctcgtggctgcagacagcagacaaagtcaagtcattccaacaaacacaactcatgctaattctcaataatatccacgtccaagtaaacactatcaaacataccttcgacagtgtcacttctgcttggacaatggcactgacagctatggagactttggtacaaggaattccccaacgaatcactaacggcgcgactctccttgcaatttcatcctggcatttatatcctgacatgcatgtcttgactagtgaagtcaaagctatcagtcagggagatgagctcatggtcggcgctacacttacgctatccactcacaactcggaagaaagcttgggaggagttttttggtccctgcccctctcccgcatgcgatattattcgcctccagtaatgatagagcgccaagttgcttctaatacatcttgcgtgtctcttgaggcttttcgtattgtctgcctcggcgctctcatggcgaaatggattggagagcacctagatgtcgataaatgctgcgaccttattctgcaaatattggagaagggtgggcttagccagaaatgcccggaatggtctactgttttccggaaggcggcgaaagactacattacctctctagggactcaacgccaacgttaccgccaactacttagtctagggatgcgtcgaagcggcacgtttctgggcagcgcattcacgcaagccataccatttttcggattatgtgagcctaggaacctcttcagtctatttgaaaatgaggaggatattataaagtttctacgccacatagcggccatgcttaatcctggcacaacagatctaattatacgatatcagcgcaagagcccgtctagcagcttacagaacgtctattgcacagcatttccaatacgccaagtgactaggaaaagaactattgatggtgatcgtgcaaaagaagctcatcaccgttggatcattggtacgacgatggatgataccgtttgcgaccttctacctggattaaaatctggacgagccgcgtacgaattgggtctgcaatccgatccggaagtagccagtatagtgacttgcggaaacataaatttcacccatccagatgtccatcacccggaacagatacgcgtcacgttcaagaaccatagttcttcagaccaaaggcttacaatttgcaattcctgcagattgttcaaagagggttgtgcgatggaagttgcgccgtgtgatcaatgtgatttctgcacgagttttccttatcatgaagactctacgattgaacgtcgcccgaattgcccgtcgtgtgtaaatacggatatcaaagccatgatggacagcattggcgagaactggtctttcgttcgccggaaagacgtagtatactacaccgatatggacgaatttcgttttcataagccgaaagcgaaaccagcatattacgaactcctctggggcgacgcggaaacttacggaatattcctgaatcgattttttacatcaaaatctgcaccgctaatatcaaggtccgtatctaggcctgcctttgagaatatcgagtttgctcttcaatcgcgcgctctctctcggtctggactagcttcacttcttgaacaatgggcccaaggacgagagggctgcagtccatggactactttgcgcgctttgaggcatatcgatgagatttatgaatctttggaaggagctagaattagccttaaaattctagaatctaagattggcgaaagtaaatgggctagatatgctccacggaaagcatgggaacgatggccccatcataaaacgcggcatgtcaagttcgcttgcattgccatgctagagtcgggtgaatttgacatagatccgtcgacgctgagcaatgtagtagctcttgccagcggcgactccatttttattgattctgctttactatacgatcctatcacagccaagttctccccaagaatcgagcgagttctcgggaatcttgggagatcagagctcgcgtttatggttccaacggcaatgcccctactgaaaccggcggacccaggattgtggcacgttgtcaaccattacactttcgacggccagttcctgaacgcatttactggcacatctctccatctgagtcttacggactacgaattgccaatagatctaggcaatcgtggtctgcgcgataagcaagctgtcatattggaatcagtcatatctctgaacaacaacggcagaccaataggagacatcgatgccgtgatggcattagatcttctatctgatccagtcgctattgacaaacaacatggaaatcctctcgtagaggaaggcttctcgtttgatcgatatctcgaagaagaatatgacggtttatctgacccttatattggcgaaaatcgtgctgcttccacggagagtcataatcacgaccaattgattgccgaaatcgctggcaaaacatgcagccactgcacagactgcaagcatgtaaacgaaatgggcgatcatgatctcaaatctcttgattgctgggaagagattctcgatcctcctgccattggatgtgggatagttagagcagccggtaattgggaagctagagttgcagctattgccgtctgcaggcacctgggtaagagggttctggttctcccaccagatgcctgtttgcgttgtctcgaggaatgcaaaggttctgattctaagtacgacataatcatagcttaa

SEQ ID NO: 28114 - protein, 1104 aa, Muscodor strobelii
  misc_feature: SGI Peptide ID NO. 569641
  misc_feature (9)..(332): NCBI GI: 169598688 Blast Desc: SNOG_02149 [Phaeosphaeria nodorum SN15] gi|111069241|gb|EAT90361.1| SNOG_02149 [Phaeosphaeria nodorum SN15]
  misc_feature (3)..(528): NCBI GI: 119494152 Blast Desc: NFIA_007650 [Neosartorya fischeri NRRL 181] gi|119412148|gb|EAW22089.1| conserved [Neosartorya fischeri NRRL 181]
  misc_feature (1)..(543): NCBI GI: 256731930 Blast Desc: NECHADRAFT_80807 [Nectria haematococca mpVI 77-13-4]
  misc_feature (3)..(517): NCBI GI: 115492241 Blast Desc: [Aspergillus terreus NIH2624] gi|114197608|gb|EAU39308.1| [Aspergillus terreus NIH2624]
  misc_feature (1)..(517): NCBI GI: 46137867 Blast Desc: FG10449.1 [Gibberella zeae PH-1]
  misc_feature (1)..(516): NCBI GI: 238844746 Blast Desc: conserved [Microsporum canis CBS 113480]
  misc_feature (3)..(377): NCBI GI: 169604668 Blast Desc: SNOG_05349 [Phaeosphaeria nodorum SN15] gi|160706620|gb|EAT87740.2| SNOG_05349 [Phaeosphaeria nodorum SN15]
  misc_feature (3)..(355): NCBI GI: 240111731 Blast Desc: CPC735_011940 [Coccidioides posadasii C735 delta SOWgp]
  misc_feature (3)..(460): NCBI GI: 169605903 Blast Desc: SNOG_05984 [Phaeosphaeria nodorum SN15] gi|111065928|gb|EAT87048.1| SNOG_05984 [Phaeosphaeria nodorum SN15]
  misc_feature (2)..(482): NCBI GI: 145244114 Blast Desc: An11g05770 [Aspergillus niger] gi|134079251|emb|CAK40734.1| [Aspergillus niger]
MASIGRITSAALSQSNELTVAAATFNLDFALLKFEAPREFSACGNALSLSRRTDAEDGQAHVTARKLGALFQSIVPQIPHLIKAYGTRVSEISVSAETKCDKHGTGIFAKHTGFDGTSIWAAATSGQGAIAVHLLACMIARMWNGNEATAVWVELVEKRKEQILGGFEEGSVSALGSIMAARQELSRDRLSRWDASARSWLQTADKVKSFQQTQLMLILNNIHVQVNTIKHTFDSVTSAWTMALTAMETLVQGIPQRITNGATLLAISSWHLYPDMHVLTSEVKAISQGDELMVGATLTLSTHNSEESLGGVFWSLPLSRMRYYSPPVMIERQVASNTSCVSLEAFRIVCLGALMAKWIGEHLDVDKCCDLILQILEKGGLSQKCPEWSTVFRKAAKDYITSLGTQRQRYRQLLSLGMRRSGTFLGSAFTQAIPFFGLCEPRNLFSLFENEEDIIKFLRHIAAMLNPGTTDLIIRYQRKSPSSSLQNVYCTAFPIRQVTRKRTIDGDRAKEAHHRWIIGTTMDDTVCDLLPGLKSGRAAYELGLQSDPEVASIVTCGNINFTHPDVHHPEQIRVTFKNHSSSDQRLTICNSCRLFKEGCAMEVAPCDQCDFCTSFPYHEDSTIERRPNCPSCVNTDIKAMMDSIGENWSFVRRKDVVYYTDMDEFRFHKPKAKPAYYELLWGDAETYGIFLNRFFTSKSAPLISRSVSRPAFENIEFALQSRALSRSGLASLLEQWAQGREGCSPWTTLRALRHIDEIYESLEGARISLKILESKIGESKWARYAPRKAWERWPHHKTRHVKFACIAMLESGEFDIDPSTLSNVVALASGDSIFIDSALLYDPITAKFSPRIERVLGNLGRSELAFMVPTAMPLLKPADPGLWHVVNHYTFDGQFLNAFTGTSLHLSLTDYELPIDLGNRGLRDKQAVILESVISLNNNGRPIGDIDAVMALDLLSDPVAIDKQHGNPLVEEGFSFDRYLEEEYDGLSDPYIGENRAASTESHNHDQLIAEIAGKTCSHCTDCKHVNEMGDHDLKSLDCWEEILDPPAIGCGIVRAAGNWEARVAAIAVCRHLGKRVLVLPPDACLRCLEECKGSDSKYDIIIA

SEQ ID NO: 28115 - DNA, 4128 bp, Muscodor strobelii
  misc_feature: SGI EST ID NO. CUFF.66211.0
  misc_feature: Variant of the nucleotide sequence at SEQ ID NO 28113
aattaatatagtgtctttatttgagccaaaaagatggcatcgattggcagaattacctcagctgctttgtcgcagtctaatgagcttactgtggcagccgcgaccttcaatctcgactttgcgctcttgaaattcgaggctccaagagaatttagcgcctgcgggaatgcactgtctctgtccagacgcaccgatgcagaagatggacaagcacatgttactgcaaggaagctcggtgctcttttccaatccatcgtaccccagatacctcatctcattaaagcttatggcacacgtgtatcagaaatatctgtatctgcggagactaagtgcgataaacatggcaccggtatcttcgcaaaacatacgggcttcgatggtacaagtatctgggccgcggcaacttctggccaaggagccattgcagttcatctacttgcgtgtatgatcgcacgaatgtggaatggcaacgaagctacagctgtatgggtcgagctagtagagaagcgtaaggaacaaatattaggagggttcgaagaaggaagtgtttccgcacttgggagcatcatggctgctcggcaagaattgagccgtgatcgtctatcgagatgggatgcaagcgctcgctcgtggctgcagacagcagacaaagtcaagtcattccaacaaacacaactcatgctaattctcaataatatccacgtccaagtaaacactatcaaacataccttcgacagtgtcacttctgcttggacaatggcactgacagctatggagactttggtacaaggaattccccaacgaatcactaacggcgcgactctccttgcaatttcatcctggcatttatatcctgacatgcatgtcttgactagtgaagtcaaagctatcagtcagggagatgagctcatggtcggcgctacacttacgctatccactcacaactcggaagaaagcttgggaggagttttttggtccctgcccctctcccgcatgcgatattattcgcctccagtaatgatagagcgccaagttgcttctaatacatcttgcgtgtctcttgaggcttttcgtattgtctgcctcggcgctctcatggcgaaatggattggagagcacctagatgtcgataaatgctgcgaccttattctgcaaatattggagaagggtgggcttagccagaaatgcccggaatggtctactgttttccggaaggcggcgaaagactacattacctctctagggactcaacgccaacgttaccgccaactacttagtctagggatgcgtcgaagcggcacgtttctgggcagcgcattcacgcaagccataccatttttcggattatgtgagcctaggaacctcttcagtctatttgaaaatgaggaggatattataaagtttctacgccacatagcggccatgcttaatcctggcacaacagatctaattatacgatatcagcgcaagagcccgtctagcagcttacagaacgtctattgcacagcatttccaatacgccaagtgactaggaaaagaactattgatggtgatcgtgcaaaagaagctcatcaccgttggatcattggtacgacgatggatgataccgtttgcgaccttctacctggattaaaatctggacgagccgcgtacgaattgggtctgcaatccgatccggaagtagccagtatagtgacttgcggaaacataaatttcacccatccagatgtccatcacccggaacagatacgcgtcacgttcaagaaccatagttcttcagaccaaaggcttacaatttgcaattcctgcagattgttcaaagagggttgtgcgatggaagttgcgccgtgtgatcaatgtgatttctgcacgagttttccttatcatgaagactctacgattgaacgtcgcccgaattgcccgtcgtgtgtaaatacggatatcaaagccatgatggacagcattggcgagaactggtctttcgttcgccggaaagacgtagtatactacaccgatatggacgaatttcgttttcataagccgaaagcgaaaccagcatattacgaactcctctggggcgacgcggaaacttacggaatattcctgaatcgattttttacatcaaaatctgcaccgctaatatcaaggtccgtatctaggcctgcctttgagaatatcgagtttgctcttcaatcgcgcgctctctctcggtctggactagcttcacttcttgaacaatgggcccaaggacgagagggctgcagtccatggactactttgcgcgctttgaggcatatcgatgagatttatgaatctttggaaggagctagaattagccttaaaattctagaatctaagattggcgaaagtaaatgggctagatatgctccacggaaagcatgggaacgatggccccatcataaaacgcggcatgtcaagttcgcttgcattgccatgctagagtcgggtgaatttgacatagatccgtcgacgctgagcaatgtagtagctcttgccagcggcgactccatttttattgattctgctttactatacgatcctatcacagccaagttctccccaagaatcgagcgagttctcgggaatcttgggagatcagagctcgcgtttatggttccaacggcaatgcccctactgaaaccggcggacccaggattgtggcacgttgtcaaccattacactttcgacggccagttcctgaacgcatttactggcacatctctccatctgagtcttacggactacgaattgccaatagatctaggcaatcgtggtctgcgcgataagcaagctgtcatattggaatcagtcatatctctgaacaacaacggcagaccaataggagacatcgatgccgtgatggcattagatcttctatctgatccagtcgctattgacaaacaacatggaaatcctctcgtagaggaaggcttctcgtttgatcgatatctcgaagaagaatatgacggtttatctgacccttatattggcgaaaatcgtgctgcttccacggagagtcataatcacgaccaattgattgccgaaatcgctggcaaaacatgcagccactgcacagactgcaagcatgtaaacgaaatgggcgatcatgatctcaaatctcttgattgctgggaagagattctcgatcctcctgccattggatgtgggatagttagagcagccggtaattgggaagctagagttgcagctattgccgtctgcaggcacctgggtaagagggttctggttctcccaccagatgcctgtttgcgttgtctcgaggaatgcaaaggttctgattctaagtacgacataatcatagcttaatgatgcggacgaccatttgagttgttctctacggtacatcaaaaacggaatatgtatcataatctcttgcaattactagattagagtggaattttgtacggtcatcgataaattctttaatattttattttcataacatggccatgtcggttatgaatcattttacgacgaggcgtagttaagatagtcagatgatttatccttagtgccatcactatcccatatacctcacggccctcgcgacggatcttcttctttcgtgccttcgctgatccttcaccttcttgctgcgagtctcttggaagggtcctaaatcattttaggcgaggtaccccaattgcttttcgcgtttttcgtttcggttgaaggatgtgacctcgcgtgcaagtgtggcgtaatcatggaggttcgatttgtttttgagctttccaaggatttttatgaccatttttttgaaaccggctattcgggctgtcttatggcgggagaagtggttgggctatttcgtttcggcgctatggagattattatctttgttttcggggagagacattttggatcgttgagtgaaaaagtgtagtcttatgagacaaaaagatcaggcaaaagttggatagtcaaacagcgagctgcgtagatgagtttattgtcggatcgaatctaggtcttttgtttctacgaatcgagacgcgttctaacgtactcagttactcgtgggcaagaaggatatctccccatacgtcggacgtccgattagcagtagcgacatctgtaagacag

SEQ ID NO: 28116 - DNA, 624 bp, Muscodor strobelii
  misc_feature: SGI cDNA ID NO. 569642
  misc_feature: Encodes the peptide sequence at SEQ ID NO 28117
atggtaactctacggcaaaaactagtctctaaatggggtggtttagacacagtccatatctgtgctggcgttggagcagttaaacctgttaggcaactcgcgggtaatgccgacgagataggcgtcgagcacgcagccgagatcgcgcaacgggcagcagacgtgaattttaagggggtactcatcgcgacgacggccctcataccagcgttgaaagagacgtcgcttgcgcccgccattctgcttgtatcctcagtcgccgcagtaatacccgcacccacacgagctctctacgccgcgacgaaagcagcgtcccttctctttttccagagccttgccatcgagcaaccgagtatcgcgttcaccaccgtgttacctgccacaatcgaaggtgattttcgtgcatcggctatcgacgcagatccagatcaaaaggcagagacgaacaagaagggtctcaagttggatcatgttgctcgcgtctgtacagatgctgtagatgggcagaaacgagggaatatcatcttgccttggtttccatacgccattgcgcatcatttgtactatctttggccatcgttgatcgaacgacaagcgaggaaaaagtacgatttcacaccatga

SEQ ID NO: 28117 - protein, 207 aa, Muscodor strobelii
  misc_feature: SGI Peptide ID NO. 569642
  misc_feature (11)..(207): NCBI GI: 169843187 Blast Desc: CC1G_12165 [Coprinopsis cinerea okayama7#130] gi|116510606|gb|EAU93501.1| CC1G_12165 [Coprinopsis cinerea okayama7#130]
  misc_feature (4)..(128): NCBI GI: 71003488 Blast Desc: UM00267.1 [Ustilago maydis 521] gi|46095792|gb|EAK81025.1| [Ustilago maydis 521]
  misc_feature (1)..(181): NCBI GI: 164663371 Blast Desc: MGL_0582 [Malassezia globosa CBS 7966] gi|159106710|gb|EDP45593.1| MGL_0582 [Malassezia globosa CBS 7966]
  misc_feature (1)..(149): NCBI GI: 134113218 Blast Desc: CNBF3140 [Cryptococcus neoformans var. neoformans B-3501A] gi|50257278|gb|EAL19987.1| CNBF3140 [Cryptococcus neoformans var. neoformans B-3501A]
  misc_feature (1)..(149): NCBI GI: 58268704 Blast Desc: CNF01570 [Cryptococcus neoformans var. neoformans JEC21] gi|57227743|gb|AAW44201.1| CNF01570 [Cryptococcus neoformans var. neoformans JEC21]
  misc_feature (3)..(202): NCBI GI: 268637905 Blast Desc: short-chain dehydrogenase/reductase family protein [Dictyostelium discoideum AX4] gi|256012932|gb|EAL66242.2| short-chain dehydrogenase/reductase family protein [Dictyostelium
  misc_feature (48)..(202): NCBI GI: 281209153 Blast Desc: short-chain dehydrogenase/reductase family protein [Polysphondylium pallidum PN500]
  misc_feature (54)..(201): NCBI GI: 94970282 Blast Desc: short-chain dehydrogenase/reductase SDR [Candidatus Koribacter versatilis Ellin345] gi|94552332|gb|ABF42256.1| short-chain dehydrogenase/reductase SDR [Candidatus Koribacter
  misc_feature (43)..(194): NCBI GI: 72126057 Blast Desc: : similar to ENSANGP00000021187 [Strongylocentrotus purpuratus] gi|115711616|ref|XP_001203920.1| : similar to ENSANGP00000021187 [Strongylocentrotus purpuratus]
  misc_feature (48)..(201): NCBI GI: 170724663 Blast Desc: short-chain dehydrogenase/reductase SDR [Shewanella woodyi ATCC 51908] gi|169810010|gb|ACA84594.1| short-chain dehydrogenase/reductase SDR [Shewanella woodyi ATCC 51908]
  misc_feature (4)..(156): SWISSPROT Homolog: EC 1.1.1.153 Sepiapterin reductase
MVTLRQKLVSKWGGLDTVHICAGVGAVKPVRQLAGNADEIGVEHAAEIAQRAADVNFKGVLIATTALIPALKETSLAPAILLVSSVAAVIPAPTRALYAATKAASLLFFQSLAIEQPSIAFTTVLPATIEGDFRASAIDADPDQKAETNKKGLKLDHVARVCTDAVDGQKRGNIILPWFPYAIAHHLYYLWPSLIERQARKKYDFTP

SEQ ID NO: 28118 - DNA, 3068 bp, Muscodor strobelii
  misc_feature: SGI EST ID NO. CUFF.66214.0
  misc_feature: Variant of the nucleotide sequence at SEQ ID NO 28116
ttcattctacgaggcgacatttctactctagatacatgtcactgtaaatcagatgcatataattcagcattgtaatgccccgaacacagatccttcgatggtgtcctaaactccccacggcggtgccgtatgtcaatattcaagccgacatctacaaagacatgattataccagctaatactacactagttatgaatacgtgggcgatcagccactatcccaatgagtatgaaaatctagaggcattcgattcccggcgtttccaaagcacgcgcttggcttgaagactatactcaatgtcatgggatggtctcggatgaatcaacagagaagactctagttcctacaagtttccccgtcggacttataggtttggagatgagggaggatgtatgctgatcagcgcatgactaagaatagcctgacgatgaccatggcgatgctattgtggtcgtttgacatgtgcttccaaatggagttgtatggcttgacacgagcctgaatgcgcggacggacgcgatatgaatagctctaaagtatttcgacgtgcattttattttgaggctagaggttgctagaggttgaaagggatgttgttgaagatgaatggaaacgtgtatattctttccttcggaggtttgagtacctggtggtggtgccgataagttgatcatgcaactaagcgatatatgcactattgacgtcgcagcttcctctcacgcatagcatctaaaaatgtacacctttcatcaatatcaactagaccatttgaccgacaagacctgcaccttgggtctcaaatcattagaggttcaaggtgatcgtaatagttcgctgcgaatacacaacattatcccaactgacaaatcatcacaagtacctaacttgcctctgatccaaatatggagccacttctagctgcaataacagcaatcactgctggttttatccttcatcgcgcctctaaagtgagagcacgaaagaggaccttacatattaagccggcggaagaacgcgtactgatacttggagcctcaagcggactcggccgcacgctcacaaaacactatgtatctcgaggagcaaaagtatgcgcagttgctcgacggaagaaacagctcaatgagctagcagcagagtgtggagatcgttgtcttgcaataacatcagacttcaccaattcctcagatatggtaactctacggcaaaaactagtctctaaatggggtggtttagacacagtccatatctgtgctggcgttggagcagttaaacctgttaggcaactcgcgggtaatgccgacgagataggcgtcgagcacgcagccgagatcgcgcaacgggcagcagacgtgaattttaagggggtactcatcgcgacgacggccctcataccagcgttgaaagagacgtcgcttgcgcccgccattctgcttgtatcctcagtcgccgcagtaatacccgcacccacacgagctctctacgccgcgacgaaagcagcgtcccttctctttttccagagccttgccatcgagcaaccgagtatcgcgttcaccaccgtgttacctgccacaatcgaaggtgattttcgtgcatcggctatcgacgcagatccagatcaaaaggcagagacgaacaagaagggtctcaagttggatcatgttgctcgcgtctgtacagatgctgtagatgggcagaaacgagggaatatcatcttgccttggtttccatacgccattgcgcatcatttgtactatctttggccatcgttgatcgaacgacaagcgaggaaaaagtacgatttcacaccatgatgtcgaacgcttcttccgtcatcccgcaaataatctggtagtttgcaccgtcatctacgcaagtgaagggatgttagaatctccgatatctgaaagaaactatgtgtcatatcatcaagcgcgcatgtgacaatggatggcagtgcgtttccatgttctacgcgttctatcttcggtctcttttcgatggttgtaataagaggctctgctccaacgatgctagtaggccagggtatacggatcctctcagcctcgctctcgtttgcgctgtgcgcttggaacaacaaaaactcggaattgaaacgtctttttttgtcgctcggacagactgttctagcctgtgatcgaccgatccaaccgacaagctgcttaaaatgcaaacctttagacttgacatgtgaatgccattaaattttaggtggggtcgtggatcggcaagtccaagtccggatccaccactaccgagaaagattgacaggggacttttactgcctcatccgagatagatcgcttgacatcgtgataatctctcaaccgacttaaagagcgtcaatttctgatgattgtatactggagctccatacaaccgcatccccggggaatacttgccacagtgctgtcttatgtacctaggcaatgacagtggcgaaatactaaaccgaggtgataaggtttctgggctggtcatgaagtatcgaactcctcgtgagattatgtatgcaagacgaaacgaaatatcgtctaccacgaaggaaaagaatgaccatcatcccaaataggataccatggcggctcgggaaattttagacgatctacagactgcatgatataccatgcaaacactcaacggtgattcttctcgaccggtcatatcccccgaatttgcgtatgcacgtacaagtaaccattccgcgagacgaggaccgaaatatcgaggaagttgatccagttgaccagttggttgaattagacagctctcggctagaaataggcgacatcttactgaccggccggtgtggctgatggatggctgcgtggagctttcattcgctattccgaggagatcgtatcttataggcggggacagccggcaagctatcgccaagcatatgcacagtcaaagaaatagatcagagctaataatttttggtgtactttgctccttcacaagaggtacccagtcaccatgagctgtgccggatcaattcctccatcgctctctctatcttgcagattttggtgttttgagaagcc

SEQ ID NO: 28119 - DNA, 552 bp, Muscodor strobelii
  misc_feature: SGI cDNA ID NO. 569643
  misc_feature: Encodes the peptide sequence at SEQ ID NO 28120
atggcgtctcaagttaacggtgaggtgcaccctgcctcggcgactttgtcgcatatcacaggctaccctgtcgtcaacgacagcatctcctacttcaagaagaacccttatgcccagaaatccctagcacttggagattctgcctaccagactttcgccaaacccgtactgccgtatctgaacaagccttaccaatacgtgtcaccttacgtcaaaaaggccgatgccattggcgatgacgcattatccaagattgaccaacgtcttcccgttctgaagaagtcaactgatgagctctggaccgacggcaagaacattgtattcttccccattcgcaagggcctagagacgaaagatcatgtattcgatgtctaccacgccgagtgcaagaaagtcggcggcgaaggcgtcgtcacagttggcaaagctcttatctctacgggactagtagtcacatcagagactctgcagtgggttggtgacatgctacgagctggcaaagtccaggcgaaggaggcgtcggaagaagccgctcagcaggtgaaccattaa

SEQ ID NO: 28120 - protein, 183 aa, Muscodor strobelii
  misc_feature: SGI Peptide ID NO. 569643
  misc_feature (1)..(176): NCBI GI: 156054945 Blast Desc: SS1G_06319 [Sclerotinia sclerotiorum 1980] gi|154704099|gb|EDO03838.1| SS1G_06319 [Sclerotinia sclerotiorum 1980]
  misc_feature (4)..(180): NCBI GI: 112430765 Blast Desc: perilipin-like protein [Metarhizium anisopliae] gi|112430767|gb|ABI18162.1| perilipin-like protein [Metarhizium anisopliae]
  misc_feature (3)..(176): NCBI GI: 603050 Blast Desc: CAP20 [Colletotrichum gloeosporioides]
  misc_feature (3)..(178): NCBI GI: 261352970 Blast Desc: CAP20 [Verticillium albo-atrum VaMs.102]
  misc_feature (1)..(180): NCBI GI: 46121597 Blast Desc: FG05177.1 [Gibberella zeae PH-1]
  misc_feature (4)..(180): NCBI GI: 256732533 Blast Desc: NECHADRAFT_102532 [Nectria haematococca mpVI 77-13-4]
  misc_feature (1)..(176): NCBI GI: 14582562 Blast Desc: AF283105_1 CAP20-like protein [Blumeria graminis]
  misc_feature (5)..(183): NCBI GI: 212526882 Blast Desc: pathogenesis associated protein Cap20, [Penicillium marneffei ATCC 18224] gi|212526884|ref|XP_002143599.1| pathogenesis associated protein Cap20, [Penicillium marneffei
  misc_feature (1)..(173): NCBI GI: 145606304 Blast Desc: MGG_11916 [Magnaporthe grisea 70-15] gi|145014004|gb|EDJ98645.1| MGG_11916 [Magnaporthe grisea 70-15]
  misc_feature (5)..(183): NCBI GI: 242782034 Blast Desc: pathogenesis associated protein Cap20, [Talaromyces stipitatus ATCC 10500] gi|242782038|ref|XP_002479922.1| pathogenesis associated protein Cap20, [Talaromyces stipitatus
MASQVNGEVHPASATLSHITGYPVVNDSISYFKKNPYAQKSLALGDSAYQTFAKPVLPYLNKPYQYVSPYVKKADAIGDDALSKIDQRLPVLKKSTDELWTDGKNIVFFPIRKGLETKDHVFDVYHAECKKVGGEGVVTVGKALISTGLVVTSETLQWVGDMLRAGKVQAKEASEEAAQQVNH

SEQ ID NO: 28121 - DNA, 1748 bp, Muscodor strobelii
  misc_feature: SGI EST ID NO. CUFF.66299.0
  misc_feature: Variant of the nucleotide sequence at SEQ ID NO 28119
cgagagtacttgagtatgtacctagtcaattagaaggctctcgtatatgtcttggagctctacccacagaattgattccttgctggtattgaagagcaattgagcactcaatagccgatcgacgttgcttccttcatccttgtctcccaagtagtgcgacctactagattgcctcacgatatcacccaacattcctgccgtcctgaaacctgatatagctcgcagtacctctggagccagagcttaagcttcttacctccccctcccttccctcttcataacggacgtgcaaccttaattgtctcccaccatccacaccctcactgcccgtctcgcaaccgtattccccgtcctcctacaaccttcgtttagctttcagctactgcgcagcaccgtagctctccaagcctccggtctcgatcgtcttgcctctcggctatcagaatatcatcaccgcaccacgtccttcccgcatcgtcgcaatggcgtctcaagttaacggtgaggtgcaccctgcctcggcgactttgtcgcatatcacaggctaccctgtcgtcaacgacagcatctcctacttcaagaagaacccttatgcccagaaatccctagcacttggagattctgcctaccagactttcgccaaacccgtactgccgtatctgaacaagccttaccaatacgtgtcaccttacgtcaaaaaggccgatgccattggcgatgacgcattatccaagattgaccaacgtcttcccgttctgaagaagtcaactgatgagctctggaccgacggcaagaacattgtattcttccccattcgcaagggcctagagacgaaagatcatgtattcgatgtctaccacgccgagtgcaagaaagtcggcggcgaaggcgtcgtcacagttggcaaagctcttatctctacgggactagtagtcacatcagagactctgcagtgggttggtgacatgctacgagctggcaaagtccaggcgaaggaggcgtcggaagaagccgctcagcaggtgaaccattaatgcctaacgcaatgaagtacagcagcttattgtatgcaacatgacccttttcggcatgaggggtccctatcaaagttggacgcatccaattccaagcatgaactctctttaccactccagttattcggtagcagaacatatcagcattaggcgatctcgagaggtcatgttgtatgcattaccgcctacgatatcccgttaaactcgaattgaccgaatcgccgtggtgtcgactcatttcaatactacttggctgaccctagcagccgatatccgatagggcgttggctctggcgttagcatgtttccaaagctttgcttctctgcccaaaaaaaaaacaggcatacggagttggtttgggaaaggctcgtttgtcgtgtattaggtacatactatgaagggaccaatcgtttcgggcaagtcgccgaaatatcgtcaataggcacatcaatagatttgacgttttacatttcacaatgcgaccgaggagtgatccctcaataacaatgtttacctgtgatggcatgaagtcgagctgattgtgccatgttgcttgattgcaaatagggcgtatcagattgcagctcagtgctgattcaagatgcctatcgagttattcttgaacagatgacttctcctatccgcggctttgtgtattggtatcaagtcaattctgagagttgttgttctgtaattcattaattgacgtcaaa

SEQ ID NO: 28122 - DNA, 1863 bp, Muscodor strobelii
  misc_feature: SGI cDNA ID NO. 569644
  misc_feature: Encodes the peptide sequence at SEQ ID NO 28123
atggacgtcgacgttgcgagtccgccgggctcccctggcgccgcaccactccagcccttatctctcgatcgcgtgaaccagcaaaaccccatgctctcgtccattcgaaatgaatcacaccgcgacagcgacgtgcacgataaaattcgccagtttaacaacctagctcaccttgctcccactaacgcatcttccatgtctaaacagcttgagaggaagaccgccgatgctgcacttaggcgagctatggtaggacgagaggaggctgagagtgagatgcgccgcttcagagaagagtcgcgtgttctccgcaagcaggtggaggagggccgcgaacgggagcgcaaagtgggagagagactggagactgttatggaaaactatggacgcgccaaagaaacatactcacacacccagtctatttgggaaaaggaaatccgacgagctcgcaaagaaactttcaaatcacagtccactatcctcaaattacgagaagaggccaaggctgccaaatctgaggccaagtcagcagaggagcgccttgagcgcgaaaaagcactgagcaaagccagagagcaagaggcatttgccgcgcgatatcagctggtggaagtacaggaagaactacagaaggccctggagcgcgccaagtacctcgaagaggaacgcgatgccttcaaggcggccgcacaaagtgaagaagtagctcgactagcgctggaaggtcgtttgcccctacccccggaggagccagatagtgagtttgggtctccaaagaaaggccgtgagtcgttcatgggccgagagtcattgtcgacgttcgagataaggtcttcggctgcagctgaagcggagctcgaggaactcacacgcttgtggcaatgggagaagcaaagagccgaccgtacacaagaacacttagagttcgtcgaagctgaaaacagaatgcgttccaagtccatttcaaccaagagccagggcacaatgacatccccacgcagggagcatcggccatctcctatcaagattgtagatccagccgatctcataatactaggcgctaaagctgcaacaagtcagtcatcatcgcccaaagagctcgaatctccggaagtcgttgaagaggttgaacctcacacagtggaggatcaacccgaggagtctaaagaagagattacggaacaagcggaacagaaggagcctcgccgcgggaccatattcattcccgccgaaggcatctttcgaaccatttcagagcaagaattggaagcaatggagaacagcgacgacgccactctagagccacccacacccgtcgagtctcacaacccccatcacgctcgaacaccctctctcgatcccccatcatttgctctcatggcccaagagcgtacatctctcctctccctactcaatgcgccccgacaaagcgactcacactgtggcttcgagattcctaccaccacgtctgaggaggtagaattggaatgcgctattgaagaagaagaaggcccctcgtcagagacaccacagccttcatcccaccgtccccacacatctgcggcgttttacaccgtgacaaccacgacttcaatccccatccatgatgagaacatcaagcctcacaccgtgccccttgtcggccaaggccacggccgcacgccatctttcgacgtgaacaaccctgccctcacaccaacgatgacgcgtgagcaggctctccaacaaattaaggagcggcgaggccgcgctagaagcgccatgcagggcgcaatgacgcctagaaagcagatggttgtcggcgcgggcgaacgtagggacgtgagcgcgccggctggtagggcggcgaagggcaggacttag

SEQ ID NO: 28123 - protein, 620 aa, Muscodor strobelii
  misc_feature: SGI Peptide ID NO. 569644
  misc_feature (3)..(619): NCBI GI: 46123295 Blast Desc: FG06025.1 [Gibberella zeae PH-1]
  misc_feature (7)..(620): NCBI GI: 156065585 Blast Desc: SS1G_00803 [Sclerotinia sclerotiorum 1980] gi|154691662|gb|EDN91400.1| SS1G_00803 [Sclerotinia sclerotiorum 1980]
  misc_feature (1)..(487): NCBI GI: 39977535 Blast Desc: MGG_06652 [Magnaporthe grisea 70-15] gi|145013834|gb|EDJ98475.1| MGG_06652 [Magnaporthe grisea 70-15]
  misc_feature (3)..(586): NCBI GI: 116205317 Blast Desc: CHGG_10542 [Chaetomium globosum CBS 148.51] gi|88176670|gb|EAQ84138.1| CHGG_10542 [Chaetomium globosum CBS 148.51]
  misc_feature (7)..(610): NCBI GI: 171689782 Blast Desc: protein product [Podospora anserina] gi|170944853|emb|CAP70965.1| protein product [Podospora anserina]
  misc_feature (93)..(620): NCBI GI: 154320241 Blast Desc: BC1G_02101 [Botryotinia fuckeliana B05.10] gi|150854840|gb|EDN30032.1| BC1G_02101 [Botryotinia fuckeliana B05.10]
  misc_feature (16)..(423): NCBI GI: 85110035 Blast Desc: NCU09481 [Neurospora crassa OR74A] gi|28924874|gb|EAA33969.1| [Neurospora crassa OR74A] gi|38524272|emb|CAE75736.1| [Neurospora crassa]
  misc_feature (11)..(321): NCBI GI: 225560235 Blast Desc: conserved [Ajellomyces capsulatus G186AR]
  misc_feature (10)..(125): NCBI GI: 261357062 Blast Desc: [Verticillium albo-atrum VaMs.102]
  misc_feature (13)..(262): NCBI GI: 226284369 Blast Desc: conserved [Paracoccidioides brasiliensis Pb01]
MDVDVASPPGSPGAAPLQPLSLDRVNQQNPMLSSIRNESHRDSDVHDKIRQFNNLAHLAPTNASSMSKQLERKTADAALRRAMVGREEAESEMRRFREESRVLRKQVEEGRERERKVGERLETVMENYGRAKETYSHTQSIWEKEIRRARKETFKSQSTILKLREEAKAAKSEAKSAEERLEREKALSKAREQEAFAARYQLVEVQEELQKALERAKYLEEERDAFKAAAQSEEVARLALEGRLPLPPEEPDSEFGSPKKGRESFMGRESLSTFEIRSSAAAEAELEELTRLWQWEKQRADRTQEHLEFVEAENRMRSKSISTKSQGTMTSPRREHRPSPIKIVDPADLIILGAKAATSQSSSPKELESPEVVEEVEPHTVEDQPEESKEEITEQAEQKEPRRGTIFIPAEGIFRTISEQELEAMENSDDATLEPPTPVESHNPHHARTPSLDPPSFALMAQERTSLLSLLNAPRQSDSHCGFEIPTTTSEEVELECAIEEEEGPSSETPQPSSHRPHTSAAFYTVTTTTSIPIHDENIKPHTVPLVGQGHGRTPSFDVNNPALTPTMTREQALQQIKERRGRARSAMQGAMTPRKQMVVGAGERRDVSAPAGRAAKGRT

SEQ ID NO: 28124 - DNA, 828 bp, Muscodor strobelii
  misc_feature: SGI cDNA ID NO. 569645
  misc_feature: Encodes the peptide sequence at SEQ ID NO 28125
atggcaggcaaagacaccttaccccagcgctacgagattcgcccccttaccaatgaacacctggactgggccaaggcggtcttcgcgcacagtttcatcttcgtgtcgcccatatggaagacgctgtaccccgagggcttgaccgcgcgcttctaccagttgcatgtgggtgccgacgccatggtagcgcaccagatcgcgtcgggtctatctctgggcgtcttcgataccgagcacgtcgtgcgacacgcgagcggccagcctggcattcactttgacactagtgacgaggatgccgacgcagacaccctactgcggcagatggacaacccgcttgtcagcattgcgttggccttcgacgcgttcgatgccatgccagccgaaaacatgctcccagtgtgcgccgcgatgcctgccacaccgcgcttctttggcgaattagtccgccgtgatccgcgcgacccggccacttggaaacctacggcgcgcgggcaggttgtccagaggttgggtacagcgacgcgcggcgacgccgttcgtcaccggttcatgcgcgtcatggccgaggagatgatgctgcgtatggcggctcgtggataccgaggcatccagatcgagtgctttcatgatgccgtaaaccatgtatggagcaacccgccaccgccattccgagggcaagtggtaagtgaagtaattccgtatgatctagaagcggaggaggaagaggaagggaataagatggtgataaatggagaagagaagaggttcccgtatcggccggtgaagcagcggttaaccaaggtttatgttgaccttcggccgaattga

SEQ ID NO: 28125 - protein, 275 aa, Muscodor strobelii
  misc_feature: SGI Peptide ID NO. 569645
  misc_feature (1)..(272): NCBI GI: 238489981 Blast Desc: conserved [Aspergillus flavus NRRL3357] gi|220698616|gb|EED54956.1| conserved [Aspergillus flavus NRRL3357]
  misc_feature (6)..(242): NCBI GI: 242793909 Blast Desc: conserved [Talaromyces stipitatus ATCC 10500] gi|218718850|gb|EED18270.1| conserved [Talaromyces stipitatus ATCC 10500]
  misc_feature (3)..(273): NCBI GI: 212535732 Blast Desc: conserved [Penicillium marneffei ATCC 18224] gi|210070421|gb|EEA24511.1| conserved [Penicillium marneffei ATCC 18224]
  misc_feature (10)..(272): NCBI GI: 154280685 Blast Desc: [Ajellomyces capsulatus NAm1] gi|150411334|gb|EDN06722.1| [Ajellomyces capsulatus NAm1]
  misc_feature (10)..(273): NCBI GI: 225558102 Blast Desc: conserved [Ajellomyces capsulatus G186AR]
  misc_feature (7)..(272): NCBI GI: 189192388 Blast Desc: conserved [Pyrenophora tritici-repentis Pt-1C-BFP] gi|187974139|gb|EDU41638.1| conserved [Pyrenophora tritici-repentis Pt-1C-BFP]
  misc_feature (10)..(247): NCBI GI: 240273340 Blast Desc: conserved [Ajellomyces capsulatus H143]
  misc_feature (7)..(248): NCBI GI: 242805555 Blast Desc: conserved [Talaromyces stipitatus ATCC 10500] gi|218715181|gb|EED14603.1| conserved [Talaromyces stipitatus ATCC 10500]
  misc_feature (1)..(214): NCBI GI: 261192683 Blast Desc: conserved [Ajellomyces dermatitidis SLH14081] gi|239589230|gb|EEQ71873.1| conserved [Ajellomyces dermatitidis SLH14081]
  misc_feature (7)..(234): NCBI GI: 116182746 Blast Desc: [Chaetomium globosum CBS 148.51] gi|88186298|gb|EAQ93766.1| [Chaetomium globosum CBS 148.51]
MAGKDTLPQRYEIRPLTNEHLDWAKAVFAHSFIFVSPIWKTLYPEGLTARFYQLHVGADAMVAHQIASGLSLGVFDTEHVVRHASGQPGIHFDTSDEDADADTLLRQMDNPLVSIALAFDAFDAMPAENMLPVCAAMPATPRFFGELVRRDPRDPATWKPTARGQVVQRLGTATRGDAVRHRFMRVMAEEMMLRMAARGYRGIQIECFHDAVNHVWSNPPPPFRGQVVSEVIPYDLEAEEEEEGNKMVINGEEKRFPYRPVKQRLTKVYVDLRPN

SEQ ID NO: 28126 - DNA, 1160 bp, Muscodor strobelii
  misc_feature: SGI EST ID NO. CUFF.66227.0
  misc_feature: Variant of the nucleotide sequence at SEQ ID NO 28124
ttcctcgtgcctagttccgatggaccagaatggacatgcaatcgtgaacacttgattcctgtacccaggcctgctcaagaaagtattgaaggacttcttcgatgaagttaattttcgcttacgattatcaagaatcgtcgaactacgctatgttgagtgtcaaaaacttagaataactcactcgcaccaaagagagaagcatagagtcttccacgctatcatatagcagcgatttgagaagaagggtgtgaatcttccagcgaagaaaaaggatcatggcaggcaaagacaccttaccccagcgctacgagattcgcccccttaccaatgaacacctggactgggccaaggcggtcttcgcgcacagtttcatcttcgtgtcgcccatatggaagacgctgtaccccgagggcttgaccgcgcgcttctaccagttgcatgtgggtgccgacgccatggtagcgcaccagatcgcgtcgggtctatctctgggcgtcttcgataccgagcacgtcgtgcgacacgcgagcggccagcctggcattcactttgacactagtgacgaggatgccgacgcagacaccctactgcggcagatggacaacccgcttgtcagcattgcgttggccttcgacgcgttcgatgccatgccagccgaaaacatgctcccagtgtgcgccgcgatgcctgccacaccgcgcttctttggcgaattagtccgccgtgatccgcgcgacccggccacttggaaacctacggcgcgcgggcaggttgtccagaggttgggtacagcgacgcgcggcgacgccgttcgtcaccggttcatgcgcgtcatggccgaggagatgatgctgcgtatggcggctcgtggataccgaggcatccagatcgagtgctttcatgatgccgtaaaccatgtatggagcaacccgccaccgccattccgagggcaagtggtaagtgaagtaattccgtatgatctagaagcggaggaggaagaggaagggaataagatggtgataaatggagaagagaagaggttcccgtatcggccggtgaagcagcggttaaccaaggtttatgttgaccttcggccgaattgacgcatcccaactcgttacgtactttaccatattagccatcataatgttacccgtggc

SEQ ID NO: 28127 - DNA, 792 bp, Muscodor strobelii
  misc_feature: SGI cDNA ID NO. 569646
  misc_feature: Encodes the peptide sequence at SEQ ID NO 28128
atgattgaaaggcttcaggctcagaatgccgctcccacgccgaacagggttttatgggctctttactcctgtgttgttcgagcatgtatcggaatggcgtaccctgcagtgctcttgccatctcagctacctcaactagagactatacccgaaggcgatgttgaactggccccaattaatcataacgatgcccatgtttacaatgtgatgttcggcgacattgatccttattttcccgagcacagattgatacccgtcatgaagctcattgattttggagaggcatccgaggacgagcgccaagagacggggccacctggaaagaagaacatttttgatacggcgcgaccgatatataatcttatccgtcgctcgacaagcatcgatcatgacccagcttcacgcggaccagagaacttccgagacatccaaacgcatgccgtgaatttctcggacgagcgagctccaaattacgaagttgatatggagttacaagatcttctcttggccagaacaccagcagacaggcctgatctcgtagacctactccatcaagtcacatacgccactgaaaataagacagctgattctctctcgctgtacggtacagccgagacggatgcggatataattggtttcgtccagacatatattctggacgctgacccaaccccggagggaactcccgaggcggaggagataacgccgccaactccaacaccagcggcgccaccagcaccagcagagccaaccgtcatatcgctggtctcgagctcgtcgggtagtggatga

SEQ ID NO: 28128 - protein, 263 aa, Muscodor strobelii
  misc_feature: SGI Peptide ID NO. 569646
MIERLQAQNAAPTPNRVLWALYSCVVRACIGMAYPAVLLPSQLPQLETIPEGDVELAPINHNDAHVYNVMFGDIDPYFPEHRLIPVMKLIDFGEASEDERQETGPPGKKNIFDTARPIYNLIRRSTSIDHDPASRGPENFRDIQTHAVNFSDERAPNYEVDMELQDLLLARTPADRPDLVDLLHQVTYATENKTADSLSLYGTAETDADIIGFVQTYILDADPTPEGTPEAEEITPPTPTPAAPPAPAEPTVISLVSSSSGSG

SEQ ID NO: 28129 - DNA, 265 bp, Muscodor strobelii
  misc_feature: SGI EST ID NO. CUFF.66237.0
  misc_feature: Variant of the nucleotide sequence at SEQ ID NO 28127
ctatacccgaaggcgatgttgaactggccccaattaatcataacgatgcccatgtttacaatgtgatgttcggcgacattgatccttattttcccgagcacagattgatacccgtcatgaagctcattgattttggagaggcatccgaggacgagcgccaagagacggggccacctggaaagaagaacatttttgatacggcgcgagtatgtctcaacaagcattgataattgtcgtcaaaactgaagagagaagaatcaatcaa

SEQ ID NO: 28130 - DNA, 945 bp, Muscodor strobelii
  misc_feature: SGI cDNA ID NO. 569647
  misc_feature: Encodes the peptide sequence at SEQ ID NO 28131
atggccatattagaggatgtccctggccttgaggtcgaggttcgctgtggcgacaggacgcttcaagagtacgatgaccccaacgcgcacgaccgtgatgaagtaggtgctgccccaacctcaacgcagtacatcgagtgcgtggacaatgctacctttgaagttcacatccttgtcgatgaatactatgagtggggttatcgcaatcacgtcctcgttgccaacacttatgtcgatggtgagcgtattcgcggctctgttatccgctctagtgatggcaccatccgacgctgtatcaaaggcaatgaggtctgcactccgcatggcacctggtcactgcagaaattccagttctcttccgtgaagactgtcgatgatggccgcaaggagcgcgtggagaaagatatgagtgtcgccaagaagctcggtgtcattgaggtcaaattcgagcgtgccattgaatatggacctatcggtgccggccgtaccaaggatcgcaacgctgctggttttgaactgacagagaagtcgctcaaagggaaggctatctcgcatggcacatcctatggtccagctgagcccatctttgccccgaactatgtcgacgtccgcaccattcccgaagacaatggacctattgcagtcttccagttcagataccagtccagagaggctttgaagcgagaactcatcatccctcgttcaccgtcacgttcaccaacccttgaagatctctcaccggaggaagtgcagcgtctcgcccgggagagattcaaccagcttcgtaatcctggtatgaaaaaggaagaagcccgtcgtgtcaagcgtgagcacggtgaagttctcgacctcaccgacaatgctcttccggttcctcgagccaccaagaagtcacgactgaacgacggcagagttgtggacgcaatcgatctcactgatgactaa

SEQ ID NO: 28131 - protein, 314 aa, Muscodor strobelii
  misc_feature: SGI Peptide ID NO. 569647
  misc_feature (1)..(279): NCBI GI: 169604476 Blast Desc: SNOG_05251 [Phaeosphaeria nodorum SN15] gi|111066522|gb|EAT87642.1| SNOG_05251 [Phaeosphaeria nodorum SN15]
  misc_feature (1)..(277): NCBI GI: 189195836 Blast Desc: conserved [Pyrenophora tritici-repentis Pt-1C-BFP] gi|187980135|gb|EDU46761.1| conserved [Pyrenophora tritici-repentis Pt-1C-BFP]
  misc_feature (1)..(277): NCBI GI: 156054812 Blast Desc: SS1G_06254 [Sclerotinia sclerotiorum 1980] gi|154704034|gb|EDO03773.1| SS1G_06254 [Sclerotinia sclerotiorum 1980]
  misc_feature (1)..(287): NCBI GI: 256730089 Blast Desc: NECHADRAFT_82739 [Nectria haematococca mpVI 77-13-4]
  misc_feature (1)..(280): NCBI GI: 154320474 Blast Desc: [Botryotinia fuckeliana B05.10] gi|150853398|gb|EDN28590.1| [Botryotinia fuckeliana B05.10]
  misc_feature (1)..(314): NCBI GI: 171694682 Blast Desc: protein product [Podospora anserina] gi|170947583|emb|CAP59744.1| protein product [Podospora anserina]
  misc_feature (40)..(239): NCBI GI: 156054038 Blast Desc: [Sclerotinia sclerotiorum 1980] gi|154703647|gb|EDO03386.1| [Sclerotinia sclerotiorum 1980]
  misc_feature (1)..(314): NCBI GI: 85115224 Blast Desc: NCU08630 [Neurospora crassa OR74A] gi|28926633|gb|EAA35602.1| [Neurospora crassa OR74A]
  misc_feature (1)..(240): NCBI GI: 156054030 Blast Desc: [Sclerotinia sclerotiorum 1980] gi|154703643|gb|EDO03382.1| [Sclerotinia sclerotiorum 1980]
  misc_feature (1)..(277): NCBI GI: 169604480 Blast Desc: SNOG_05253 [Phaeosphaeria nodorum SN15] gi|111066524|gb|EAT87644.1| SNOG_05253 [Phaeosphaeria nodorum SN15]
MAILEDVPGLEVEVRCGDRTLQEYDDPNAHDRDEVGAAPTSTQYIECVDNATFEVHILVDEYYEWGYRNHVLVANTYVDGERIRGSVIRSSDGTIRRCIKGNEVCTPHGTWSLQKFQFSSVKTVDDGRKERVEKDMSVAKKLGVIEVKFERAIEYGPIGAGRTKDRNAAGFELTEKSLKGKAISHGTSYGPAEPIFAPNYVDVRTIPEDNGPIAVFQFRYQSREALKRELIIPRSPSRSPTLEDLSPEEVQRLARERFNQLRNPGMKKEEARRVKREHGEVLDLTDNALPVPRATKKSRLNDGRVVDAIDLTDD

SEQ ID NO: 28132 - DNA, 3835 bp, Muscodor strobelii
  misc_feature: SGI EST ID NO. CUFF.66515.1
  misc_feature: Variant of the nucleotide sequence at SEQ ID NO 28130
tggcgaggttgggttgcagtgcagcaaatgcgctgcacgttggcgagcaggcgaaggccgggaaggtcccgtccaccttggaagctgctaggctagagaggtccactgagactggagctgccccgccatgctaaggtacagcactttgagaagagaaccgtaacattttccctgtcgaagcgcgcagagcttcgcgtccacgttaattattgtagcccaactagaacgtcaagtatctgctcgccatgtctgtcaccctccataccaacttgggagatctcaaaatcgaggtcttttgcgaaagtgtgcccaagaccgcagaggtaaggcaatctgtcagacttgttgcacctctttggcacagtgagagtacaataaactgacggcatatatagaacttcctggccctctgcgcctccggctactacgaccagtcaccctttcaccgattgattcccagcttcatggtgcaaaccggcggtccagcgcatcctacaacagataatcccaagggtggacagtcgatatggggaggcacattcgaagatgagatacgtccgaccttgaagcacaatgcgcggggtgtagtctccatggccaacaaaggccctgcgaccaacggctcccaattcttcatcctcttcgacaaggctccccatctcgatggcctaaatactgtttttggcaaactgctgggtgatgacagcctcagaacactagccaagatcgaggctatcgaggtcgacaagaagaacagaccaaaagaaaagatagccatcgacaagatcacaatccatgccaaccctgtcgccggatgatgtaccaataccagctgcagtattcgatccgctaacaataatctttcgcatgcaagaccgatttgatacgaaaccatgctggatatacccccaaggctacgcaacatctacgatgtcagctatgattgcttaaatcacagacagtgagacgtatgtggtggttatggagaaatccaatccacgtatttgttgctccgttatctcttcatgagtcggctagcaaattacctaagagtactccgtggctgccactcagagttgagtgtattgctggattacatatagatatgtcacatagaaggtgatgttctggaggcaatgcctcgaaacctggatctgggcatcacacatcgcaatgcaaagagagctgttgcaggacaatacggtattgcaaacggggtataaccatcaattgcgttgacttaggcatgcttttgttggcaaatctgacactagatcgaggatctgtgaggtgtgcattgcccttcataataggggagaatgtaggcagggattcaaaggcatgtcaaacactcatgcaagatcatattcttcttcaaactttgagtagtgaatgtgtgcatcccgtcatttgctgagcagtttatgacgcggctaggcatttgagagcctgccacgccaaacttatatcaaagagcgaacttgtgagaatgcgatcccacctcgcgcacctgtatttatgtgatatgctggagactttcgattcatgcgattaggcattcagaaaacagccaggccagactcagaccaaaaagcaaacttgagtacttcgatcccatcccgcccatctagatctatatgttgtgctggagatggccaattcatgcggctctaggttcgcaaggcgatccccacttggcatatggggcaaccacatcggaccataaggtagtcgatatttactaagtacagatgataacttctcttgttaagacaacggaatcaagaccaaaaactgtgatgcatcagtgagtcaggtggttgctcgtccaagctcagctcaagcaaattgtcaatatgagcacaattatgattggcctgaatttcagctcaggctgagcagtcagcccggttgccattcccctcggctgggcagcgccagcacaaaggatctcatctagatgtgacagctggagctagggccgccttttcgtcgggtgtatccgtctgcccgtctgaaccctagatgtgacaagtgcagcctcactaggcactgtacgttcaccttgaagctattccgcaatttcctcgcaagttagcaaacaacggccgaaatcttcacattcaatcgctcatttcgtccagtactcatctgcaaagagtgccacgtgcatgtggctaagccgactgcagcctttacctcatccttgcgatcgtctggtgcacggcgtggcttccatccggcgtttttgtcctgtgaatgaggtagccagcgcggtgactatctcccaacttgccaactcttgacacaaaaaagccaatcttctgcattgcacgccacttggttctctcttacgatttccattcgctgagaacttgatttgttcttacgccactctctttcatattttcgtctcctgtgacagatacgcaagcgccagtgccaccgcgtcaagtcgctaggatttatcgacatggccatattagaggatgtccctggccttgaggtcgaggttcgctgtggcgacaggacgcttcaagagtacgatgaccccaacgcgcacgaccgtgatgaagtaggtgctgccccaacctcaacgcagtacatcgagtgcgtggacaatgctacctttgaagttcacatccttgtcgatgaatactatgagtggggttatcgcaatcacgtcctcgttgccaacacttatgtcgatggtgagcgtattcgcggctctgttatccgctctagtgatggcaccatccgacgctgtatcaaaggcaatgaggtctgcactccgcatggcacctggtcactgcagaaattccagttctcttccgtgaagactgtcgatgatggccgcaaggagcgcgtggagaaagatatgagtgtcgccaagaagctcggtgtcattgaggtcaaattcgagcgtgccattgaatatggacctatcggtgccggccgtaccaaggatcgcaacgctgctggttttgaactgacagagaagtcgctcaaagggaaggctatctcgcatggcacatcctatggtccagctgagcccatctttgccccgaactatgtcgacgtccgcaccattcccgaagacaatggacctattgcagtcttccagttcagataccagtccagagaggctttgaagcgagaactcatcatccctcgttcaccgtcacgttcaccaacccttgaagatctctcaccggaggaagtgcagcgtctcgcccgggagagattcaaccagcttcgtaatcctggtatgaaaaaggaagaagcccgtcgtgtcaagcgtgagcacggtgaagttctcgacctcaccgacaatgctcttccggttcctcgagccaccaagaagtcacgactgaacgacggcagagttgtggacgcaatcgatctcactgatgactaagagattacttagtgggaacagtttcttatcatggcgttaaggagttcgagcacggatataccacacggtcagcgacttgctttagagaaggataatcaacggcaaactctcatgggctttgtccatctggtctcaactttgagacagatatgagacgaaattgcgacagtatgagacggaattgctcggattcaatattaggggtgcaacttaccataccgatggagctcgccattggctagctagctatagttaaatagctttgatgaaatgtcctcagatagagagttaattacatttcgtcctatctgtcttaatgcgtccttgttgtgtatgtttgagagtcttaccaattgtgccatgtcctaagatttacgaccgcattgtatgctcatgtcagtcagactatgagcaaaa

SEQ ID NO: 28133 - DNA, 501 bp, Muscodor strobelii
  misc_feature: SGI cDNA ID NO. 569648
  misc_feature: Encodes the peptide sequence at SEQ ID NO 28134
atgtctgtcaccctccataccaacttgggagatctcaaaatcgaggtcttttgcgaaagtgtgcccaagaccgcagagaacttcctggccctctgcgcctccggctactacgaccagtcaccctttcaccgattgattcccagcttcatggtgcaaaccggcggtccagcgcatcctacaacagataatcccaagggtggacagtcgatatggggaggcacattcgaagatgagatacgtccgaccttgaagcacaatgcgcggggtgtagtctccatggccaacaaaggccctgcgaccaacggctcccaattcttcatcctcttcgacaaggctccccatctcgatggcctaaatactgtttttggcaaactgctgggtgatgacagcctcagaacactagccaagatcgaggctatcgaggtcgacaagaagaacagaccaaaagaaaagatagccatcgacaagatcacaatccatgccaaccctgtcgccggatga

SEQ ID NO: 28134 - protein, 166 aa, Muscodor strobelii
  misc_feature: SGI Peptide ID NO. 569648
  misc_feature (2)..(160): Pfam Id: PF00160 Pfam Desc: Cyclophilin type peptidyl-prolyl cis-trans isomerase/CLD
  misc_feature (1)..(165): NCBI GI: 39942318 Blast Desc: conserved [Magnaporthe grisea 70-15] gi|145015765|gb|EDK00255.1| conserved [Magnaporthe grisea 70-15]
  misc_feature (1)..(166): NCBI GI: 256735390 Blast Desc: [Nectria haematococca mpVI 77-13-4]
  misc_feature (1)..(165): NCBI GI: 164423469 Blast Desc: peptidyl-prolyl cis-trans isomerase 10 [Neurospora crassa OR74A] gi|74661739|sp|Q6MWS8.1|PPIL3_NEUCR RecName: Full=Peptidyl-prolyl cis-trans isomerase-like 3; Short=PPIase; 10
  misc_feature (1)..(166): NCBI GI: 93140620 Blast Desc: peptidyl-prolyl cis-trans isomerase 10 [Neurospora crassa OR74A] gi|74661739|sp|Q6MWS8.1|PPIL3_NEUCR RecName: Full=Peptidyl-prolyl cis-trans isomerase-like 3; Short=PPIase; 10
  misc_feature (1)..(165): NCBI GI: 171689244 Blast Desc: protein product [Podospora anserina] gi|170944584|emb|CAP70695.1| protein product [Podospora anserina]
  misc_feature (1)..(166): NCBI GI: 116204577 Blast Desc: CHGG_10172 [Chaetomium globosum CBS 148.51] gi|88176300|gb|EAQ83768.1| CHGG_10172 [Chaetomium globosum CBS 148.51]
  misc_feature (26)..(166): NCBI GI: 46108116 Blast Desc: FG00940.1 [Gibberella zeae PH-1]
  misc_feature (1)..(166): NCBI GI: 169608189 Blast Desc: SNOG_07162 [Phaeosphaeria nodorum SN15] gi|111064693|gb|EAT85813.1| SNOG_07162 [Phaeosphaeria nodorum SN15]
  misc_feature (1)..(166): NCBI GI: 189189580 Blast Desc: peptidyl-prolyl cis-trans isomerase B precursor [Pyrenophora tritici-repentis Pt-1C-BFP] gi|187972735|gb|EDU40234.1| peptidyl-prolyl cis-trans isomerase B
  misc_feature (1)..(165): NCBI GI: 109892836 Blast Desc: peptidyl-prolyl cis-trans isomerase B precursor [Pyrenophora tritici-repentis Pt-1C-BFP] gi|187972735|gb|EDU40234.1| peptidyl-prolyl cis-trans isomerase B
  misc_feature (1)..(165): SWISSPROT Homolog: EC 5.2.1.8 Peptidylprolyl isomerase
MSVTLHTNLGDLKIEVFCESVPKTAENFLALCASGYYDQSPFHRLIPSFMVQTGGPAHPTTDNPKGGQSIWGGTFEDEIRPTLKHNARGVVSMANKGPATNGSQFFILFDKAPHLDGLNTVFGKLLGDDSLRTLAKIEAIEVDKKNRPKEKIAIDKITIHANPVAG

SEQ ID NO: 28135 - DNA, 3763 bp, Muscodor strobelii
  misc_feature: SGI EST ID NO. CUFF.66515.0
  misc_feature: Variant of the nucleotide sequence at SEQ ID NO 28133
tggcgaggttgggttgcagtgcagcaaatgcgctgcacgttggcgagcaggcgaaggccgggaaggtcccgtccaccttggaagctgctaggctagagaggtccactgagactggagctgccccgccatgctaaggtacagcactttgagaagagaaccgtaacattttccctgtcgaagcgcgcagagcttcgcgtccacgttaattattgtagcccaactagaacgtcaagtatctgctcgccatgtctgtcaccctccataccaacttgggagatctcaaaatcgaggtcttttgcgaaagtgtgcccaagaccgcagagaacttcctggccctctgcgcctccggctactacgaccagtcaccctttcaccgattgattcccagcttcatggtgcaaaccggcggtccagcgcatcctacaacagataatcccaagggtggacagtcgatatggggaggcacattcgaagatgagatacgtccgaccttgaagcacaatgcgcggggtgtagtctccatggccaacaaaggccctgcgaccaacggctcccaattcttcatcctcttcgacaaggctccccatctcgatggcctaaatactgtttttggcaaactgctgggtgatgacagcctcagaacactagccaagatcgaggctatcgaggtcgacaagaagaacagaccaaaagaaaagatagccatcgacaagatcacaatccatgccaaccctgtcgccggatgatgtaccaataccagctgcagtattcgatccgctaacaataatctttcgcatgcaagaccgatttgatacgaaaccatgctggatatacccccaaggctacgcaacatctacgatgtcagctatgattgcttaaatcacagacagtgagacgtatgtggtggttatggagaaatccaatccacgtatttgttgctccgttatctcttcatgagtcggctagcaaattacctaagagtactccgtggctgccactcagagttgagtgtattgctggattacatatagatatgtcacatagaaggtgatgttctggaggcaatgcctcgaaacctggatctgggcatcacacatcgcaatgcaaagagagctgttgcaggacaatacggtattgcaaacggggtataaccatcaattgcgttgacttaggcatgcttttgttggcaaatctgacactagatcgaggatctgtgaggtgtgcattgcccttcataataggggagaatgtaggcagggattcaaaggcatgtcaaacactcatgcaagatcatattcttcttcaaactttgagtagtgaatgtgtgcatcccgtcatttgctgagcagtttatgacgcggctaggcatttgagagcctgccacgccaaacttatatcaaagagcgaacttgtgagaatgcgatcccacctcgcgcacctgtatttatgtgatatgctggagactttcgattcatgcgattaggcattcagaaaacagccaggccagactcagaccaaaaagcaaacttgagtacttcgatcccatcccgcccatctagatctatatgttgtgctggagatggccaattcatgcggctctaggttcgcaaggcgatccccacttggcatatggggcaaccacatcggaccataaggtagtcgatatttactaagtacagatgataacttctcttgttaagacaacggaatcaagaccaaaaactgtgatgcatcagtgagtcaggtggttgctcgtccaagctcagctcaagcaaattgtcaatatgagcacaattatgattggcctgaatttcagctcaggctgagcagtcagcccggttgccattcccctcggctgggcagcgccagcacaaaggatctcatctagatgtgacagctggagctagggccgccttttcgtcgggtgtatccgtctgcccgtctgaaccctagatgtgacaagtgcagcctcactaggcactgtacgttcaccttgaagctattccgcaatttcctcgcaagttagcaaacaacggccgaaatcttcacattcaatcgctcatttcgtccagtactcatctgcaaagagtgccacgtgcatgtggctaagccgactgcagcctttacctcatccttgcgatcgtctggtgcacggcgtggcttccatccggcgtttttgtcctgtgaatgaggtagccagcgcggtgactatctcccaacttgccaactcttgacacaaaaaagccaatcttctgcattgcacgccacttggttctctcttacgatttccattcgctgagaacttgatttgttcttacgccactctctttcatattttcgtctcctgtgacagatacgcaagcgccagtgccaccgcgtcaagtcgctaggatttatcgacatggccatattagaggatgtccctggccttgaggtcgaggttcgctgtggcgacaggacgcttcaagagtacgatgaccccaacgcgcacgaccgtgatgaagtaggtgctgccccaacctcaacgcagtacatcgagtgcgtggacaatgctacctttgaagttcacatccttgtcgatgaatactatgagtggggttatcgcaatcacgtcctcgttgccaacacttatgtcgatggtgagcgtattcgcggctctgttatccgctctagtgatggcaccatccgacgctgtatcaaaggcaatgaggtctgcactccgcatggcacctggtcactgcagaaattccagttctcttccgtgaagactgtcgatgatggccgcaaggagcgcgtggagaaagatatgagtgtcgccaagaagctcggtgtcattgaggtcaaattcgagcgtgccattgaatatggacctatcggtgccggccgtaccaaggatcgcaacgctgctggttttgaactgacagagaagtcgctcaaagggaaggctatctcgcatggcacatcctatggtccagctgagcccatctttgccccgaactatgtcgacgtccgcaccattcccgaagacaatggacctattgcagtcttccagttcagataccagtccagagaggctttgaagcgagaactcatcatccctcgttcaccgtcacgttcaccaacccttgaagatctctcaccggaggaagtgcagcgtctcgcccgggagagattcaaccagcttcgtaatcctggtatgaaaaaggaagaagcccgtcgtgtcaagcgtgagcacggtgaagttctcgacctcaccgacaatgctcttccggttcctcgagccaccaagaagtcacgactgaacgacggcagagttgtggacgcaatcgatctcactgatgactaagagattacttagtgggaacagtttcttatcatggcgttaaggagttcgagcacggatataccacacggtcagcgacttgctttagagaaggataatcaacggcaaactctcatgggctttgtccatctggtctcaactttgagacagatatgagacgaaattgcgacagtatgagacggaattgctcggattcaatattaggggtgcaacttaccataccgatggagctcgccattggctagctagctatagttaaatagctttgatgaaatgtcctcagatagagagttaattacatttcgtcctatctgtcttaatgcgtccttgttgtgtatgtttgagagtcttaccaattgtgccatgtcctaagatttacgaccgcattgtatgctcatgtcagtcagactatgagcaaaa

SEQ ID NO: 28136 - DNA, 1389 bp, Muscodor strobelii
  misc_feature: SGI cDNA ID NO. 569649
  misc_feature: Encodes the peptide sequence at SEQ ID NO 28137
atgtcgccagcgcttgttgatccgccaccggtcttagacctcaagactgtggctaaaacgtcaaagtccactagcctctggtcatcattgaatcaatggctcccatctcgtgacaccgacagcgactattggtggaagttgacgggcgagcatctcgccaatatgcttgaggctgctggttacaccacagagagacaatatagcgccttactatttcactatcactggatcgtcccgtatatgggcccaatgccagcggaagacggaactctaaaatggccatcgctccttggcgtcgaaggatctccaattgagtattcttggaagtggaatacgccaacaaaggagcctgatgttcgatacacaatggagcctattaatcagtttactggtactgctatggatccgttaaaccaagccgcgtctaaagagatgcttcatcgcatctcggagattgttcctactgttgaccttacatgggttaatcatttccttgcaacgttgttcgatcacgatgtgtcgcgatacgtcaaagaggcagaagctggagcacatttcagcacaacagttgtccatgcggcagagttccttcccaagggcttatcattaaagacatacttcgtaccgcgcaagcttggtcaaactgaagggcagatctcactggccgagtgggaggactctctagcgaagctcgaccctgccaatccggctcgacaagcactcaacacattcatcagcgagaatgctgaggggaaattcttaactcccttcatgttagctgttgatgatgtcgccccggccaaatcgcgtcttaaattttatttccagacgccacatacaagcttcgcgtctgttcgcgagattatgacccttggcggtcgtatttctgtacctgaagaatcaatgcaagaccttcgtagcctcattggggctgtcacgggtattggggacgacttcccggaaaatgaagaggtgccctgtgcagcagaatatgaccctgctgcaaaggataactttgtcgagctgcccattctgctatctggatatctctactatttcgatatagcaccaggcgctgctcttccagacattaaattctatagcccggtacgccgttatggccgtgatgatctcagcttggccaaggctactgttgagtggatgaacgcacatggacgagctggttatggtgaccggttcttgtctatgttacacagcctggcccaacatcgacggcttgaagagggcaagggaatgcaaacgtatgtgagctgccttattaagaaaaacggcgagcttgatatcacttcgtaccttggtccggaagccttcgacccagcacgactgcgtgcagcgaaaggtaatggcactgcaggctcattgaagtag

SEQ ID NO: 28137 - protein, 462 aa, Muscodor strobelii
  misc_feature: SGI Peptide ID NO. 569649
  misc_feature (27)..(448): NCBI GI: 212538935 Blast Desc: dimethylallyl tryptophan synthase GliD1 [Penicillium marneffei ATCC 18224] gi|210069365|gb|EEA23456.1| dimethylallyl tryptophan synthase GliD1 [Penicillium marneffei ATCC 18224]
  misc_feature (35)..(441): NCBI GI: 67541228 Blast Desc: AN6784.2 [Aspergillus nidulans FGSC A4] gi|40739412|gb|EAA58602.1| AN6784.2 [Aspergillus nidulans FGSC A4] gi|259480377|tpe|CBF71451.1| TPA: DMATS type aromatic (JCVI)
  misc_feature (12)..(440): NCBI GI: 55823913 Blast Desc: dimethylallylpyrophosphate transferase [Fusarium heterosporum]
  misc_feature (35)..(441): NCBI GI: 259485336 Blast Desc: TPA: DMATS type aromatic prenyltransferase, (JCVI) [Aspergillus nidulans FGSC A4]
  misc_feature (95)..(447): NCBI GI: 240274982 Blast Desc: dimethylallyl tryptophan synthase GliD1 [Ajellomyces capsulatus H143]
  misc_feature (35)..(408): NCBI GI: 67904484 Blast Desc: AN9229.2 [Aspergillus nidulans FGSC A4] gi|40742330|gb|EAA61520.1| AN9229.2 [Aspergillus nidulans FGSC A4]
  misc_feature (34)..(441): NCBI GI: 156044840 Blast Desc: SS1G_10524 [Sclerotinia sclerotiorum 1980] gi|154694912|gb|EDN94650.1| SS1G_10524 [Sclerotinia sclerotiorum 1980]
  misc_feature (18)..(444): NCBI GI: 238502795 Blast Desc: prenyltransferase, [Aspergillus flavus NRRL3357] gi|220691441|gb|EED47789.1| prenyltransferase, [Aspergillus flavus NRRL3357]
  misc_feature (18)..(444): NCBI GI: 169776107 Blast Desc: [Aspergillus oryzae RIB40] gi|83771255|dbj|BAE61387.1| protein product [Aspergillus oryzae]
  misc_feature (23)..(444): NCBI GI: 238841118 Blast Desc: dimethylallyl tryptophan synthase GliD1 [Microsporum canis CBS 113480]
  misc_feature (44)..(430): SWISSPROT Homolog: EC 2.5.1.34 Tryptophan dimethylallyltransferase
MSPALVDPPPVLDLKTVAKTSKSTSLWSSLNQWLPSRDTDSDYWWKLTGEHLANMLEAAGYTTERQYSALLFHYHWIVPYMGPMPAEDGTLKWPSLLGVEGSPIEYSWKWNTPTKEPDVRYTMEPINQFTGTAMDPLNQAASKEMLHRISEIVPTVDLTWVNHFLATLFDHDVSRYVKEAEAGAHFSTTVVHAAEFLPKGLSLKTYFVPRKLGQTEGQISLAEWEDSLAKLDPANPARQALNTFISENAEGKFLTPFMLAVDDVAPAKSRLKFYFQTPHTSFASVREIMTLGGRISVPEESMQDLRSLIGAVTGIGDDFPENEEVPCAAEYDPAAKDNFVELPILLSGYLYYFDIAPGAALPDIKFYSPVRRYGRDDLSLAKATVEWMNAHGRAGYGDRFLSMLHSLAQHRRLEEGKGMQTYVSCLIKKNGELDITSYLGPEAFDPARLRAAKGNGTAGSLK

SEQ ID NO: 28138 - DNA, 1473 bp, Muscodor strobelii
  misc_feature: SGI cDNA ID NO. 569650
  misc_feature: Encodes the peptide sequence at SEQ ID NO 28139
atgtggtacacatcagcactttggggagcatatgctgctgcagctgtcgcagcactcccagcggatacgatcacgtcaggctttaccaattcgagcgttgtatgggatgctaaaaccacgatcgagtttccccactcagcagccttcgataatgcaactaagagatggaacaacaatgatgttccggactttgccattgccatcaccgcaggctctgcagctgatgtcgctcaagcagtcaagatatcgcggtcctacagcctccctttcctcggtacaggcggacgacatgctgtaagcgttacgttgggcgaggtccaaaatggagtttcaatcgacttaagcgcgctagacgaagtcattgtcgattcttctgccgggacattgactgtaggtggtggaactcggttcgaggccatctatgatgcagtatatcaggcaggctatatcatgccaatcggatcgtgtgcatgtcccggcatggttggtgcaacaattggtgctggtgtcggtcgcttccaagggctgtttggcctcatcattgacaatcttgagtctgtcaacctcgtgactgctgacggcagcattattaaagtttccgacgactcagacccggatctcatgtgggcgattcgcggggctggggccaattttggtatcgttacgtcggctacctacaagcttgtaccccaaagcaaggccaatggcggtcaagtcatgaatgccgactttaccctccctgcttcgtcgaacgcatcatacttcgacttgatccaatcgtttcaagatgatatgcctgctgagctttcgactatttctattatgttttacaatgaggctcgcgaagaggccaacatcattgtaaattgggtatatattggctccgacgaggcagctagtccttactttgcaccattactagacctaaatcctttatcgagttcaatcagcagcgtcgcctacaacaatctgaccaatgtcgccgctggtggtctcggcgtaagcatctgtgagcaaacaaagctcaatgggtatggggcaaactataaaacgttggactccgcaacctttcagaaagtattccagacaatgagtgatttctatgtcgactaccccgatgggcgaggcagtactgtcgaaatggaagtctttgcgccgcaggccgtcgaggctctggcgagcgatgcaaccgcttacccgtggcgtgacagcaagggatactcattgatctcttttggtttcaattccactgagacagaggctgccggtgaagagacggcaaaagctatacgtgatgactacgctgcaattagcggctacaatggtcttgctgtctatgtgagctacggtcatggcgacgagacactggaagaagtatttggtagtaatctcccgcgattaacggacctgaagcagaagtacgatcccgacaacgtattccgcttctatcatgcgatcaccgcagaatcctag

SEQ ID NO: 28139 - protein, 490 aa, Muscodor strobelii
  misc_feature: SGI Peptide ID NO. 569650
  misc_feature (445)..(487): Pfam Id: PF08031 Pfam Desc: Berberine and berberine like
  misc_feature (64)..(200): Pfam Id: PF01565 Pfam Desc: FAD binding domain
  misc_feature (22)..(486): NCBI GI: 39944694 Blast Desc: MGG_10961 [Magnaporthe grisea 70-15] gi|145010945|gb|EDJ95601.1| MGG_10961 [Magnaporthe grisea 70-15]
  misc_feature (30)..(486): NCBI GI: 226885244 Blast Desc: dehydrogenase [Sordaria macrospora]
  misc_feature (39)..(486): NCBI GI: 85119269 Blast Desc: NCU02926 [Neurospora crassa OR74A] gi|28927419|gb|EAA36372.1| [Neurospora crassa OR74A]
  misc_feature (35)..(489): NCBI GI: 242773402 Blast Desc: conserved [Talaromyces stipitatus ATCC 10500] gi|218721852|gb|EED21270.1| conserved [Talaromyces stipitatus ATCC 10500]
  misc_feature (18)..(408): NCBI GI: 115492027 Blast Desc: [Aspergillus terreus NIH2624] gi|114197501|gb|EAU39201.1| [Aspergillus terreus NIH2624]
  misc_feature (43)..(486): NCBI GI: 212531129 Blast Desc: FAD-dependent oxidase, [Penicillium marneffei ATCC 18224] gi|210071085|gb|EEA25174.1| FAD-dependent oxidase, [Penicillium marneffei ATCC 18224]
  misc_feature (37)..(482): NCBI GI: 255948020 Blast Desc: Pc22g07580 [Penicillium chrysogenum Wisconsin 54-1255] gi|211591794|emb|CAP98046.1| Pc22g07580 [Penicillium chrysogenum Wisconsin 54-1255]
  misc_feature (37)..(482): NCBI GI: 189202842 Blast Desc: FAD binding domain containing protein [Pyrenophora tritici-repentis Pt-1C-BFP] gi|187984856|gb|EDU50344.1| FAD binding domain containing protein [Pyrenophora tritici-repentis
  misc_feature (50)..(486): NCBI GI: 145241722 Blast Desc: An09g01920 [Aspergillus niger] gi|134078047|emb|CAK40130.1| protein product [Aspergillus niger]
  misc_feature (54)..(480): NCBI GI: 115390212 Blast Desc: [Aspergillus terreus NIH2624] gi|114195007|gb|EAU36707.1| [Aspergillus terreus NIH2624]
  misc_feature (43)..(489): SWISSPROT Homolog: EC 1.5.3.6 (R)-6-hydroxynicotine oxidase
MWYTSALWGAYAAAAVAALPADTITSGFTNSSVVWDAKTTIEFPHSAAFDNATKRWNNNDVPDFAIAITAGSAADVAQAVKISRSYSLPFLGTGGRHAVSVTLGEVQNGVSIDLSALDEVIVDSSAGTLTVGGGTRFEAIYDAVYQAGYIMPIGSCACPGMVGATIGAGVGRFQGLFGLIIDNLESVNLVTADGSIIKVSDDSDPDLMWAIRGAGANFGIVTSATYKLVPQSKANGGQVMNADFTLPASSNASYFDLIQSFQDDMPAELSTISIMFYNEAREEANIIVNWVYIGSDEAASPYFAPLLDLNPLSSSISSVAYNNLTNVAAGGLGVSICEQTKLNGYGANYKTLDSATFQKVFQTMSDFYVDYPDGRGSTVEMEVFAPQAVEALASDATAYPWRDSKGYSLISFGFNSTETEAAGEETAKAIRDDYAAISGYNGLAVYVSYGHGDETLEEVFGSNLPRLTDLKQKYDPDNVFRFYHAITAES

SEQ ID NO: 28140 - DNA, 282 bp, Muscodor strobelii
  misc_feature: SGI EST ID NO. CUFF.66260.0
  misc_feature: Variant of the nucleotide sequence at SEQ ID NO 28138
gacggcagcattattaaagtttccgacgactcagacccggatctcatgtgggcgattcgcggggctggggccaattttggtatcgttacgtcggctacctacaagcttgtaccccaaagcaaggccaatggcggtcaagtcatgaatgccgactttaccctccctgcttcgtcgaacgcatcatacttcgacttgatccaatcgtttcaagatgatatgcctgctgagctttcgactatttctattatgttttacaatgaggctcgcgaagaggccaacatc

SEQ ID NO: 28141 - DNA, 1572 bp, Muscodor strobelii
  misc_feature: SGI cDNA ID NO. 569651
  misc_feature: Encodes the peptide sequence at SEQ ID NO 28142
atgctaaatatgacagttctcgagccaattccggttcccatattgggcacagctcttgtttttattgtttatatcctgtatcaagcacttgcaccacccaagcttcctgatttacccattgttggcattaaatcgggtgagtggttcccgctcacgagggcgagatggaggaatgctgtcgacatgaagacggcaacggaaacggcctaccacgagtatagagattctgcatgtattttaccagttttcggagggcaaaacctggtacatctaccattgaaagagtttcagtggcttgttgatcagccagatactgaactcgacaacctagcgcagctgatggatgcgttcttatttgatcacactatcatggatccaggactggtgcacagtcctatacacatcagtgtgttaacagggcgtctcactcgggaggtcggtaatctcattccagacatcatggacgaggtccaacatgcggtcgataactgttggcctacgaacacggaaatgtataccgaggtctgcgcctacgatttgatgcttcgagtcacgggccaggctattaaccgagtatttatcggcttgccactctgtcgcgacactggcgttcttgatgcagccaccgcattctcacttgatgtacccattgcggctacgatactgcatttcttcccgaagatcttacgtcccattctagctcccatcattactctgcccaatcgcatccataccaatcgattctacaggattgtgagaccgcttgtgcgacaaaggctaggggcgctcggaaagcagaacgacatttcaaagagcaaagcagaacagccaaaagatcttttgcaatggtgtatcaaccaagcccgggagcagtctgatccgtatcatggcaaggtggatacattggtcgggcggatgatgctgaacaactttaattcaatacatgcatcttcgttcgccgcaacccaggcaatactagatcttgcagcaggtagaccagacgacatggacgagctccgcaacgagatagacgtcgcgcttgctgagcagggtggggaatggaacaagcgcgtactcatggcaatgccgaagatggatagcatgatgcgcgagtcggcacgactgaactcgattattgttacagccacaaatcgcatggtagcgaatcccaagggtatcaacacaccatccggtgttcatcttccgtacggaacaatggtcggtggaccatcatatgccatcatgcatgacgctgcaatttatccagacccagagacattccgaccatttcgctttacagagactcgggatggggaagccagcgctcagagatcgaagggtgcactggccacaacaagtcttgacttcccggcatttgggcacggcaagcatgcttgcgccggtcgcttcttcgcttcaagtatgctgaggctagtaatggcatatgtgcttacgcattatgatatcgagaagctggaaaaacggccggaaaataattggtttggtgcgaaccgaacaccaccgctgaaagccactatcagagtgaggaggaaaaggacgttgaatgcttaa

SEQ ID NO: 28142 - protein, 523 aa, Muscodor strobelii
  misc_feature: SGI Peptide ID NO. 569651
  misc_feature (83)..(513): Pfam Id: PF00067 Pfam Desc: Cytochrome P450
  misc_feature (333)..(513): Pfam Id: PF00067 Pfam Desc: Cytochrome P450
  misc_feature (10)..(517): NCBI GI: 46139535 Blast Desc: FG11282.1 [Gibberella zeae PH-1]
  misc_feature (1)..(520): NCBI GI: 212538421 Blast Desc: cytochrome P450, [Penicillium marneffei ATCC 18224] gi|210069108|gb|EEA23199.1| cytochrome P450, [Penicillium marneffei ATCC 18224]
  misc_feature (1)..(520): NCBI GI: 242765002 Blast Desc: cytochrome P450, [Talaromyces stipitatus ATCC 10500] gi|218724082|gb|EED23499.1| cytochrome P450, [Talaromyces stipitatus ATCC 10500]
  misc_feature (6)..(519): NCBI GI: 145609640 Blast Desc: MGG_03104 [Magnaporthe grisea 70-15] gi|149210871|ref|XP_001522810.1| MGCH7_ch7g908 [Magnaporthe grisea 70-15] gi|86196863|gb|EAQ71501.1| MGCH7_ch7g908 grisea
  misc_feature (18)..(519): NCBI GI: 121711948 Blast Desc: cytochrome P450 [Aspergillus clavatus NRRL 1] gi|119401741|gb|EAW12163.1| cytochrome P450 [Aspergillus clavatus NRRL 1]
  misc_feature (22)..(514): NCBI GI: 238845012 Blast Desc: cytochrome P450 [Microsporum canis CBS 113480]
  misc_feature (6)..(519): NCBI GI: 145602880 Blast Desc: MGG_13768 [Magnaporthe grisea 70-15] gi|145011241|gb|EDJ95897.1| MGG_13768 [Magnaporthe grisea 70-15]
  misc_feature (39)..(518): NCBI GI: 242811722 Blast Desc: cytochrome P450, [Talaromyces stipitatus ATCC 10500] gi|218714147|gb|EED13570.1| cytochrome P450, [Talaromyces stipitatus ATCC 10500]
  misc_feature (39)..(518): NCBI GI: 212544180 Blast Desc: cytochrome P450, [Penicillium marneffei ATCC 18224] gi|210065213|gb|EEA19307.1| cytochrome P450, [Penicillium marneffei ATCC 18224]
  misc_feature (91)..(519): NCBI GI: 171682280 Blast Desc: protein product [Podospora anserina] gi|170941099|emb|CAP66749.1| protein product [Podospora anserina]
  misc_feature (24)..(518): SWISSPROT Homolog: EC 1.14.13.78 Ent-kaurene oxidase
MLNMTVLEPIPVPILGTALVFIVYILYQALAPPKLPDLPIVGIKSGEWFPLTRARWRNAVDMKTATETAYHEYRDSACILPVFGGQNLVHLPLKEFQWLVDQPDTELDNLAQLMDAFLFDHTIMDPGLVHSPIHISVLTGRLTREVGNLIPDIMDEVQHAVDNCWPTNTEMYTEVCAYDLMLRVTGQAINRVFIGLPLCRDTGVLDAATAFSLDVPIAATILHFFPKILRPILAPIITLPNRIHTNRFYRIVRPLVRQRLGALGKQNDISKSKAEQPKDLLQWCINQAREQSDPYHGKVDTLVGRMMLNNFNSIHASSFAATQAILDLAAGRPDDMDELRNEIDVALAEQGGEWNKRVLMAMPKMDSMMRESARLNSIIVTATNRMVANPKGINTPSGVHLPYGTMVGGPSYAIMHDAAIYPDPETFRPFRFTETRDGEASAQRSKGALATTSLDFPAFGHGKHACAGRFFASSMLRLVMAYVLTHYDIEKLEKRPENNWFGANRTPPLKATIRVRRKRTLNA

SEQ ID NO: 28143 - DNA, 797 bp, Muscodor strobelii
  misc_feature: SGI EST ID NO. CUFF.66269.0
  misc_feature: Variant of the nucleotide sequence at SEQ ID NO 28141
aagatcttttgcaatggtgtatcaaccaagcccgggagcagtctgatccgtatcatggcaaggtggatacattggtcgggcggatgatgctgaacaactttaattcaatacatgcatcttcgttcgccgcaacccaggcaatactagatcttgcagcaggtagaccagacgacatggacgagctccgcaacgagatagacgtcgcgcttgctgagcagggtggggaatggaacaagcgcgtactcatggcaatgccgaagatggatagcatgatgcgcgagtcggcacgactgaactcgattattgttacagccacaaatcgcatggtagcgaatcccaagggtatcaacacaccatccggtgttcatcttccgtacggaacaatggtcggtggaccatcatatgccatcatgcatgacgctgcaatttatccagacccagagacattccgaccatttcgctttacagagactcgggatggggaagccagcgctcagagatcgaagggtgcactggccacaacaagtcttgacttcccggcatttgggcacggcaagcatgcttgcgccggtcgcttcttcgcttcaagtatgctgaggctagtaatggcatatgtgcttacgcattatgatatcgagaagctggaaaaacggccggaaaataattggtttggtgcgaaccgaacaccaccgctgaaagccactatcagagtgaggaggaaaaggacgttgaatgcttaatctttataacttagtgtagttatcttcaaatttctggtcattacatctaacatggag

SEQ ID NO: 28144 - DNA, 990 bp, Muscodor strobelii
  misc_feature: SGI cDNA ID NO. 569652
  misc_feature: Encodes the peptide sequence at SEQ ID NO 28145
atgcctcagctcgttggtaaagaatctggccctacaggcttcggcctcatgggtctgacttggcgacagcagccatgttcgcaagaacaggctttcgaagctatgaaaagtgcactagaccagggatgtaacctctggaatggtggcgaattttacggtccacccaactacaatagtcttgtgctgttagaacagtatttcgagaaatatcccgaagatgcggataaggtgattcttagcatcaaggggggtaataaccccgagacgcggggtcctgatggatctcctgagaacactcggcgtagtattgacaactgcattgcgcaattgaaaggtcgcaagaagattgacatgtttgagtttgcgcgacgcgacccaaatacacctctggaaatcacatttggcgtcattgagaaggaatatatccagaccggcaaaattggtggcatctcgctctctgaggttcgagcggagactatccacgaagcagtgaaacatacaaaggtcgctgcagtcgaggtcgaattatccttattctcgagagatccattggagaacggtgttgccgccgcctgtgctcaatatggtatccccttagtcgcctactccccgatagggagaggtatactcactggacagataaaaagccttgatgatgtggagcccatggttaaggtgttcaagtttccacgattcgaagagggcaactttgaaaagaacatgcagctcgtcgataaggtcacggaattggcgagtcagaaaggctgcacaactgcacagctagccatcaattggacgcgcgcactttcgcagaagcccggcatgcctacgatcattccaattccaggtgcgactactaagtcgcgtgtggatgagaattcgaaggttgtagatctcacagctgatgacatgtcgcaaatcgatgtcatcctgcagaacttcacggtcagcggcgacagataccatccaatggttcctacgaacacataa

SEQ ID NO: 28145 - protein, 329 aa, Muscodor strobelii
  misc_feature: SGI Peptide ID NO. 569652
  misc_feature (6)..(312): Pfam Id: PF00248 Pfam Desc: Aldo/keto reductase family
  misc_feature (1)..(329): NCBI GI: 238484713 Blast Desc: aldo/keto reductase, [Aspergillus flavus NRRL3357] gi|220701645|gb|EED57983.1| aldo/keto reductase, [Aspergillus flavus NRRL3357]
  misc_feature (1)..(329): NCBI GI: 115492031 Blast Desc: conserved [Aspergillus terreus NIH2624] gi|114197503|gb|EAU39203.1| conserved [Aspergillus terreus NIH2624]
  misc_feature (1)..(329): NCBI GI: 145257414 Blast Desc: An04g03570 [Aspergillus niger] gi|134058638|emb|CAK38622.1| protein product [Aspergillus niger]
  misc_feature (1)..(329): NCBI GI: 67904384 Blast Desc: AN9179.2 [Aspergillus nidulans FGSC A4] gi|40742280|gb|EAA61470.1| AN9179.2 [Aspergillus nidulans FGSC A4] gi|259485392|tpe|CBF82377.1| TPA: pyridoxal reductase (AKR8),
  misc_feature (1)..(329): NCBI GI: 169767802 Blast Desc: [Aspergillus oryzae RIB40] gi|83766227|dbj|BAE56370.1| protein product [Aspergillus oryzae]
  misc_feature (1)..(329): NCBI GI: 85091461 Blast Desc: NCU09141 [Neurospora crassa OR74A] gi|28920304|gb|EAA29677.1| NCU09141 [Neurospora crassa OR74A]
  misc_feature (1)..(329): NCBI GI: 261357533 Blast Desc: pyridoxal reductase [Verticillium albo-atrum VaMs.102]
  misc_feature (1)..(329): NCBI GI: 256735285 Blast Desc: NECHADRAFT_90163 [Nectria haematococca mpVI 77-13-4]
  misc_feature (1)..(328): NCBI GI: 85119285 Blast Desc: NCU02930 [Neurospora crassa OR74A] gi|28927423|gb|EAA36376.1| NCU02930 [Neurospora crassa OR74A]
  misc_feature (1)..(329): NCBI GI: 226885247 Blast Desc: aldo-keto reductase [Sordaria macrospora]
  misc_feature (1)..(322): SWISSPROT Homolog: EC 1.1.1.65 Pyridoxine 4-dehydrogenase
MPQLVGKESGPTGFGLMGLTWRQQPCSQEQAFEAMKSALDQGCNLWNGGEFYGPPNYNSLVLLEQYFEKYPEDADKVILSIKGGNNPETRGPDGSPENTRRSIDNCIAQLKGRKKIDMFEFARRDPNTPLEITFGVIEKEYIQTGKIGGISLSEVRAETIHEAVKHTKVAAVEVELSLFSRDPLENGVAAACAQYGIPLVAYSPIGRGILTGQIKSLDDVEPMVKVFKFPRFEEGNFEKNMQLVDKVTELASQKGCTTAQLAINWTRALSQKPGMPTIIPIPGATTKSRVDENSKVVDLTADDMSQIDVILQNFTVSGDRYHPMVPTNT

SEQ ID NO: 28146 - DNA, 1969 bp, Muscodor strobelii
  misc_feature: SGI EST ID NO. CUFF.66275.0
  misc_feature: Variant of the nucleotide sequence at SEQ ID NO 28144
gtagcttaccgaaaggtcgactcaagcaagtgcaaatatttaagtccgctgtccccgaattctctatacgtgtatcgcatcatccataccgaaatagcaagtctgcaatgcacctaactagtgatcccgttaacgccggttgttctcggtaccccgcgggcaggcgacagcccttgaccgattgatttaggaccaatcggcgattcgtctgtttcgcaaggtttgggtacgtactgaaccgaagctcgaatccgatggcttcgtacgacctgaacggattaaagtcgattggctgcataaaagatgccgagatcaataaatgctctttcaaaatttgtttcaattgttccacctcttctctaccgtcttcctactgctctttttcagaaacatcattatcgtacgtcgacgcaattccgaatgcctcagctcgttggtaaagaatctggccctacaggcttcggcctcatgggtctgacttggcgacagcagccatgttcgcaagaacaggctttcgaagctatgaaaagtgcactagaccagggatgtaacctctggaatggtggcgaattttacggtccacccaactacaatagtcttgtgctgttagaacagtatttcgagaaatatcccgaagatgcggataaggtgattcttagcatcaaggggggtaataaccccgagacgcggggtcctgatggatctcctgagaacactcggcgtagtattgacaactgcattgcgcaattgaaaggtcgcaagaagattgacatgtttgagtttgcgcgacgcgacccaaatacacctctggaaatcacatttggcgtcattgagaaggaatatatccagaccggcaaaattggtggcatctcgctctctgaggttcgagcggagactatccacgaagcagtgaaacatacaaaggtcgctgcagtcgaggtcgaattatccttattctcgagagatccattggagaacggtgttgccgccgcctgtgctcaatatggtatccccttagtcgcctactccccgatagggagaggtatactcactggacagataaaaagccttgatgatgtggagcccatggttaaggtgttcaagtttccacgattcgaagagggcaactttgaaaagaacatgcagctcgtcgataaggtcacggaattggcgagtcagaaaggctgcacaactgcacagctagccatcaattggacgcgcgcactttcgcagaagcccggcatgcctacgatcattccaattccaggtgcgactactaagtcgcgtgtggatgagaattcgaaggttgtagatctcacagctgatgacatgtcgcaaatcgatgtcatcctgcagaacttcacggtcagcggcgacagataccatccaatggttcctacgaacacataagccttatagaaaccgctcccaagtcgcactaaatggaaacttgctcttggtattgcgctttaccaaggatgagtcgatgttagtaggaagtgattgatatcgtctttcagttatcgtacgcgatgacctagccggcagtatgagaatacgatccaacgtttggtttgactagcactatatagacttattccaaacgtaatcaagtttctctgtccaacccacggcgactctcacggtggcataacgtcatgggatttccccctattgcattcatgttttctagatcctttcatatgaggatacttacaagccattcaaacatagtgcacgaaaaagcttcgccaccgcttctgaattttttcgcagagcatcgtactatgctcgcagactgaccctcgcgttttcacggagggtattacgggctttcttttcacccaaagcagtggtatcacagccaccacacttcagggtgaactacctcttcgaattcgggtgctgactagcaacgagttctaatttataagtgtatgcccagtcaatcagaatcatgcccatgatg

SEQ ID NO: 28147 - DNA, 570 bp, Muscodor strobelii
  misc_feature: SGI cDNA ID NO. 569653
  misc_feature: Encodes the peptide sequence at SEQ ID NO 28148
atgtctaccaagggccccctgactaagttcccggctgagggtttacgctcctcgaggcggttcatcacttcgcacaatgcggacggcaaaggcgtatttgtggtcgacgacgagggtgatcatcaccgcatcatggtccagggtgctggagtcgccaatatcatctacagcaccaactcgaaccctgtcgacatgaatgatgaaaaggacatgaaatatgcccgagaaaacgagccaggcatccatgtacccaacggaagtgtcgtccgtctgatcgattttgcgcccggaatcgagtcaccaatccatagagctatgtcgatcgactacggtgtggttatagagggaaagttcctcctcacgcttgatagtggcgaaagcaaagtcatgctgcctggagatatgagtgttaatcgaggctgtatgcataagtggaaaaacctggacgaggaaaagcccggccgcatggttttcatcctcctggatgtgacgcccttgaaggttaacggggaagaggtgaaggaataccttggagacctggccagtgactatgctcatgttgagcattga

SEQ ID NO: 28148 - protein, 189 aa, Muscodor strobelii
  misc_feature: SGI Peptide ID NO. 569653
  misc_feature (90)..(160): Pfam Id: PF07883 Pfam Desc: Cupin domain
  misc_feature (2)..(184): NCBI GI: 242773368 Blast Desc: conserved [Talaromyces stipitatus ATCC 10500] gi|218721845|gb|EED21263.1| conserved [Talaromyces stipitatus ATCC 10500]
  misc_feature (1)..(185): NCBI GI: 145602526 Blast Desc: MGG_10911 [Magnaporthe grisea 70-15] gi|145010938|gb|EDJ95594.1| MGG_10911 [Magnaporthe grisea 70-15]
  misc_feature (1)..(188): NCBI GI: 85119242 Blast Desc: NCU02919 [Neurospora crassa OR74A] gi|28927412|gb|EAA36365.1| [Neurospora crassa OR74A]
  misc_feature (10)..(184): NCBI GI: 85119250 Blast Desc: NCU02921 [Neurospora crassa OR74A] gi|28927414|gb|EAA36367.1| conserved [Neurospora crassa OR74A]
  misc_feature (10)..(168): NCBI GI: 145602530 Blast Desc: MGG_12981 [Magnaporthe grisea 70-15] gi|145010940|gb|EDJ95596.1| MGG_12981 [Magnaporthe grisea 70-15]
  misc_feature (15)..(180): NCBI GI: 116178866 Blast Desc: CHGG_00061 [Chaetomium globosum CBS 148.51] gi|88184358|gb|EAQ91826.1| CHGG_00061 [Chaetomium globosum CBS 148.51]
  misc_feature (14)..(179): NCBI GI: 189212065 Blast Desc: cupin domain containing protein [Pyrenophora tritici-repentis Pt-1C-BFP] gi|187979558|gb|EDU46184.1| cupin domain containing protein [Pyrenophora tritici-repentis
  misc_feature (15)..(180): NCBI GI: 119488384 Blast Desc: cupin domain protein [Neosartorya fischeri NRRL 181] gi|119410853|gb|EAW20798.1| cupin domain protein [Neosartorya fischeri NRRL 181]
  misc_feature (15)..(180): NCBI GI: 255933666 Blast Desc: Pc12g14060 [Penicillium chrysogenum Wisconsin 54-1255] gi|211582831|emb|CAP81033.1| Pc12g14060 [Penicillium chrysogenum Wisconsin 54-1255]
  misc_feature (15)..(180): NCBI GI: 256729592 Blast Desc: NECHADRAFT_83579 [Nectria haematococca mpVI 77-13-4]
MSTKGPLTKFPAEGLRSSRRFITSHNADGKGVFVVDDEGDHHRIMVQGAGVANIIYSTNSNPVDMNDEKDMKYARENEPGIHVPNGSVVRLIDFAPGIESPIHRAMSIDYGVVIEGKFLLTLDSGESKVMLPGDMSVNRGCMHKWKNLDEEKPGRMVFILLDVTPLKVNGEEVKEYLGDLASDYAHVEH

SEQ ID NO: 28149 - DNA, 356 bp, Muscodor strobelii
  misc_feature: SGI EST ID NO. CUFF.66282.0
  misc_feature: Variant of the nucleotide sequence at SEQ ID NO 28147
ttttaatcacagagaaggaactgcaaatttcttaagagtggtgaactgaacacgatccaatgtctaccaagggccccctgactaagttcccggctgagggtttacgctcctcgaggcggttcatcacttcgcacaatgcggacggcaaaggcgtatttgtggtcgacgacgagggtgatcatcaccgcatcatggtccagggtgctggagtcgccaatatcatctacagcaccaactcgaaccctgtcgacatgaatgatgaaaaggacatgaaatatgcccgagaaaacgagccaggcatccatgtacccaacggaagtgtcgtccgtctgatcgattttgcgcccggaatcgag

SEQ ID NO: 28150 - DNA, 2283 bp, Muscodor strobelii
  misc_feature: SGI cDNA ID NO. 569654
  misc_feature: Encodes the peptide sequence at SEQ ID NO 28151
atgtctactaaattcaaagttatcattgttggcggtggcattgggggactttctttagcgaatatgttagaaaggttcgatatagaatatgtcctattagaggcacgcgacgaaattgtttctaaagagggagcagccattggtctcatgccaaacggcagtttcattctagaacaactcgggatattcgaggccgttaaagcagccgctcctgattccgagatccaagactcgcatgtccgcgaccctacgggaaaatccatcatgtatctgaagcatatgctattccatcaggagatgcgacacggatatcccatgctcttttttgacaggcgcttatttctcgaggttcttaatgagcaacttgggagaaaagaccgaattgtgactggcagcgcagttcgccacctcgaaatacttgaaaaaggcgttcaagtgactacccaaaacggaaagtcttttacgggcgacgtcgtgataggtgccgatggcattcatagcactatacggagagagctctacagaactgggcggttctcgacaccagctgaccaagataatgtgccatgctactatcaatgcagctttggaattgcccaggatgttgaagggtggccgcaaagtgaacagtgttttacagctggtcgcggaaaatcctttcttgtagtatctggtcccaaaggaagatgctattggttcttgtttgtcaagtaccctaagcccctgtatgggagcgaaattcccagatattcagcagaagatgaagccagattcgtagaggagaactgtcatctcacgattcgcgaaggattgagttttggccaggtctatgcaaagcgaattacatcaggacttactccccttcatgaagtcgtctttccaacatggttctctgatcgtgtacttctcattggtgacgccgtgcataagcctaatcccattggtggcatgggtgccaacgccgcgatcgagaccgctgctgagctcgtgaatgccctggttgatgccaaggcccaacgagttgacagtctcgatggtctatcccttgaagagatccagaccatctttaaacgtgttcaagatacccgaattcgaagggccaaattcacggtagcggcatctcatgaactgcagggcctcgtggcgatggagaatccgctgctcgccaggtttgcattgcatgtccttctaccgcttgcaggaaaacataatttctttcgcgagctttctcttcgaatagtaggagcctctcggctgaaacaccttccgatgccttctcggccacgagcgattccttatgatcacgagcttccttcgagacctttgacgggcaccgtcgctcttattgtgcggtcgctcttctgtgctacagctgcatatctcatttattgtgcacaagcaactcaagcgccgccacgagaacttcgcagctctttgacaactcataatcatacattaactgccttcatcaattactcactgggtatcctttcgccgctgctcattttcaatatcgaaggctttcgtattggtcgagtcggttcgattgtcgggcttcctctcgtcttcgctattggcgtaatgactcttggcataggaagatcaacactctcttacgctctcctctacatgctacattccccccagatcacggtagatcgagcagtccctgtcaatcatgcacgatccctgcttcttgtcaccattctaggcatattactacttggcgtttgtctaagatgcgctttcgccaattcggaaatgtgcaattggcaggcagttgcaccatgtctctctgtgatgttctatatcttcccaatatcactcacattgatactaaagcggtttgcacgaagaagtaccaacaaccaagatgcggagaaacacgtggaatggtatagcactgatgacttgcccgccttgaaagctctctatggccttgtcattttcgtgcaaatttctgtatacatcggaatcgctctgacgaaagatcacgcacttacaaatacattcacggcaccaatgtcgttcaatgcgccacctactatgattgcaagcgagctcttttggctcaatgccgggtctacgcttcactcttcgtatttgatctgggagcttcgacagcagggatatatttcgactaggagcagtattggcagcctctttggtcttattatttctagtatgctcgttaacccgtccgcttgctggtttgctgtctattattggcgcgagaacactatctcctctctgtctgttcgatgttcaccgaaacggcgttag

SEQ ID NO: 28151 - protein, 760 aa, Muscodor strobelii
  misc_feature: SGI Peptide ID NO. 569654
  misc_feature (4)..(359): Pfam Id: PF01494 Pfam Desc: FAD binding domain
  misc_feature (296)..(323): Pfam Id: PF01494 Pfam Desc: FAD binding domain
  misc_feature (4)..(38): Pfam Id: PF01494 Pfam Desc: FAD binding domain
  misc_feature (2)..(752): NCBI GI: 119494160 Blast Desc: FAD binding domain protein [Neosartorya fischeri NRRL 181] gi|119412152|gb|EAW22093.1| FAD binding domain protein [Neosartorya fischeri NRRL 181]
  misc_feature (5)..(752): NCBI GI: 212533543 Blast Desc: monooxygenase, [Penicillium marneffei ATCC 18224] gi|210072292|gb|EEA26381.1| monooxygenase, [Penicillium marneffei ATCC 18224]
  misc_feature (5)..(753): NCBI GI: 55823911 Blast Desc: monooxygenase [Fusarium heterosporum]
  misc_feature (17)..(752): NCBI GI: 238496933 Blast Desc: monooxygenase, [Aspergillus flavus NRRL3357] gi|220694582|gb|EED50926.1| monooxygenase, [Aspergillus flavus NRRL3357]
  misc_feature (17)..(749): NCBI GI: 171694496 Blast Desc: protein product [Podospora anserina] gi|170947490|emb|CAP59651.1| protein product [Podospora anserina]
  misc_feature (20)..(753): NCBI GI: 39975645 Blast Desc: MGG_00031 [Magnaporthe grisea 70-15] gi|145019142|gb|EDK03421.1| MGG_00031 [Magnaporthe grisea 70-15]
  misc_feature (5)..(564): NCBI GI: 242778338 Blast Desc: monooxygenase, [Talaromyces stipitatus ATCC 10500] gi|218722837|gb|EED22255.1| monooxygenase, [Talaromyces stipitatus ATCC 10500]
  misc_feature (5)..(753): NCBI GI: 256720114 Blast Desc: NECHADRAFT_88533 [Nectria haematococca mpVI 77-13-4]
  misc_feature (5)..(751): NCBI GI: 46102717 Blast Desc: FG00057.1 [Gibberella zeae PH-1]
  misc_feature (7)..(504): NCBI GI: 256730454 Blast Desc: NECHADRAFT_89571 [Nectria haematococca mpVI 77-13-4]
MSTKFKVIIVGGGIGGLSLANMLERFDIEYVLLEARDEIVSKEGAAIGLMPNGSFILEQLGIFEAVKAAAPDSEIQDSHVRDPTGKSIMYLKHMLFHQEMRHGYPMLFFDRRLFLEVLNEQLGRKDRIVTGSAVRHLEILEKGVQVTTQNGKSFTGDVVIGADGIHSTIRRELYRTGRFSTPADQDNVPCYYQCSFGIAQDVEGWPQSEQCFTAGRGKSFLVVSGPKGRCYWFLFVKYPKPLYGSEIPRYSAEDEARFVEENCHLTIREGLSFGQVYAKRITSGLTPLHEVVFPTWFSDRVLLIGDAVHKPNPIGGMGANAAIETAAELVNALVDAKAQRVDSLDGLSLEEIQTIFKRVQDTRIRRAKFTVAASHELQGLVAMENPLLARFALHVLLPLAGKHNFFRELSLRIVGASRLKHLPMPSRPRAIPYDHELPSRPLTGTVALIVRSLFCATAAYLIYCAQATQAPPRELRSSLTTHNHTLTAFINYSLGILSPLLIFNIEGFRIGRVGSIVGLPLVFAIGVMTLGIGRSTLSYALLYMLHSPQITVDRAVPVNHARSLLLVTILGILLLGVCLRCAFANSEMCNWQAVAPCLSVMFYIFPISLTLILKRFARRSTNNQDAEKHVEWYSTDDLPALKALYGLVIFVQISVYIGIALTKDHALTNTFTAPMSFNAPPTMIASELFWLNAGSTLHSSYLIWELRQQGYISTRSSIGSLFGLIISSMLVNPSACWFAVYYWRENTISSLSVRCSPKRR

SEQ ID NO: 28152 - DNA, 840 bp, Muscodor strobelii
  misc_feature: SGI cDNA ID NO. 569655
  misc_feature: Encodes the peptide sequence at SEQ ID NO 28153
atgggtctcgaaatcgacggcattgccctagtcactggtgccggcagcggaataggtcgagagtgttgcctcggatttgccgttgaaggcgcgaaggccgttgtcctggtggacctcaaccgcgacgctgcagatgcagtggcacgcgagactgaggcacaggccaccaatcccagctacaaggctttggttctaactgtagacgtgaccgatgctgatgccgttgaggccatggttcgagcggccgtggaagcttttggacgcatcgattactgtgtaaacagcgctggtgtcggtgtgcaaaagccccgccccgtcggggatgctgatcctgctgagatgaatcggttttggcaggtaaatgtgatgggaactttcaattgcatccaatctgttaccagagccatgaaagaacaagacgtgcggaagatacccggtcgcagaaagaatgcggcggaacgagactgtggccggggtgtgattctcaatctagggtcctgcaatagctattgtgcgacaccaaatattgtccagtacacaaccgcgaagcatgctgtaatagggcttacgaaaaatgcagctcttgacaatgcacgttttggaattcgcgtcaatgccatctgccctggttggactgagacgcccatggtcagtgctgccattgcgggcgacgagaatttgcccaaaatgatgaaagctgtcatacccatgtcgcgcattgctaccggagaggagatagctgatgtcatcatgttcatggttagtcctagatccagctatgttacaggtgttggatgggttgtagatggtggcacccttctgcaattgcaagctgtctaa

SEQ ID NO: 28153 - protein, 279 aa, Muscodor strobelii
  misc_feature: SGI Peptide ID NO. 569655
  misc_feature (7)..(198): Pfam Id: PF00106 Pfam Desc: short chain dehydrogenase
  misc_feature (7)..(170): Pfam Id: PF08659 Pfam Desc: KR domain
  misc_feature (7)..(98): Pfam Id: PF08659 Pfam Desc: KR domain
  misc_feature (15)..(278): NCBI GI: 242773388 Blast Desc: short-chain dehydrogenase, [Talaromyces stipitatus ATCC 10500] gi|218721849|gb|EED21267.1| short-chain dehydrogenase, [Talaromyces stipitatus ATCC 10500]
  misc_feature (5)..(278): NCBI GI: 156048278 Blast Desc: SS1G_08870 [Sclerotinia sclerotiorum 1980] gi|154693267|gb|EDN93005.1| SS1G_08870 [Sclerotinia sclerotiorum 1980]
  misc_feature (13)..(278): NCBI GI: 154316211 Blast Desc: BC1G_03691 [Botryotinia fuckeliana B05.10] gi|150846477|gb|EDN21670.1| BC1G_03691 [Botryotinia fuckeliana B05.10]
  misc_feature (3)..(277): NCBI GI: 145602532 Blast Desc: MGG_12982 [Magnaporthe grisea 70-15] gi|145010941|gb|EDJ95597.1| MGG_12982 [Magnaporthe grisea 70-15]
  misc_feature (4)..(271): NCBI GI: 154294990 Blast Desc: BC1G_13361 [Botryotinia fuckeliana B05.10] gi|150844490|gb|EDN19683.1| BC1G_13361 [Botryotinia fuckeliana B05.10]
  misc_feature (3)..(271): NCBI GI: 238840117 Blast Desc: short-chain dehydrogenase/reductase SDR [Microsporum canis CBS 113480]
  misc_feature (2)..(271): NCBI GI: 242816340 Blast Desc: oxidoreductase, short-chain dehydrogenase/reductase family [Talaromyces stipitatus ATCC 10500] gi|218715096|gb|EED14519.1| oxidoreductase, short-chain family
  misc_feature (3)..(274): NCBI GI: 164427623 Blast Desc: NCU02920 [Neurospora crassa OR74A] gi|157071818|gb|EAA36366.2| conserved [Neurospora crassa OR74A]
  misc_feature (7)..(274): NCBI GI: 145259387 Blast Desc: An04g09990 [Aspergillus niger] gi|134074978|emb|CAK39058.1| protein product [Aspergillus niger]
  misc_feature (3)..(271): NCBI GI: 46139491 Blast Desc: FG11260.1 [Gibberella zeae PH-1]
  misc_feature (9)..(260): SWISSPROT Homolog: EC 1.1.1.100 3-oxoacyl-[acyl-carrier-protein] reductase
MGLEIDGIALVTGAGSGIGRECCLGFAVEGAKAVVLVDLNRDAADAVARETEAQATNPSYKALVLTVDVTDADAVEAMVRAAVEAFGRIDYCVNSAGVGVQKPRPVGDADPAEMNRFWQVNVMGTFNCIQSVTRAMKEQDVRKIPGRRKNAAERDCGRGVILNLGSCNSYCATPNIVQYTTAKHAVIGLTKNAALDNARFGIRVNAICPGWTETPMVSAAIAGDENLPKMMKAVIPMSRIATGEEIADVIMFMVSPRSSYVTGVGWVVDGGTLLQLQAV

SEQ ID NO: 28154 - DNA, 1572 bp, Muscodor strobelii
  misc_feature: SGI cDNA ID NO. 569656
  misc_feature: Encodes the peptide sequence at SEQ ID NO 28155
atgggcgccctactagtggcaattgggctcatagtactggctctctgcgttggcttaggctcacgcaagcctctaccgcctgggccgccaagtctccctttcctaggaaatcttcatcagataccgcgcaccgggttgcacttgaaatacacaaaatgggctctaaaatacggtcctatcttttcactcaagatcggaaattggccaatgattgttttgagcacggccgctgacgctggtcgggtgatggacaagcgcagtcttcattacagcgaccgtccggcttcccacgtcattgggaatcttgtgttcgaaggcaatcatcctatgttcatggacgcaaatgaacgatggaaactgagacgaaagctttaccatcagatacttcaggagtctaaatgcaacagccagcatgtctcgttgctggaagccgaatccactcagttggttcgagatattgcactcaacccaaacgagctgatgctgcatcctggtcgttttagtaatagcatcatgatgagcatgatttttggagtccgaacacctacgtacaacgcgcctcattacctgaaactgcgtgatctaatgaccactttgagcggtctcggcgagataggtgctacgccgcctgtggatattctgccattactcaagtatctacccgagaaactctggggcaactggaaaacgcgagctcaactacttcgtgagaaggtctttgacctgtatagtccgttggtggatcatgtcatcgagcgccgaaagacaggtcttcagctgaatagttttctcgatggcgttttggatcagaaagacagtttgaccttgagccgggatgagatcgatgttatgtgcggaaatcttctagaagggggtactgatacgatggcaacgctcatactcacccttgctcaagccatgactctgtatcctgaaatacagacccaaattcatgagcatattgattctgtcatcaatgaccaaaaaatgccggaatgggcagattacgagcgtctgccgtatgttgcgatggtcgtcaaggagcttcaccgttggcggccccctgcccctgcaggcttcccacatgtcgtggacatagacgacgaagtggacggcttgagaatccccaagggttcggcggtgatcatcaatatctggggcatccatcacgacgtcgatcggtttgcgaaccctgacatattcaacccagatcgatacaaggagcagactcagctcgcctctgtatacgctaactctggggactaccaaaaccgagatcatttcggctacggaattgggcgacgtatctgtccaggtatccatctcgctgagcgtgctctgtggctcgcggtggcgagaatcatgtgggcattcgacttcaagcctaagcaagacgcaaatggaaaccctatagcgatcgatgtaacgccaaccactggctatcgggatggcttcttgaaccaatgctatccctttgaagtggatgtcactgtcaggtcgcaaacgcgtctcgatacaatcctcgacagtttcactaaagcagaagttcatgtgtttagccgtttcgcttag

SEQ ID NO: 28155 - protein, 523 aa, Muscodor strobelii
  misc_feature: SGI Peptide ID NO. 569656
  misc_feature (26)..(485): Pfam Id: PF00067 Pfam Desc: Cytochrome P450
  misc_feature (26)..(465): Pfam Id: PF00067 Pfam Desc: Cytochrome P450
  misc_feature (5)..(522): NCBI GI: 238840115 Blast Desc: cytochrome P450 2D18 [Microsporum canis CBS 113480]
  misc_feature (1)..(523): NCBI GI: 242782663 Blast Desc: cytochrome P450, [Talaromyces stipitatus ATCC 10500] gi|218720192|gb|EED19611.1| cytochrome P450, [Talaromyces stipitatus ATCC 10500]
  misc_feature (4)..(522): NCBI GI: 259479677 Blast Desc: TPA: cytochrome P450, (Eurofung) [Aspergillus nidulans FGSC A4]
  misc_feature (35)..(522): NCBI GI: 171691562 Blast Desc: protein product [Podospora anserina] gi|170945729|emb|CAP71842.1| protein product [Podospora anserina]
  misc_feature (5)..(523): NCBI GI: 145256038 Blast Desc: An10g00110 [Aspergillus niger CBS 513.88] gi|134078574|emb|CAK49102.1| protein product [Aspergillus niger]
  misc_feature (37)..(523): NCBI GI: 255939388 Blast Desc: Pc16g00400 [Penicillium chrysogenum Wisconsin 54-1255] gi|211585086|emb|CAP92710.1| Pc16g00400 [Penicillium chrysogenum Wisconsin 54-1255]
  misc_feature (34)..(522): NCBI GI: 259482076 Blast Desc: TPA: cytochrome P450, (Eurofung) [Aspergillus nidulans FGSC A4]
  misc_feature (34)..(522): NCBI GI: 67537750 Blast Desc: AN5045.2 [Aspergillus nidulans FGSC A4] gi|40741933|gb|EAA61123.1| AN5045.2 [Aspergillus nidulans FGSC A4]
  misc_feature (4)..(523): NCBI GI: 195971093 Blast Desc: m-cresol methyl hydroxylase [Aspergillus clavatus]
  misc_feature (4)..(523): NCBI GI: 121710948 Blast Desc: Cytochrome P450 oxidoreductase, [Aspergillus clavatus NRRL 1] gi|119401240|gb|EAW11664.1| Cytochrome P450 oxidoreductase, [Aspergillus clavatus NRRL 1]
  misc_feature (47)..(486): SWISSPROT Homolog: EC 1.14.99.9 Steroid 17-alpha-monooxygenase
MGALLVAIGLIVLALCVGLGSRKPLPPGPPSLPFLGNLHQIPRTGLHLKYTKWALKYGPIFSLKIGNWPMIVLSTAADAGRVMDKRSLHYSDRPASHVIGNLVFEGNHPMFMDANERWKLRRKLYHQILQESKCNSQHVSLLEAESTQLVRDIALNPNELMLHPGRFSNSIMMSMIFGVRTPTYNAPHYLKLRDLMTTLSGLGEIGATPPVDILPLLKYLPEKLWGNWKTRAQLLREKVFDLYSPLVDHVIERRKTGLQLNSFLDGVLDQKDSLTLSRDEIDVMCGNLLEGGTDTMATLILTLAQAMTLYPEIQTQIHEHIDSVINDQKMPEWADYERLPYVAMVVKELHRWRPPAPAGFPHVVDIDDEVDGLRIPKGSAVIINIWGIHHDVDRFANPDIFNPDRYKEQTQLASVYANSGDYQNRDHFGYGIGRRICPGIHLAERALWLAVARIMWAFDFKPKQDANGNPIAIDVTPTTGYRDGFLNQCYPFEVDVTVRSQTRLDTILDSFTKAEVHVFSRFA

SEQ ID NO: 28156 - DNA, 711 bp, Muscodor strobelii
  misc_feature: SGI cDNA ID NO. 569657
  misc_feature: Encodes the peptide sequence at SEQ ID NO 28157
atggggaacaacacgaatagtccatctgtgctgattacagggtgcgggaaaggtggtattggacatgccttagcaaatgaattcaagcagaatggctatactgtctttacaactttattatcacacgagtcgcgagagcacttgacggaagcgggcattcaagcctttacagccgatgttactagcgatgacgagatctgcgcattgcgcgataccataaccacgattacccatggaaagctagacgtcttggtgaattgcgcaggagtgtgctacacgatgaccgctgccgataccgaaatcaaagaggtggagaagatgtttgctgtcaatgtctttggtgctatgcgaatggttcacattttccatccgctcattatccgtgccaagggtaaaattgtgaacatcggaagcgttggtggtattgtgccgtatgtgtatgggtctagttacaatgcatctaaagcagctttgcatcattggggagatactctccgtgtggagatgaaaccatttgacgtttccgttgtcaacatcatttcaggcgaagtatcaacaaatatcttgaagcgtgatcacgggagatcactacccgaagattcgttctatcgacccttagagaagaattttgccaaccacgttactagaacaccccgattggatgttcacaaaagatttcaatttgaatgcgttgcgaaccacttgaggtaa

SEQ ID NO: 28157 - protein, 236 aa, Muscodor strobelii
  misc_feature: SGI Peptide ID NO. 569657
  misc_feature (8)..(170): Pfam Id: PF00106 Pfam Desc: short chain dehydrogenase
  misc_feature (11)..(218): NCBI GI: 145602536 Blast Desc: MGG_12983 [Magnaporthe grisea 70-15] gi|145010944|gb|EDJ95600.1| MGG_12983 [Magnaporthe grisea 70-15]
  misc_feature (11)..(218): NCBI GI: 85119254 Blast Desc: NCU02922 [Neurospora crassa OR74A] gi|28927415|gb|EAA36368.1| [Neurospora crassa OR74A]
  misc_feature (15)..(218): NCBI GI: 226885233 Blast Desc: short chain dehydrogenase [Sordaria macrospora]
  misc_feature (11)..(199): NCBI GI: 242773373 Blast Desc: short-chain dehydrogenase, [Talaromyces stipitatus ATCC 10500] gi|218721846|gb|EED21264.1| short-chain dehydrogenase, [Talaromyces stipitatus ATCC 10500]
  misc_feature (6)..(214): NCBI GI: 261187893 Blast Desc: short chain dehydrogenase/reductase [Ajellomyces dermatitidis SLH14081] gi|239593481|gb|EEQ76062.1| short chain dehydrogenase/reductase [Ajellomyces dermatitidis SLH14081]
  misc_feature (6)..(214): NCBI GI: 239608460 Blast Desc: short chain dehydrogenase/reductase [Ajellomyces dermatitidis ER-3]
  misc_feature (10)..(219): NCBI GI: 46110731 Blast Desc: FG02247.1 [Gibberella zeae PH-1]
  misc_feature (10)..(219): NCBI GI: 256726637 Blast Desc: [Nectria haematococca mpVI 77-13-4]
  misc_feature (1)..(214): NCBI GI: 238839856 Blast Desc: oxidoreductase [Microsporum canis CBS 113480]
  misc_feature (6)..(215): NCBI GI: 240110172 Blast Desc: oxidoreductase,short chain dehydrogenase, [Coccidioides posadasii C735 delta SOWgp]
  misc_feature (11)..(203): SWISSPROT Homolog: EC 1.1.1.101 Acylglycerone-phosphate reductase
MGNNTNSPSVLITGCGKGGIGHALANEFKQNGYTVFTTLLSHESREHLTEAGIQAFTADVTSDDEICALRDTITTITHGKLDVLVNCAGVCYTMTAADTEIKEVEKMFAVNVFGAMRMVHIFHPLIIRAKGKIVNIGSVGGIVPYVYGSSYNASKAALHHWGDTLRVEMKPFDVSVVNIISGEVSTNILKRDHGRSLPEDSFYRPLEKNFANHVTRTPRLDVHKRFQFECVANHLR

SEQ ID NO: 28158 - DNA, 6987 bp, Muscodor strobelii
  misc_feature: SGI cDNA ID NO. 569658
  misc_feature: Encodes the peptide sequence at SEQ ID NO 28159
atgaagggcggatacttcctgcaagaagacattcgtcaattcgataacagctttttcggaatcaacaatctcgaggccacttatatggaccctcaacagcgaaagcttctcgaagtagtcttcgagtgtttagaaaatgcgggcatcccgctcgacaaagcttcggggtcaaatacaggttgctatgtcggcaattttactgtcgattttcagattatgcagcttaaagagtcagactacttgcatcattattccggcacaggcttaggcaccaccatattagccaatcgaatcagccatgtcttcaaccttcttgggcccagtctcgtcctcgatacggcgtgttcctcatcattatattgcctccatgtcgcttgcatggcactacaaaatcatgaatgtgatgctgcagttgtagccggtgccaatcttgttcagtcggcggagcagcatattgctaccagtaagtcccatcctacaagtcaagaaagcattgcgaaagcaacattgcgcgtggaacatttgagaccacgcagcatagcaggcgatcgactaacttggagtctcgcagtgaaagctggcgttctttctgccacatcagcgtgtcacactttcgacacatctgccgacggatatggtcgagcagacggtgttggggcattatatgttaagagactgagtgacgctattgccgatggtgacactatcagaagcatcattagaggtagtgctattaacgctaatggacggacgtcgggtattagtctgccgagcgcggacggtcaagagctagtcattcaaaaagcaatggctagagccggtttgacaccagatgacatcggatacatagaatgtcacggtacaggtactaaagtcggtgacgcgatcgaagtagaagctctttcgcgagtctttcaacggcaagggaaagcccctttgctgattggcgcggtgaagagtaatgtcggccactctgaagcggccagcggtatctcaagcatcataaagtctactatggctcttgagcggtgccagataccgcctacatacggattgaggaatatcaacccgaagctcaacatagaacagtacaatattaaaatcccaaccgaactgacggcctggccaaactcgccgctgagacctagacgcgtcggtatcaactcgttcggctatggtggtgcgaatgctcatgtaattctggagcaagcttctgggcctcttggaggctccgtttcacgcggtagaaatgacaacgcacagtcttgtgttgtattgcccatatctgcggcatcctctacttctctcgaggctcgagtcgccgaccttgcgtcttttgacttcgaaagcagtactctttcagaagtagcatatactttgggcactcgaaggacgcatttcacatcaagaggttttatcatcgctcgccaatcagagtcgctaagttcagcattcagctctggcaccctcatcaccgctggggactcatgtaatccacacacgcttccgtacgcctttgtatttacagggcaaggctcacaatgggctggcatggggaaagagctcttctcggagttcagtgttttccgacaagccatctctgaaatggacgtggctctcagaagtttacctcatgcaccatcatggactttgcaggatgcaatcatgaccaccgatgctccggatcttatccacttaccagagcggtcgcaaccatgctgcacggcgattcaagtggctctcgtacagcttctcgccgtttggggcctgacgccgagcatcaccgtagggcattcctccggagagattgcagcggcttttgctgctggccatgtgtccgccgctgaggctatcgtcattgcatattaccgaggctattgggtgtctaagctgcaccaagatggtgccatgatggctgttggcctatcagagtcatctgcgaatgacgagatacgtaaagccgggcttaacaacaaccaactcagagtagcctgtgtcaattcacccgaaagcgcgaccatatccggagacagcagcgcaattgatgaacttctacaggttcttgtgcaaaagaaaatattcgcgaggaagttgaagaccggtaaccaggcgtatcactctcaccatatgcaactagcaggtgctgaatacgaggctcttctcaatgaagttctcccgtcattagatccctctgctcagctacctgaaggggctacattcatgtcatcggtaaatgctgctccgaagtcagatggctttattagcaattactggcgacaaaatctcgaaggccaagtacggttcagtcaagcaattgagcaaatccatcagaagggcgaatattgtttcatcgaactggggccgcattcttctcttgagctgcctgtcaaacagacccttggaaaacacggcgtctctggctcgcaagtgaagtacgcagcaccaatcaagcgaggctcaaatgctctcgacagtgcacttgccttcgctggtgcgctttggcttcaggggtgcgacatagactgggctctagtcaacgggttagtaacacggggcaaactttcaatgcggtctcatcctcgcgttgtgaaggatcttcccccttatcgttatacttacgataagcccctttggaacgaatgccgggcgagtatcgaatatcgccagcgcgagtggccacgtcacgaacttctgggttcattgataccgggaggcgatttgaagaatttcagctaccgcaatgtcctcagagcgaaggatgtcccttggcttcaagatcatcggcttggcgagactatcgtcttcccagggacaggctaccttgcaatggtgatggaagctgtctctcagattggagagcttgacacgacccattcgagccgcccatcattccgattctcaaatgtgaatatcaccaacgcgcttgcattgtccatggaaccttctgcgcagatcgaggtgttcactcacatcaaaaggtccgctctcaccaatacagctgactctaacatgtggtgggatttcagtatctcatcgctgtcaggaaaagagccagtaccacatgcgacaggtagtgttgccgttgactcggctaaagcagacctcatcgccgagtatcagactcctgatgacgtattagagcctacagctaagcgcatctggtatgacaagttcatctaccaagggctgaactatggaccagcttttcaaaccatcacccagttcgaaaccccacgcatgaagtcatcgtcggcctgtggtgcaaaggctcctttgctcacgacgtacggcgatccatatacaagataccccatacatccaataactctcgacgggatgatgcagttagcagtcgtggcggcggcgcatggttcaccgagagaccttcgagcagtggtgccgacaaggatagtttcggcgacaatcaacacttcgttgttaccatctgatgtcgaaggtcacctgagcgctcaggtaaagagcacaggtttcggtcccatcgaagccggcattgagctttccggtccgagtggtgaggttgtcgtccagtttgaccaggtcagattgacaccttaccaggctgctgcttggcaattagaggaggaagacaagcgccatcccattctccgagtcctatggaagcccgatccctacggtctggggtttatcggggctcaagctgcaggcaaattcatgcaaggtttcgtcgacgaggcacactctcctgttgatggatcattacttaagttcgggagtatgattgatctattagttcacaagaaccctcgtgcacgtgttctcgaaatcggaaacactataccagaattgacctatgccatcttggatctcctagcattcaagaccgacttcaagagattttccacgtacagcgtcgccaactttaacgaggaaggcgctcttctcggtggttcagttgaccttgaaacttgtcaacatccctcgaaggtgtcggctttgaacaagaaaagctttgatctagtgttgcttccctcctcagcctcttgggccagggaaaacgtatgccagatcaaagagctcatggccgatggtgctctcttagcagcgctctgctcagaagatttgagcgaggctactgagtttggcgatctgtcatgtgccaactacccccttggcgtagagccagcgcacattctcctcgcgcaaactaagccaaagactaacgggcatgtcggcggaaacacccgctacttgattgtcgagcataccagaaccaaactcggctcaggcctcgacgatgctctccgagagatcgagggatcttgcgtagttcgcactactctcgcacagctttcgccccagcacattcctcaaggcaccattgtgttcaatctgtgcgaagtagaagcgccactcttgagtaccatttcggatgatgacatgaaaggcgtcaagatcatgacggataatgcttcatcacttgtctgggtcactggtggaggtatcttgaacaagcccgatctggcactagtctccggtttggcgagagcggtaggcatggagcaaccgtcacttcgattctacacgtacgagatcgaggacactagaggcatgaatatcgatatgacagtgcgaaacctgatatccgtcctcagtcagcgaacatcaaaacaggatatggagtaccgacagagcaaggacgccgtgcttgtgagccgcttcgttcctgacgagggcatcaatgaggcattccgtaacaagcaaggtctcgagccgtcgatggcaacgattggtgagctcaccaacatgcgactgactatcgagcgaccaagtcaattcgacacgatttacttcaaggaacaagacatacagatgtccataccatcctcgcatatccgtatcaaggtggcatcggttggtatgaatgcgaaggatttctatgtgctggctggacgcgttgatacgccggacggaacgtgtcagctcgagtgtgccggtgtcgttgaacaagtcggatctgcagtgactgagttcgccatcggggatcgtgtggtcgctatggcgcctactcacttccagaagtaccaggccttgccagcctgggcttgccataagctcttggatacggagagtctcgacgagatggcgacgatcccacttgtctactcaacggccatctatgcgctacactatcgcgcacgcatccagtctggagagacagttttgattcattccggcgctggaggtgtcggcattgccgcaattcaattggcacttgcggcaggcgcaaaggtatacaccacagtttccactgatgagaagaaggaatacctggcaaagaaatttggactcaaacccgagaacatcttcagttcccgtgacactactttcctaggagatattctcgaggtaaccggaggccggggtgtcgatgttgtcctgaattctttgaccggagaccagctacatgccacttggcgatgtatcgctgacttcggtcgcttcgtcgaaatcggtaaagtagacctatcaaacgccggtcgtcttgaaatggatcagttcttgaagaatgcaacattcactgccttcgatcttggtggtctctacagctcggcagagcaccaattcatatggaagaagctgctttcagaggtcatgactctctatcgagaaggaaagatcacaacattcgagcccctgagagtttttgacgtgtctgaaatcactcaagccttccgacactttgcctcgcgaagcagaatgggaaagatcgccataaatctcgaaaaccctagctcgaagatcagggttcagagggccaagtataattctcgcttcgacaaagacaagagctatgtcatgattggctgtctcggcggcctgggacgaaccttgtcgcgttggatggtaagtcgtggtgctcggaagtttgcctttttaggccgctcgggtttgcagaaagttgctgcccgcaatctcgtccatgatctcgagtcaatgggcgccgagtgtactgtggtcaccggagacatctgcagcgccactgatacggctgcagttgtggatgcggcagcagcgatggctgacgaaattggcggtgttgttcaagccgcaatgggcctgaatgaggccatcttcgctaatatgccgagttcatattggcacaccggtatcgacccgaaggtacagggcacgtggaatctgttcaacgcgttgcagactagggataagtgctcaaaactggacttcttcctcttcacttcgtccgtttcgggcagcgtcggcaccgcgacagagtccaactactgtgccgccaactacttcatggatgcctttgcaaggtatttgcgtaatcaagacatacctggcatctcactgggtctcgggatgatatccgaggtcggttacttgcacgagaacccagagattgaggctctcctactgcgaaagggcatccagcccattgacgccgacgagctacttcagattgtcgatctttccctctcctctatcggcgctgagatgggcatccatcacccatacgaccagcttgccgcggctcatatgctgactggtctcgaggcagccggtctcaagcaacttcgaaaaagaggctttgaagggaatcacccagtcctagacgactcccgtgcaggtctgcttgccagtgcgctgggagctgatgagggcggcgcagaccatgcacgtgatggaagccttcccgctgaggtgatcaaagcgatggaagcgggagagtcgccctcagaggccatactcaatcatatcagaagacgattcgggaatctcgtgctaatgaagtttgagtctgtagacgtgaagaagccgctagcggcatacggtatggacagcatgatcggggcggagttcagaacatggctttatcaaagtctcagggccgatgtgccattgtccactttgctaggaaagacctgctccctctcaacgctgatggacatcgccctcgcgcaatcagagagcgcgaactga

SEQ ID NO: 28159 - protein, 2328 aa, Muscodor strobelii
  misc_feature: SGI Peptide ID NO. 569658
  misc_feature (505)..(840): Pfam Id: PF00698 Pfam Desc: Acyl transferase domain
  misc_feature (1622)..(1699): Pfam Id: PF08240 Pfam Desc: Alcohol dehydrogenase GroES-like domain
  misc_feature (1943)..(2114): Pfam Id: PF00106 Pfam Desc: short chain dehydrogenase
  misc_feature (1730)..(1880): Pfam Id: PF00107 Pfam Desc: Zinc-binding dehydrogenase
  misc_feature (1)..(229): Pfam Id: PF00109 Pfam Desc: Beta-ketoacyl synthase, N-terminal domain
  misc_feature (237)..(353): Pfam Id: PF02801 Pfam Desc: Beta-ketoacyl synthase, C-terminal domain
  misc_feature (1944)..(2127): Pfam Id: PF08659 Pfam Desc: KR domain
  misc_feature (567)..(840): Pfam Id: PF00698 Pfam Desc: Acyl transferase domain
  misc_feature (505)..(542): Pfam Id: PF00698 Pfam Desc: Acyl transferase domain
  misc_feature (1656)..(1699): Pfam Id: PF08240 Pfam Desc: Alcohol dehydrogenase GroES-like domain
  misc_feature (2)..(156): Pfam Id: PF00109 Pfam Desc: Beta-ketoacyl synthase, N-terminal domain
  misc_feature (192)..(229): Pfam Id: PF00109 Pfam Desc: Beta-ketoacyl synthase, N-terminal domain
  misc_feature (1)..(2319): NCBI GI: 85119238 Blast Desc: NCU02918 [Neurospora crassa OR74A] gi|28927411|gb|EAA36364.1| conserved [Neurospora crassa OR74A]
  misc_feature (3)..(2317): NCBI GI: 169774353 Blast Desc: [Aspergillus oryzae RIB40] gi|83769507|dbj|BAE59642.1| protein product [Aspergillus oryzae]
  misc_feature (3)..(2317): NCBI GI: 238497127 Blast Desc: polyketide synthase, [Aspergillus flavus NRRL3357] gi|220694679|gb|EED51023.1| polyketide synthase, [Aspergillus flavus NRRL3357]
  misc_feature (2)..(2326): NCBI GI: 242797798 Blast Desc: polyketide synthase, [Talaromyces stipitatus ATCC 10500] gi|218716381|gb|EED15802.1| polyketide synthase, [Talaromyces stipitatus ATCC 10500]
  misc_feature (3)..(2319): NCBI GI: 40806923 Blast Desc: polyketide synthase [Gibberella moniliformis]
  misc_feature (3)..(2323): NCBI GI: 145228493 Blast Desc: An01g01130 [Aspergillus niger] gi|134054644|emb|CAK43489.1| protein product [Aspergillus niger]
  misc_feature (1)..(2319): NCBI GI: 242773383 Blast Desc: polyketide synthase, [Talaromyces stipitatus ATCC 10500] gi|218721848|gb|EED21266.1| polyketide synthase, [Talaromyces stipitatus ATCC 10500]
  misc_feature (3)..(2319): NCBI GI: 145602522 Blast Desc: MGG_10912 [Magnaporthe grisea 70-15] gi|145010936|gb|EDJ95592.1| MGG_10912 [Magnaporthe grisea 70-15]
  misc_feature (3)..(2313): NCBI GI: 242823008 Blast Desc: polyketide synthase, [Talaromyces stipitatus ATCC 10500] gi|218712925|gb|EED12350.1| polyketide synthase, [Talaromyces stipitatus ATCC 10500]
  misc_feature (1)..(2319): NCBI GI: 255953389 Blast Desc: Pc21g03990 [Penicillium chrysogenum Wisconsin 54-1255] gi|211589158|emb|CAP95296.1| Pc21g03990 [Penicillium chrysogenum Wisconsin 54-1255]
  misc_feature (4)..(1193): SWISSPROT Homolog: EC 2.3.1.161 Lovastatin nonaketide synthase
  misc_feature: Useful for fungicidal and/or biocontrol applications
MKGGYFLQEDIRQFDNSFFGINNLEATYMDPQQRKLLEVVFECLENAGIPLDKASGSNTGCYVGNFTVDFQIMQLKESDYLHHYSGTGLGTTILANRISHVFNLLGPSLVLDTACSSSLYCLHVACMALQNHECDAAVVAGANLVQSAEQHIATSKSHPTSQESIAKATLRVEHLRPRSIAGDRLTWSLAVKAGVLSATSACHTFDTSADGYGRADGVGALYVKRLSDAIADGDTIRSIIRGSAINANGRTSGISLPSADGQELVIQKAMARAGLTPDDIGYIECHGTGTKVGDAIEVEALSRVFQRQGKAPLLIGAVKSNVGHSEAASGISSIIKSTMALERCQIPPTYGLRNINPKLNIEQYNIKIPTELTAWPNSPLRPRRVGINSFGYGGANAHVILEQASGPLGGSVSRGRNDNAQSCVVLPISAASSTSLEARVADLASFDFESSTLSEVAYTLGTRRTHFTSRGFIIARQSESLSSAFSSGTLITAGDSCNPHTLPYAFVFTGQGSQWAGMGKELFSEFSVFRQAISEMDVALRSLPHAPSWTLQDAIMTTDAPDLIHLPERSQPCCTAIQVALVQLLAVWGLTPSITVGHSSGEIAAAFAAGHVSAAEAIVIAYYRGYWVSKLHQDGAMMAVGLSESSANDEIRKAGLNNNQLRVACVNSPESATISGDSSAIDELLQVLVQKKIFARKLKTGNQAYHSHHMQLAGAEYEALLNEVLPSLDPSAQLPEGATFMSSVNAAPKSDGFISNYWRQNLEGQVRFSQAIEQIHQKGEYCFIELGPHSSLELPVKQTLGKHGVSGSQVKYAAPIKRGSNALDSALAFAGALWLQGCDIDWALVNGLVTRGKLSMRSHPRVVKDLPPYRYTYDKPLWNECRASIEYRQREWPRHELLGSLIPGGDLKNFSYRNVLRAKDVPWLQDHRLGETIVFPGTGYLAMVMEAVSQIGELDTTHSSRPSFRFSNVNITNALALSMEPSAQIEVFTHIKRSALTNTADSNMWWDFSISSLSGKEPVPHATGSVAVDSAKADLIAEYQTPDDVLEPTAKRIWYDKFIYQGLNYGPAFQTITQFETPRMKSSSACGAKAPLLTTYGDPYTRYPIHPITLDGMMQLAVVAAAHGSPRDLRAVVPTRIVSATINTSLLPSDVEGHLSAQVKSTGFGPIEAGIELSGPSGEVVVQFDQVRLTPYQAAAWQLEEEDKRHPILRVLWKPDPYGLGFIGAQAAGKFMQGFVDEAHSPVDGSLLKFGSMIDLLVHKNPRARVLEIGNTIPELTYAILDLLAFKTDFKRFSTYSVANFNEEGALLGGSVDLETCQHPSKVSALNKKSFDLVLLPSSASWARENVCQIKELMADGALLAALCSEDLSEATEFGDLSCANYPLGVEPAHILLAQTKPKTNGHVGGNTRYLIVEHTRTKLGSGLDDALREIEGSCVVRTTLAQLSPQHIPQGTIVFNLCEVEAPLLSTISDDDMKGVKIMTDNASSLVWVTGGGILNKPDLALVSGLARAVGMEQPSLRFYTYEIEDTRGMNIDMTVRNLISVLSQRTSKQDMEYRQSKDAVLVSRFVPDEGINEAFRNKQGLEPSMATIGELTNMRLTIERPSQFDTIYFKEQDIQMSIPSSHIRIKVASVGMNAKDFYVLAGRVDTPDGTCQLECAGVVEQVGSAVTEFAIGDRVVAMAPTHFQKYQALPAWACHKLLDTESLDEMATIPLVYSTAIYALHYRARIQSGETVLIHSGAGGVGIAAIQLALAAGAKVYTTVSTDEKKEYLAKKFGLKPENIFSSRDTTFLGDILEVTGGRGVDVVLNSLTGDQLHATWRCIADFGRFVEIGKVDLSNAGRLEMDQFLKNATFTAFDLGGLYSSAEHQFIWKKLLSEVMTLYREGKITTFEPLRVFDVSEITQAFRHFASRSRMGKIAINLENPSSKIRVQRAKYNSRFDKDKSYVMIGCLGGLGRTLSRWMVSRGARKFAFLGRSGLQKVAARNLVHDLESMGAECTVVTGDICSATDTAAVVDAAAAMADEIGGVVQAAMGLNEAIFANMPSSYWHTGIDPKVQGTWNLFNALQTRDKCSKLDFFLFTSSVSGSVGTATESNYCAANYFMDAFARYLRNQDIPGISLGLGMISEVGYLHENPEIEALLLRKGIQPIDADELLQIVDLSLSSIGAEMGIHHPYDQLAAAHMLTGLEAAGLKQLRKRGFEGNHPVLDDSRAGLLASALGADEGGADHARDGSLPAEVIKAMEAGESPSEAILNHIRRRFGNLVLMKFESVDVKKPLAAYGMDSMIGAEFRTWLYQSLRADVPLSTLLGKTCSLSTLMDIALAQSESAN

SEQ ID NO: 28160 - DNA, 1065 bp, Muscodor strobelii
  misc_feature: SGI cDNA ID NO. 569659
  misc_feature: Encodes the peptide sequence at SEQ ID NO 28161
atggggtttggcacttcagagcatgatgtattatatgccggcgacaagaaaattcactatcatgccgcaggtccatcactcggtccgctgatattgttcattcacggctgggttggcacaggaatcacatggaaggcccagatcgatgtcttcgcagcacttggctttcgcgtcatcgccccggatatgcccggctacggtcaatctacatcgaggcgcgtagttgatgattactgtcaggaggcaatagtagaagggatgatggcgctactgagtgcccaaggccgagacgccgccatttgggtcggtcatgattggggtgccggcgtggtctcctcggttgccacccagcatccagagagcgtgaaagctctcgtcaccgtctgcgtaccgtatcggagcatcgaattgggttgggacggatttttgccgctcgtcaatcgcattttgtaccccgcagaggaatatgaattcggccaatgggactacatgaagaagtacgaggaagatttcgaagaaagcgtcaaatggttcgagggcgatatcgctggtttctgcaaggccggtacgcagcagccacagccgcctcaaagtcgtctggcgcagatgtttccgactgtgcgcaagtacggctggctcggtggcatacctaagcccccgcctgtagaggctaccgggccgtcattgctgcctccagatgtctttgcttccttcgttggtgacatgcaaaagacgggcgtttggggcccatgtgcctattacttacatcataaacgcaatgcggagtacaatggccgaaagccgggtacgctgacgcagcccgccttgttcattcacgctgcgtgggatctcgtgtgcgatactaagacgtcgcggctggctgagccgatgagacgagcttgtagcaatctgacagaagtaacaatggagaccgatcatctgcctcagtatcaaaaaccggctgagtttaacgctgctctatgtcgatttatcttggaggaagtgccaagcgagtggcctggcttttgggacatgggatgcgtgaaaagaaagaggtcttcatag

SEQ ID NO: 28161 - protein, 354 aa, Muscodor strobelii
  misc_feature: SGI Peptide ID NO. 569659
  misc_feature (56)..(329): Pfam Id: PF00561 Pfam Desc: alpha/beta hydrolase fold
  misc_feature (56)..(128): Pfam Id: PF00561 Pfam Desc: alpha/beta hydrolase fold
  misc_feature (6)..(351): NCBI GI: 238484711 Blast Desc: epoxide hydrolase, [Aspergillus flavus NRRL3357] gi|220701644|gb|EED57982.1| epoxide hydrolase, [Aspergillus flavus NRRL3357]
  misc_feature (9)..(340): NCBI GI: 115374157 Blast Desc: epoxide hydrolase [Stigmatella aurantiaca DW4/3-1] gi|115368824|gb|EAU67772.1| epoxide hydrolase [Stigmatella aurantiaca DW4/3-1]
  misc_feature (3)..(336): NCBI GI: 226974019 Blast Desc: epoxide hydrolase [uncultured organism]
  misc_feature (20)..(340): NCBI GI: 227978884 Blast Desc: hydrolase or acyltransferase of alpha/beta superfamily [Tsukamurella paurometabola DSM 20162] gi|227966242|gb|EEK01551.1| hydrolase or acyltransferase of DSM
  misc_feature (7)..(350): NCBI GI: 39976501 Blast Desc: MGG_05826 [Magnaporthe grisea 70-15] gi|145011932|gb|EDJ96588.1| MGG_05826 [Magnaporthe grisea 70-15]
  misc_feature (9)..(331): NCBI GI: 189202956 Blast Desc: epoxide hydrolase 2 [Pyrenophora tritici-repentis Pt-1C-BFP] gi|187984913|gb|EDU50401.1| epoxide hydrolase 2 [Pyrenophora tritici-repentis Pt-1C-BFP]
  misc_feature (8)..(331): NCBI GI: 169623504 Blast Desc: SNOG_14994 [Phaeosphaeria nodorum SN15] gi|111056417|gb|EAT77537.1| SNOG_14994 [Phaeosphaeria nodorum SN15]
  misc_feature (16)..(313): NCBI GI: 170736402 Blast Desc: alpha/beta hydrolase fold [Burkholderia cenocepacia MC0-3] gi|169818590|gb|ACA93172.1| alpha/beta hydrolase fold [Burkholderia cenocepacia MC0-3]
  misc_feature (17)..(333): NCBI GI: 55742049 Blast Desc: epoxide hydrolase 2, cytoplasmic [Xenopus (Silurana) tropicalis] gi|49522999|gb|AAH75370.1| epoxide hydrolase 2, cytoplasmic [Xenopus (Silurana) tropicalis]
  misc_feature (17)..(327): NCBI GI: 196012445 Blast Desc: expressed [Trichoplax adhaerens] gi|190581408|gb|EDV21485.1| expressed [Trichoplax adhaerens]
  misc_feature (10)..(331): SWISSPROT Homolog: EC 3.3.2.10 Soluble epoxide hydrolase
MGFGTSEHDVLYAGDKKIHYHAAGPSLGPLILFIHGWVGTGITWKAQIDVFAALGFRVIAPDMPGYGQSTSRRVVDDYCQEAIVEGMMALLSAQGRDAAIWVGHDWGAGVVSSVATQHPESVKALVTVCVPYRSIELGWDGFLPLVNRILYPAEEYEFGQWDYMKKYEEDFEESVKWFEGDIAGFCKAGTQQPQPPQSRLAQMFPTVRKYGWLGGIPKPPPVEATGPSLLPPDVFASFVGDMQKTGVWGPCAYYLHHKRNAEYNGRKPGTLTQPALFIHAAWDLVCDTKTSRLAEPMRRACSNLTEVTMETDHLPQYQKPAEFNAALCRFILEEVPSEWPGFWDMGCVKRKRSS

SEQ ID NO: 28162 - DNA, 1584 bp, Muscodor strobelii
  misc_feature: SGI EST ID NO. CUFF.66356.0
  misc_feature: Variant of the nucleotide sequence at SEQ ID NO 28160
gctaggtaaatcaccctgtaatatcagtggtgcaatacgttcgaccgctgttgcaacaaattgatatgaaatattattgacccaggcaaaacaccgaaacgccgtctctaccctgcttttttgtccctagcattgagaatggggtttggcacttcagagcatgatgtattatatgccggcgacaagaaaattcactatcatgccgcaggtccatcactcggtccgctgatattgttcattcacggctgggttggcacaggaatcacatggaaggcccagatcgatgtcttcgcagcacttggctttcgcgtcatcgccccggatatgcccggctacggtcaatctacatcgaggcgcgtagttgatgattactgtcaggaggcaatagtagaagggatgatggcgctactgagtgcccaaggccgagacgccgccatttgggtcggtcatgattggggtgccggcgtggtctcctcggttgccacccagcatccagagagcgtgaaagctctcgtcaccgtctgcgtaccgtatcggagcatcgaattgggttgggacggatttttgccgctcgtcaatcgcattttgtaccccgcagaggaatatgaattcggccaatgggactacatgaagaagtacgaggaagatttcgaagaaagcgtcaaatggttcgagggcgatatcgctggtttctgcaaggccggtacgcagcagccacagccgcctcaaagtcgtctggcgcagatgtttccgactgtgcgcaagtacggctggctcggtggcatacctaagcccccgcctgtagaggctaccgggccgtcattgctgcctccagatgtctttgcttccttcgttggtgacatgcaaaagacgggcgtttggggcccatgtgcctattacttacatcataaacgcaatgcggagtacaatggccgaaagccgggtacgctgacgcagcccgccttgttcattcacgctgcgtgggatctcgtgtgcgatactaagacgtcgcggctggctgagccgatgagacgagcttgtagcaatctgacagaagtaacaatggagaccgatcatctgcctcagtatcaaaaaccggctgagtttaacgctgctctatgtcgatttatcttggaggaagtgccaagcgagtggcctggcttttgggacatgggatgcgtgaaaagaaagaggtcttcatagattatgatagtcgtgatgacaatgaatcgagcgagtaggcattgttttccggtctcccacatacatcttgggtcgtgactgcgaagataacttgagcgcacggctagaaccgtcatcgatgtgcctgtgattataatcgaaatggcacgcttctcgggctttcgtacgtaacacttctcattcgactagaacaaagaactgtagatctcagagaaaaggaacatgcgtgtggtgtgttgggtccaggtctggcacgatggggctgcaattgacagttaggggatgatgatattatgcgaagcatcaaccgcgcgtggaaggtgaaatttggtcgttactcgttgatgtacgacggaaaacatatgctcatctatgttttag

SEQ ID NO: 28163 - DNA, 1251 bp, Muscodor strobelii
  misc_feature: SGI cDNA ID NO. 569660
  misc_feature: Encodes the peptide sequence at SEQ ID NO 28164
atgcgaaccacaaaggcgacgcgagacagcaagatagtcaaagatctcgctttagattggacgccggagcagagagatgcgtaccttaaaacagaagttaagactgtatatctcaagagacttgacgtgccctatccgatcgacaactattatacggcagggacagaagtcgcgaaagatcagtgggaggcgtactggcacggcaaacatctaaaggacctaagatatcatggaggtctcagacgtgacatcgttaacttagacaagactaagcttcaatacattataccgcaaaacgagagtgtcatattccgagacgcagacacgaagcaactggttctcgtcatcctccgtaacgccgttccaagcgagcctctacggaagacaatggtcgacgtctgtaaagaggtactacggaaccgaaggaacgatcgtcgagaagacccagggcagctcgttcacttcggatatacatctggtagcagatgcgatcgccaaattcagatggcagctccatcgaataaacttaatacagccgcgaagattcggaatgaggccaagcttaatatcaaggcgcaaggaatggcgggtattgtatggaacctcatgaagagcaagctacctcctgaagttattgacgattttaacgatacaattgattattgggactttccccgtatggatatgggtcgggacgacgagactttcacatttcacgtagatggcagaggcgtcacatttgaaggcttagagctcccttctcctaatggcctttcttcaataaactacgcaagacatactcacatggaaacaaacgggaatgattgggtggtagcttattctgcgaatgcccctgagaacccaaataaggggggtaatttctatgttgcatcttacgggattatgctagaaccagcgagcaacacaatacaagcttggcacccgacggactatcatggaacgacgttatatgaaatgatggaaggtccagagcaccgagcaggctacgaagttcgaaccgacggcgcgttcaatacaggcatggtctttcaaatatcaaaagcatttgccgctgcaagggacaattcgatatggctagacaaccgatgcaagcttgaaggcaaaaggaaacccgtgcgcatacgttcaaagacaaaaccggagcgacgttatgaattacggacaggggcagcaagacccaaagcctgttgtgatgagatgttgaaggaactttgtaaatgtgtggcttga

SEQ ID NO: 28164 - protein, 416 aa, Muscodor strobelii
  misc_feature: SGI Peptide ID NO. 569660
  misc_feature (212)..(323): NCBI GI: 238602339 Blast Desc: MPER_04261 [Moniliophthora perniciosa FA553] gi|215466758|gb|EEB96583.1| MPER_04261 [Moniliophthora perniciosa FA553]
  misc_feature (94)..(322): NCBI GI: 170101795 Blast Desc: [Laccaria bicolor S238N-H82] gi|164642929|gb|EDR07183.1| [Laccaria bicolor S238N-H82]
  misc_feature (41)..(266): NCBI GI: 170085069 Blast Desc: LACBIDRAFT_320433 [Laccaria bicolor S238N-H82] gi|164651310|gb|EDR15550.1| LACBIDRAFT_320433 [Laccaria bicolor S238N-H82]
  misc_feature (255)..(326): NCBI GI: 170100963 Blast Desc: [Laccaria bicolor S238N-H82] gi|164643658|gb|EDR07910.1| [Laccaria bicolor S238N-H82]
MRTTKATRDSKIVKDLALDWTPEQRDAYLKTEVKTVYLKRLDVPYPIDNYYTAGTEVAKDQWEAYWHGKHLKDLRYHGGLRRDIVNLDKTKLQYIIPQNESVIFRDADTKQLVLVILRNAVPSEPLRKTMVDVCKEVLRNRRNDRREDPGQLVHFGYTSGSRCDRQIQMAAPSNKLNTAAKIRNEAKLNIKAQGMAGIVWNLMKSKLPPEVIDDFNDTIDYWDFPRMDMGRDDETFTFHVDGRGVTFEGLELPSPNGLSSINYARHTHMETNGNDWVVAYSANAPENPNKGGNFYVASYGIMLEPASNTIQAWHPTDYHGTTLYEMMEGPEHRAGYEVRTDGAFNTGMVFQISKAFAAARDNSIWLDNRCKLEGKRKPVRIRSKTKPERRYELRTGAARPKACCDEMLKELCKCVA

SEQ ID NO: 28165 - DNA, 840 bp, Muscodor strobelii
  misc_feature: SGI cDNA ID NO. 569661
  misc_feature: Encodes the peptide sequence at SEQ ID NO 28166
atgatgccttcagcagacgctttgtttcctcagttctcgaatttgcctcccgagttacgaaacaaaatctggcaccatgcgcttcgcgaagatgtggaactagctgtgtatccttatgaggatggatgctgggttccacgatatctatcgcaatctgatgcaggatatgatcctatgaaccctgctgtcaatctagctttcgaatttcggtccgatctgcttgatgaagcaaagatagaagtgccaatggcatttgcaaacaccgaagcccatggtatcgctgtcacgtgggctttagagcatggtctccatgttcgtgggtgtgatgacgggcacaggctcatctttctacgcgccttcgatccagaccgtgacgcgttatatgtcacgcctagcaaatggaatgacatgctccaagagcctgtcgaccgattatttgcacctgacctggtgggcagggagatagatcaccgacccactctgaaacgtatcgctatgcctgaatctctgattcgcacgagagcttctgaactactggagctcttcaacgattactatcatctcaggactctatacatagtcgttgatgcgccaccggattctagttcatcaccgaaggataacccgtcatcccaccgacgccttttggaatgtggaaatccgtccaaagtggcatcatggaccttcgattacgaatgggaatttgatttcacggaggtcagctacggtgatgagttccgtacgcttgtggcaaaagcatgccggggattacgcgatggtctgatcatgatgagtgtcaggcacttcgagatctattctgtctccgttgtcagaggttga

SEQ ID NO: 28166 - protein, 279 aa, Muscodor strobelii
  misc_feature: SGI Peptide ID NO. 569661
  misc_feature (5)..(278): NCBI GI: 238498090 Blast Desc: conserved [Aspergillus flavus NRRL3357] gi|220693554|gb|EED49899.1| conserved [Aspergillus flavus NRRL3357]
  misc_feature (9)..(278): NCBI GI: 169777823 Blast Desc: [Aspergillus oryzae RIB40] gi|83772114|dbj|BAE62244.1| protein product [Aspergillus oryzae]
  misc_feature (9)..(278): NCBI GI: 238495052 Blast Desc: conserved [Aspergillus flavus NRRL3357] gi|220695412|gb|EED51755.1| conserved [Aspergillus flavus NRRL3357]
  misc_feature (5)..(213): NCBI GI: 67541601 Blast Desc: AN6964.2 [Aspergillus nidulans FGSC A4] gi|40738416|gb|EAA57606.1| [Aspergillus nidulans FGSC A4] gi|259480581|tpe|CBF71844.1| TPA: conserved [Aspergillus nidulans
  misc_feature (7)..(279): NCBI GI: 156060213 Blast Desc: SS1G_02245 [Sclerotinia sclerotiorum 1980] gi|154699653|gb|EDN99391.1| SS1G_02245 [Sclerotinia sclerotiorum 1980]
  misc_feature (7)..(198): NCBI GI: 154315569 Blast Desc: BC1G_04357 [Botryotinia fuckeliana B05.10] gi|150847297|gb|EDN22490.1| BC1G_04357 [Botryotinia fuckeliana B05.10]
  misc_feature (4)..(199): NCBI GI: 145228591 Blast Desc: An01g01650 [Aspergillus niger] gi|134054695|emb|CAK43536.1| protein product [Aspergillus niger]
  misc_feature (1)..(200): NCBI GI: 256732328 Blast Desc: NECHADRAFT_80806 [Nectria haematococca mpVI 77-13-4]
  misc_feature (7)..(200): NCBI GI: 145246722 Blast Desc: An12g05420 [Aspergillus niger] gi|134080331|emb|CAK46253.1| protein product [Aspergillus niger]
  misc_feature (4)..(213): NCBI GI: 154320091 Blast Desc: [Botryotinia fuckeliana B05.10] gi|150854765|gb|EDN29957.1| [Botryotinia fuckeliana B05.10]
MMPSADALFPQFSNLPPELRNKIWHHALREDVELAVYPYEDGCWVPRYLSQSDAGYDPMNPAVNLAFEFRSDLLDEAKIEVPMAFANTEAHGIAVTWALEHGLHVRGCDDGHRLIFLRAFDPDRDALYVTPSKWNDMLQEPVDRLFAPDLVGREIDHRPTLKRIAMPESLIRTRASELLELFNDYYHLRTLYIVVDAPPDSSSSPKDNPSSHRRLLECGNPSKVASWTFDYEWEFDFTEVSYGDEFRTLVAKACRGLRDGLIMMSVRHFEIYSVSVVRG

SEQ ID NO: 28167 - DNA, 1279 bp, Muscodor strobelii
  misc_feature: SGI EST ID NO. CUFF.66401.0
  misc_feature: Variant of the nucleotide sequence at SEQ ID NO 28165
gagctggtgggcgccttgttgcagtgaccgctcgggatatcgcatgtgaattgccattgcagcgccagctagtgacttggctgctgcaacacgactcatagtctcgttcagttcacttgtatcgcgagtgaaccatagtaccgagatcggtacctaagccactggctggcccccaatttcgtcttcgtacgatgcatcattgtgagcaaaagactgcttggccctagccctacatgatgccttcagcagacgctttgtttcctcagttctcgaatttgcctcccgagttacgaaacaaaatctggcaccatgcgcttcgcgaagatgtggaactagctgtgtatccttatgaggatggatgctgggttccacgatatctatcgcaatctgatgcaggatatgatcctatgaaccctgctgtcaatctagctttcgaatttcggtccgatctgcttgatgaagcaaagatagaagtgccaatggcatttgcaaacaccgaagcccatggtatcgctgtcacgtgggctttagagcatggtctccatgttcgtgggtgtgatgacgggcacaggctcatctttctacgcgccttcgatccagaccgtgacgcgttatatgtcacgcctagcaaatggaatgacatgctccaagagcctgtcgaccgattatttgcacctgacctggtgggcagggagatagatcaccgacccactctgaaacgtatcgctatgcctgaatctctgattcgcacgagagcttctgaactactggagctcttcaacgattactatcatctcaggactctatacatagtcgttgatgcgccaccggattctagttcatcaccgaaggataacccgtcatcccaccgacgccttttggaatgtggaaatccgtccaaagtggcatcatggaccttcgattacgaatgggaatttgatttcacggaggtcagctacggtgatgagttccgtacgcttgtggcaaaagcatgccggggattacgcgatggtctgatcatgatgagtgtcaggcacttcgagatctattctgtctccgttgtcagaggttgaaggggaccgaggtagtgtaggccaaattatcgatcagaaattgaaacttcatgagtggtcagagtgaactcagccaccataaagcggtgaagtgggcgcctcgatcagcagagatcctaaatgaatggcccagaacgcgttgataagaagtggacgtgatgggccacaccgcgtgaaggtgtgagtttgccgcctcaagtcgctga

SEQ ID NO: 28168 - DNA, 1305 bp, Muscodor strobelii
  misc_feature: SGI cDNA ID NO. 569662
  misc_feature: Encodes the peptide sequence at SEQ ID NO 28169
atggctattcgaatcattatcgcggcccttgtagcctctcaacttgtcgctggtggcgccatcaggaagcccttagcagcctatgatcggaagaatctatgtgtatatggagagtgtgaaacaacaacgacaacaccaagttgtccttatggaactaccaccacttccacctcgttcacttacccgactacttccacaacttctaccggcacagagaccaccaccaccaccggtacagaaacaacaactactactggtactgaaacgacaactaccaccggtactgagaccaccaccaccaccggcactgagacgactactaccaccggtaccgagaccaccaccaccaccggtactgagaccaccaccaccaccggtactgaaacgacaactactaccggtacagaaacaacaactactactggtaccgaaacaactactaccaccggcacagaaacaacaactactactggtaccgagacgacaaccacgcctttgacaacttcttcaagcaccacaacatacacaaccacttcgactactaccacttcagcggcagttacttgccaaccatctgggtacctcgtctcaggccaacagcttttcagcatcaatgttctggacggcacagaaactctgatcaacccagcggtggtgaacaccggatcactcaacgctttgggtttcgataccatcgacaacaagctttacgtagccaacgaccaaggcaacaaggtctgtgtactctattccatcgacagcaacggcgacgccgcgttcctcacaaaccttcctacaacccgaggtggaaattgctacaacgttggagatgtcgatggggacggtttctattatgcttatagcagttttgatggtggctttattcaagtcaacgcagatcccaactcgccggagtatctcaccttggcgacaggtcaaagcctcgctcctttcccgcctggtgactgggcctccgtctccaacactggcaattacctatgggcattaggtgcatcgggcgtgcccgcgactgagacagttctagagcgtttcgataaagctcatcaaacgtggacgagtgtgtttagcttcggcagcattggctccaatctcttcccggctgtttatgctggaccaggtgcgacgctatacggtcaagatggtgatactggtgatatttaccagttcgcacttcttggtccggactacacgtttacgaatgtgagtggatcgatgctaccccccgctggagatggggatggtgcactttgcgcttcagctgctctatgtcagggtccactctaa

SEQ ID NO: 28169 - protein, 434 aa, Muscodor strobelii
  misc_feature: SGI Peptide ID NO. 569662
MAIRIIIAALVASQLVAGGAIRKPLAAYDRKNLCVYGECETTTTTPSCPYGTTTTSTSFTYPTTSTTSTGTETTTTTGTETTTTTGTETTTTTGTETTTTTGTETTTTTGTETTTTTGTETTTTTGTETTTTTGTETTTTTGTETTTTTGTETTTTTGTETTTTPLTTSSSTTTYTTTSTTTTSAAVTCQPSGYLVSGQQLFSINVLDGTETLINPAVVNTGSLNALGFDTIDNKLYVANDQGNKVCVLYSIDSNGDAAFLTNLPTTRGGNCYNVGDVDGDGFYYAYSSFDGGFIQVNADPNSPEYLTLATGQSLAPFPPGDWASVSNTGNYLWALGASGVPATETVLERFDKAHQTWTSVFSFGSIGSNLFPAVYAGPGATLYGQDGDTGDIYQFALLGPDYTFTNVSGSMLPPAGDGDGALCASAALCQGPL

SEQ ID NO: 28170 - DNA, 368 bp, Muscodor strobelii
  misc_feature: SGI EST ID NO. CUFF.66407.0
  misc_feature: Variant of the nucleotide sequence at SEQ ID NO 28168
tggctttattcaagtcaacgcagatcccaactcgccggagtatctcaccttggcgacaggtcaaagcctcgctcctttcccgcctggtgactgggcctccgtctccaacactggcaattacctatgggcattaggtgcatcgggcgtgcccgcgactgagacagttctagagcgtttcgataaagctcatcaaacgtggacgagtgtgtttagcttcggcagcattggctccaatctcttcccggctgtttatgctggaccaggtgcgacgctatacggtcaagatggtgatactggtgatatttaccagttcgcacttcttggtccggactacacgtttacgaatgtgagtggatcgatgctacccc

SEQ ID NO: 28171 - DNA, 447 bp, Muscodor strobelii
  misc_feature: SGI cDNA ID NO. 569663
  misc_feature: Encodes the peptide sequence at SEQ ID NO 28172
atgcgcgcctccttgattctactatcagccccgctcggagcattggcacagctacgagcgtccttcacagaatacggatctggcgattcgaatggctctggaaactgtacaaataacaatgcctgtggatttgccggcggtggttacacggcagctctcagtcagtcgcagttcggcgccggacctgggcaaggagccggtcctgcgtgcggcacgtgttatcagataaccgtcaataccgacctcaacggcaccccagtaacacagaagacgatcacggtcaaggtcgacaatctgtgcccgattgacggcaaccctatctgcaacgtccccaacagctacggtgcggatattcacttcgatctttgcatcgactccggtgcagcaggcgctttctttacatcgagtggtgcgggtctcggtagtgcggtgcaggtctcgtgttag

SEQ ID NO: 28172 - protein, 148 aa, Muscodor strobelii
  misc_feature: SGI Peptide ID NO. 569663
  misc_feature (50)..(101): Pfam Id: PF03330 Pfam Desc: Rare lipoprotein A (RlpA)-like double-psi beta-barrel
  misc_feature (20)..(148): NCBI GI: 281333601 Blast Desc: endoglucanase [Fomitopsis palustris] gi|281371550|dbj|BAI58029.1| endoglucanase [Fomitopsis palustris]
  misc_feature (19)..(148): NCBI GI: 195547039 Blast Desc: endoglucanase V-like protein [Phanerochaete chrysosporium]
  misc_feature (1)..(122): NCBI GI: 1170136 Blast Desc: GUN5_TRIRE RecName: Full=Endoglucanase-5; AltName: Full=Endoglucanase V; AltName: Full=Endo-1,4-beta-glucanase V; Short=EG V; AltName: Full=Cellulase V; Flags: Precursor V (EGV)
  misc_feature (1)..(122): NCBI GI: 33521684 Blast Desc: endoglucanase V [Trichoderma viride]
  misc_feature (50)..(140): NCBI GI: 242223651 Blast Desc: [Postia placenta Mad-698-R] gi|220723017|gb|EED77380.1| [Postia placenta Mad-698-R]
  misc_feature (50)..(128): NCBI GI: 169847958 Blast Desc: CC1G_03224 [Coprinopsis cinerea okayama7#130] gi|116508161|gb|EAU91056.1| CC1G_03224 [Coprinopsis cinerea okayama7#130]
  misc_feature (1)..(130): NCBI GI: 212541612 Blast Desc: endoglucanase-5 precursor, [Penicillium marneffei ATCC 18224] gi|210068260|gb|EEA22352.1| endoglucanase-5 precursor, [Penicillium marneffei ATCC 18224]
  misc_feature (43)..(122): NCBI GI: 194143489 Blast Desc: glycoside hydrolase 45 protein [Penicillium decumbens]
  misc_feature (43)..(130): NCBI GI: 159123395 Blast Desc: endoglucanase, [Aspergillus fumigatus A1163]
  misc_feature (43)..(130): NCBI GI: 70986694 Blast Desc: endoglucanase [Aspergillus fumigatus Af293] gi|66846467|gb|EAL86799.1| endoglucanase, [Aspergillus fumigatus Af293]
  misc_feature (1)..(122): SWISSPROT Homolog: EC 3.2.1.4 Cellulase
MRASLILLSAPLGALAQLRASFTEYGSGDSNGSGNCTNNNACGFAGGGYTAALSQSQFGAGPGQGAGPACGTCYQITVNTDLNGTPVTQKTITVKVDNLCPIDGNPICNVPNSYGADIHFDLCIDSGAAGAFFTSSGAGLGSAVQVSC

SEQ ID NO: 28173 - DNA, 624 bp, Muscodor strobelii
  misc_feature: SGI cDNA ID NO. 569664
  misc_feature: Elevated expression when VOC is produced
  misc_feature: Encodes the peptide sequence at SEQ ID NO 28174
atgtcgggtccccgcgtcacagctcccgttgctaaacagcttagccgctccatctcaactaccgttcaaccatctaccctcatcacaagctccaaggccgctgtgcctttgtcgaggaaatatgcagacctcctcaaggagcgcaacttagatcatgatcaacctcgccatctctacactcgatcagcaaacctccctcatccccagccgcgcaagatgcgcttgatgcagacattctcatcaagtgccgctcccagcgcagaggcgaaaacaattgatacgattgtctttcccggttctgcttctcttgatggtgcttcggccgaccccttcacacagctccgcgtgcccttacttcccgatagcttcatgatttcgcacaaacctgagacggccgatgcgcctcttgctacacctgagatcaccatcgtcgccgccgacccagacattgtgtcgccagctgcactgacagagatcgagggcatgggtgtcgacggtgtagagttaaagttcattcatgaggccgaatcatctgagcctgaacagggcatgttgacgaatatgtggaagggccttgtcgaagatgtgcttggtggccagaataaaggcaagcttgctctttaa

SEQ ID NO: 28174 - protein, 207 aa, Muscodor strobelii
  misc_feature: SGI Peptide ID NO. 569664
  misc_feature (68)..(203): NCBI GI: 116197807 Blast Desc: CHGG_07059 [Chaetomium globosum CBS 148.51] gi|88178338|gb|EAQ85806.1| CHGG_07059 [Chaetomium globosum CBS 148.51]
  misc_feature (8)..(201): NCBI GI: 171693753 Blast Desc: protein product [Podospora anserina] gi|170946825|emb|CAP73629.1| protein product [Podospora anserina]
  misc_feature (48)..(192): NCBI GI: 39973813 Blast Desc: [Magnaporthe grisea 70-15] gi|145018100|gb|EDK02379.1| [Magnaporthe grisea 70-15]
  misc_feature (5)..(198): NCBI GI: 256732219 Blast Desc: NECHADRAFT_100631 [Nectria haematococca mpVI 77-13-4]
  misc_feature (5)..(203): NCBI GI: 164426413 Blast Desc: NCU04287 [Neurospora crassa OR74A] gi|16944599|emb|CAC18616.2| [Neurospora crassa] gi|157071327|gb|EAA31841.2| [Neurospora crassa OR74A]
  misc_feature (5)..(198): NCBI GI: 154300958 Blast Desc: [Botryotinia fuckeliana B05.10] gi|150856365|gb|EDN31557.1| [Botryotinia fuckeliana B05.10]
  misc_feature (4)..(197): NCBI GI: 46137531 Blast Desc: FG10281.1 [Gibberella zeae PH-1]
  misc_feature (5)..(207): NCBI GI: 156043113 Blast Desc: [Sclerotinia sclerotiorum 1980] gi|154694947|gb|EDN94685.1| [Sclerotinia sclerotiorum 1980]
  misc_feature: Useful for introducing or modulating the production of volatile compounds
MSGPRVTAPVAKQLSRSISTTVQPSTLITSSKAAVPLSRKYADLLKERNLDHDQPRHLYTRSANLPHPQPRKMRLMQTFSSSAAPSAEAKTIDTIVFPGSASLDGASADPFTQLRVPLLPDSFMISHKPETADAPLATPEITIVAADPDIVSPAALTEIEGMGVDGVELKFIHEAESSEPEQGMLTNMWKGLVEDVLGGQNKGKLAL

SEQ ID NO: 28175 - DNA, 1547 bp, Muscodor strobelii
  misc_feature: SGI EST ID NO. CUFF.66474.0
  misc_feature: Variant of the nucleotide sequence at SEQ ID NO 28173
cccattcacgtattcgggtttcgagaacaagcagttcgagatacaccgcttaatgacatttttcgagagctactatacctggtcaagtcttctcaaattgcactgcatgctgtcgcacgtctccccccgagccccgagtcccgactataaagcgtcgaacggtcagaccgtcgtgtcgacgccacggacgcaacggaccgaactctaccatactatctataatccccaatcactataattcgcacacccctttgagaccctcgactcagcacagcacagcacagcatagcttcccctcatatagacctgcattgagaccatctcagcccatcttccggacttccgatttactcctttaataccactacctattctggccacgatacttttccatctactctacttgtccactctgtttctatcaatcgcccgtcacaacttggtttcgagctcctcgtatattgtaatttcgcatagtacaaaattacaccaatcttgcatcatgtcgggtccccgcgtcacagctcccgttgctaaacagcttagccgctccatctcaactaccgttcaaccatctaccctcatcacaagctccaaggccgctgtgcctttgtcgaggaaatatgcagacctcctcaaggagcgcaacttagatcatgatcaacctcgccatctctacactcgatcagcaaacctccctcatccccagccgcgcaagatgcgcttgatgcagacattctcatcaagtgccgctcccagcgcagaggcgaaaacaattgatacgattgtctttcccggttctgcttctcttgatggtgcttcggccgaccccttcacacagctccgcgtgcccttacttcccgatagcttcatgatttcgcacaaacctgagacggccgatgcgcctcttgctacacctgagatcaccatcgtcgccgccgacccagacattgtgtcgccagctgcactgacagagatcgagggcatgggtgtcgacggtgtagagttaaagttcattcatgaggccgaatcatctgagcctgaacagggcatgttgacgaatatgtggaagggccttgtcgaagatgtgcttggtggccagaataaaggcaagcttgctctttaacagttggcacgatatgaagaaatgatttgtctcacttgtaccgggcttcaggacctagggtattcggagaccgatctatcctgttagaacgagcgctgttttgtaaccgctccactaccttatgatgttgtaattcacggctagtgcccgctaatgatgatgcgaaagcatcgcggacgaactgtcacccgtagccaggagctactatcaaatattatccaacaggtctcttttgggtactgataattagtctcatttgggaattgtatcatttggtatttctgcttgatctgaaaagcaattgaaagtcatacaactttatgcccgtatgttggtttttcgtatggatgtgatcgctttcgatacacataagatcatggcttgtgtgtgttcatattgatcaccaacgaacctagcaaac

SEQ ID NO: 28176 - DNA, 1746 bp, Muscodor strobelii
  misc_feature: SGI cDNA ID NO. 569665
  misc_feature: Encodes the peptide sequence at SEQ ID NO 28177
atggccttcatatcaactctcacgctcttaacatccgccttgggcagttttcccctctcacaagctgtgcctcatcgccctcatcctccttcaaatgctcccatcgttccaactgtgagcgtctccaatggcactgtcttaggatcaagcagcgctggagtcgacaccttctgggggattccctatgctcagcccccagttggtgatcttcgcttccgtgcaccagtcgctctcgatgccagtttcggtaccctcaatgcgacaactccaccgccggcctgcccccagctccccagcgattatgaccccatgtcttacacttttgtggaatcgtcagtaatcaatcaatatatcgcttttagtcatccagatgcggacatgagcgaggactgtctcacactcaacgttcaacgaccttcatcgacgacctccaagtcgaggctccccgtcgtcgtttggatttatggaggagggttcaaccaaggctcgaataaggaaagtccgtgggaacagttcgttacagactcagtgggcatcggtcaccctgtgctcgtcgtagcaattaactaccgcctcgctgcctttggtttccttggcggtgcccaaattcaagctgagggacataccaatgtcggtctccgcgaccagcgactcgcgctacaatgggttgccgacaatatccaggcgttcggcggtgatcccgacaacgtcacgatctggggcgaatctgccggtgcatggtcggtgctgtatcaaatgcttatcgagggtggcgataacacctacaaaagcaagccgctcttccatggcgggataatgaactcaggcgctggtctcccggcgactcctattgacggtgcggaggcccaaagctcatttgacgcgattgctgaggccgcaggttgctcgaccgaggtagttggtgagggccacgagctggattgcttacgaaagatgccatgggacgcgttcaataatgtgaccgacgtagcccccagtctattcacgtacaccggagtcgtaatcgcctttcccccacgcccagactccagcgactcatttttccctgtctcccctgaagccgccatccgccagggcaagatcgcccgcgtacctattatcactggaaaccaagctgatgaaggcgcacttttcgccatcactctatacaacggaacgaccacagataaatttgtcaatggaaaccttcactacacatatccgagtgcgccgatctcagtgttaacggacttcgtgaatacatattcgaccgatccagcgaagggtgcaccctacggtactggcgaaaacgatgtgctgtaccccaattccaagcgtaatgcagccgtcattggcgatttgctcttcgagttccagcgccgccactttctcgagcacactgctgacttgattcccgcctggtcgttctcggcagtttataatcgcactaccaatgtcctgggaaccgcacacggcactgacctggctctgttcggaaaccagaagcccgagattgcgtacaggcacatctctcagtggtacctcagcttcatcaactatcaggatccgaacaagattgacgggcgatacgggcagggaagccgtttgacgcactggcctagatacacgactcaaggcaaggccatgatccagttcgatgtgaagaacgagtcgattattcgtgacgactatagacagcattcgtacgaatacttcaagaatgccatctcgtcgatcaagatctaa

SEQ ID NO: 28177 - protein, 581 aa, Muscodor strobelii
  misc_feature: SGI Peptide ID NO. 569665
  misc_feature (3)..(572): Pfam Id: PF00135 Pfam Desc: Carboxylesterase
  misc_feature (3)..(398): Pfam Id: PF00135 Pfam Desc: Carboxylesterase
  misc_feature (9)..(581): NCBI GI: 84993514 Blast Desc: sterol esterase precursor [Melanocarpus albomyces]
  misc_feature (14)..(581): NCBI GI: 238507487 Blast Desc: extracellular lipase, [Aspergillus flavus NRRL3357] gi|220689658|gb|EED46009.1| extracellular lipase, [Aspergillus flavus NRRL3357]
  misc_feature (10)..(581): NCBI GI: 189208005 Blast Desc: lipase 3 precursor [Pyrenophora tritici-repentis Pt-1C-BFP] gi|187976429|gb|EDU43055.1| lipase 3 precursor [Pyrenophora tritici-repentis Pt-1C-BFP]
  misc_feature (36)..(581): NCBI GI: 169786469 Blast Desc: [Aspergillus oryzae RIB40] gi|83776443|dbj|BAE66562.1| protein product [Aspergillus oryzae]
  misc_feature (37)..(581): NCBI GI: 156065733 Blast Desc: SS1G_00877 [Sclerotinia sclerotiorum 1980] gi|154691736|gb|EDN91474.1| SS1G_00877 [Sclerotinia sclerotiorum 1980]
  misc_feature (19)..(581): NCBI GI: 154304855 Blast Desc: BC1G_09013 [Botryotinia fuckeliana B05.10] gi|150853875|gb|EDN29067.1| BC1G_09013 [Botryotinia fuckeliana B05.10]
  misc_feature (38)..(571): NCBI GI: 46109442 Blast Desc: FG01603.1 [Gibberella zeae PH-1]
  misc_feature (39)..(581): NCBI GI: 62529874 Blast Desc: sterol esterase [Ophiostoma piceae]
  misc_feature (29)..(568): NCBI GI: 238845021 Blast Desc: cholinesterase [Microsporum canis CBS 113480]
  misc_feature (37)..(579): NCBI GI: 116205752 Blast Desc: CHGG_02169 [Chaetomium globosum CBS 148.51] gi|88182766|gb|EAQ90234.1| CHGG_02169 [Chaetomium globosum CBS 148.51]
  misc_feature (37)..(570): SWISSPROT Homolog: EC 3.1.1.3 Triacylglycerol lipase
MAFISTLTLLTSALGSFPLSQAVPHRPHPPSNAPIVPTVSVSNGTVLGSSSAGVDTFWGIPYAQPPVGDLRFRAPVALDASFGTLNATTPPPACPQLPSDYDPMSYTFVESSVINQYIAFSHPDADMSEDCLTLNVQRPSSTTSKSRLPVVVWIYGGGFNQGSNKESPWEQFVTDSVGIGHPVLVVAINYRLAAFGFLGGAQIQAEGHTNVGLRDQRLALQWVADNIQAFGGDPDNVTIWGESAGAWSVLYQMLIEGGDNTYKSKPLFHGGIMNSGAGLPATPIDGAEAQSSFDAIAEAAGCSTEVVGEGHELDCLRKMPWDAFNNVTDVAPSLFTYTGVVIAFPPRPDSSDSFFPVSPEAAIRQGKIARVPIITGNQADEGALFAITLYNGTTTDKFVNGNLHYTYPSAPISVLTDFVNTYSTDPAKGAPYGTGENDVLYPNSKRNAAVIGDLLFEFQRRHFLEHTADLIPAWSFSAVYNRTTNVLGTAHGTDLALFGNQKPEIAYRHISQWYLSFINYQDPNKIDGRYGQGSRLTHWPRYTTQGKAMIQFDVKNESIIRDDYRQHSYEYFKNAISSIKI

SEQ ID NO: 28178 - DNA, 2631 bp, Muscodor strobelii
  misc_feature: SGI EST ID NO. CUFF.66444.0
  misc_feature: Variant of the nucleotide sequence at SEQ ID NO 28176
ggcgttccaaggacgacgtatctcgagcggaatcatgtggattattgagaaactcgcgccttcttgctggatggatcgcgcggattctcggctaaggactttgcaccccttgcccgaaatctcctaagccatatttagataacaatcagcctggagacgatgcagcttacaaaccgcaagattgcttggctttcgacgctattgtcaagtctgccaatcaatgcggtcgctcgatgaagtgcatcgtcttcaacgatgcgaaagagagattaccatgaaaaagcttggcaacccgacgccgaagtaacggaggattggcattaccaagcctcgcgccgcaaactatgaagcgagctagaggcaaagttcacagtggccgagtgtgtcgaagctcactcacgatgccagtatatagatctggcgatgatgctgcatcgagggtggtttgttcgatttcggtatcttgcatctgttccatgaataccgcctacgaatcaaccaaaataactcaaccacactgcaacagacggccatggccttcatatcaactctcacgctcttaacatccgccttgggcagttttcccctctcacaagctgtgcctcatcgccctcatcctccttcaaatgctcccatcgttccaactgtgagcgtctccaatggcactgtcttaggatcaagcagcgctggagtcgacaccttctgggggattccctatgctcagcccccagttggtgatcttcgcttccgtgcaccagtcgctctcgatgccagtttcggtaccctcaatgcgacaactccaccgccggcctgcccccagctccccagcgattatgaccccatgtcttacacttttgtggaatcgtcagtaatcaatcaatatatcgcttttagtcatccagatgcggacatgagcgaggactgtctcacactcaacgttcaacgaccttcatcgacgacctccaagtcgaggctccccgtcgtcgtttggatttatggaggagggttcaaccaaggctcgaataaggaaagtccgtgggaacagttcgttacagactcagtgggcatcggtcaccctgtgctcgtcgtagcaattaactaccgcctcgctgcctttggtttccttggcggtgcccaaattcaagctgagggacataccaatgtcggtctccgcgaccagcgactcgcgctacaatgggttgccgacaatatccaggcgttcggcggtgatcccgacaacgtcacgatctggggcgaatctgccggtgcatggtcggtgctgtatcaaatgcttatcgagggtggcgataacacctacaaaagcaagccgctcttccatggcgggataatgaactcaggcgctggtctcccggcgactcctattgacggtgcggaggcccaaagctcatttgacgcgattgctgaggccgcaggttgctcgaccgaggtagttggtgagggccacgagctggattgcttacgaaagatgccatgggacgcgttcaataatgtgaccgacgtagcccccagtctattcacgtacaccggagtcgtaatcgcctttcccccacgcccagactccagcgactcatttttccctgtctcccctgaagccgccatccgccagggcaagatcgcccgcgtacctattatcactggaaaccaagctgatgaaggcgcacttttcgccatcactctatacaacggaacgaccacagataaatttgtcaatggaaaccttcactacacatatccgagtgcgccgatctcagtgttaacggacttcgtgaatacatattcgaccgatccagcgaagggtgcaccctacggtactggcgaaaacgatgtgctgtaccccaattccaagcgtaatgcagccgtcattggcgatttgctcttcgagttccagcgccgccactttctcgagcacactgctgacttgattcccgcctggtcgttctcggcagtttataatcgcactaccaatgtcctgggaaccgcacacggcactgacctggctctgttcggaaaccagaagcccgagattgcgtacaggcacatctctcagtggtacctcagcttcatcaactatcaggatccgaacaagattgacgggcgatacgggcagggaagccgtttgacgcactggcctagatacacgactcaaggcaaggccatgatccagttcgatgtgaagaacgagtcgattattcgtgacgactatagacagcattcgtacgaatacttcaagaatgccatctcgtcgatcaagatctaaaattaggcttggttcaacctacttaccggcctggtgttaacgcacaaactggttgattgggatgaaaggtgtttactccccatggcagaacttggatccgccaaaaattacttcttgtatatcttgagccttattttatttgttttagagttcttaatgacagcgttgttagctagaagccgatcgaagaatcgcgaattaggagacggtgcatcacgttgacatgcatcataatagtccctaccagcctttctcctcttacagagatgggagaggactgatcttaggagctcttgaaagtgctgtcgacgctcaagcagatataacaatagtgatatgactttctgatcggc

SEQ ID NO: 28179 - DNA, 810 bp, Muscodor strobelii
  misc_feature: SGI cDNA ID NO. 569666
  misc_feature: Encodes the peptide sequence at SEQ ID NO 28180
atgtcgtgtgaattatctctgagaaccaaattactcaatattcgggacttcagcgatttgacgctggtctgtcatggacagaagttcaaagttcacaaagctgttctttgcgcacagtcgccagtattcacggtagctgtcaaggggagattcatggaagcaagcactagcatgattgatgtagctttcgacatcgacaccttgaagcgcatgcttgaatatctgtacagcggcaattatgatctcgaaatcgatccagctctagacttactcgcatgcgggtggccggaccgagataagacatccgaaatgcgcactacaggaatggaagttgttcacattcaggatggcctcgaagtgtttgcactagaccatattgttgatgatcctgagttgatgcaccctgtccatcaacgcttacacgagcactgcctggtcaattccatagccgattactatgaaatcgagattcttgcagaacttacaagcgataagatcagagggatcctggagtcttattggtccactgacgcgttcaaccaattacttcactactcggaaggctttaccgagctggagaagtacaatatttacgacgaatgtggagttgcggaagaactagcaacgtatatgttgcccacattagtagaaaagttgaaaacggcagaagacaagacatccggtctgctgcactttcgttgtgttcaatgtggtgcagagttcaagttccggatcataacttatcgtcagctccttcccgccaagcactgtatcttgtgtggaacaagtcaagagctgctactagtatag

SEQ ID NO: 28180 - protein, 269 aa, Muscodor strobelii
  misc_feature: SGI Peptide ID NO. 569666
  misc_feature (11)..(109): Pfam Id: PF00651 Pfam Desc: BTB/POZ domain
  misc_feature (11)..(94): Pfam Id: PF00651 Pfam Desc: BTB/POZ domain
  misc_feature (17)..(184): NCBI GI: 46138041 Blast Desc: FG10535.1 [Gibberella zeae PH-1]
  misc_feature (17)..(179): NCBI GI: 225561324 Blast Desc: [Ajellomyces capsulatus G186AR]
  misc_feature (17)..(179): NCBI GI: 240274426 Blast Desc: conserved [Ajellomyces capsulatus H143]
  misc_feature (17)..(179): NCBI GI: 154282377 Blast Desc: [Ajellomyces capsulatus NAm1] gi|150410164|gb|EDN05552.1| [Ajellomyces capsulatus NAm1]
  misc_feature (9)..(186): NCBI GI: 242790325 Blast Desc: conserved [Talaromyces stipitatus ATCC 10500] gi|218718124|gb|EED17544.1| conserved [Talaromyces stipitatus ATCC 10500]
  misc_feature (10)..(190): NCBI GI: 258573109 Blast Desc: [Uncinocarpus reesii 1704] gi|237901002|gb|EEP75403.1| [Uncinocarpus reesii 1704]
  misc_feature (20)..(171): NCBI GI: 212538299 Blast Desc: conserved [Penicillium marneffei ATCC 18224] gi|210069047|gb|EEA23138.1| conserved [Penicillium marneffei ATCC 18224]
  misc_feature (17)..(179): NCBI GI: 212534502 Blast Desc: PMAA_079220 [Penicillium marneffei ATCC 18224] gi|210069806|gb|EEA23896.1| PMAA_079220 [Penicillium marneffei ATCC 18224]
  misc_feature (5)..(237): NCBI GI: 242825734 Blast Desc: conserved [Talaromyces stipitatus ATCC 10500] gi|218712317|gb|EED11743.1| conserved [Talaromyces stipitatus ATCC 10500]
  misc_feature (4)..(85): NCBI GI: 46116056 Blast Desc: FG03870.1 [Gibberella zeae PH-1]
MSCELSLRTKLLNIRDFSDLTLVCHGQKFKVHKAVLCAQSPVFTVAVKGRFMEASTSMIDVAFDIDTLKRMLEYLYSGNYDLEIDPALDLLACGWPDRDKTSEMRTTGMEVVHIQDGLEVFALDHIVDDPELMHPVHQRLHEHCLVNSIADYYEIEILAELTSDKIRGILESYWSTDAFNQLLHYSEGFTELEKYNIYDECGVAEELATYMLPTLVEKLKTAEDKTSGLLHFRCVQCGAEFKFRIITYRQLLPAKHCILCGTSQELLLV

SEQ ID NO: 28181 - DNA, 1509 bp, Muscodor strobelii
  misc_feature: SGI cDNA ID NO. 569667
  misc_feature: Encodes the peptide sequence at SEQ ID NO 28182
atgacgcatagtcgttgtgccaggatggccatgctatctcttgcctttttagcgtcttgggttgcagccgacactatctctatcaatgccccctttcagcctccggcggccgtctcgagcccggtcgatagctcttttcttgggatcatggttgagactacatcttggccttggtacgctgtccgaagtagttctgcaactttgattgggaacatcctcaatagaactggggagatcatcatccgcgttggtggaacctctggcgaccacgtttttctgaatgctagtcaagcggaatctgttattcgagacgatccatcagaccatagtttgatggcgaatgttacactggggcgtgagtggcttaacggttttggacagttacctcccggtgttcgatacgttgtgcaggtgcctctcgcaagaaggccgatgaagaaggcgatacaattcgcgaccgacgcagcgccatacatcaccaatctagaggccatgcagattggcaacgaaccgaatcttttcgactcgcagaaaaacatacaagcgccgaagccctataatcaaacaagttacgctagtgattttcttgcgtacactgccgctattcatgcaaaattgcctaacgttcggttccaagctggtggccttgctgatcaatcccagtggtcagcagagtcagtttataccgccggcttacagaaaagtgatatgattaagacatttgctatgcattattaccaaagtcaactcagcgcattgccgacgctccgaggcaagtaccttaatcacactgcagtacgcgagcgtctcgcaaggcttcaagacgatattgctgcggttcggcagagaaacaacacgccattcgtgctagaagaggtaggcagctctttgagtcctatacatagcgcatacgaagccgatattgatcagtcgctggggtcatctctatgggctgtcgatctgatgcttcttgcgcaggtttggaatgtgtcgcgtgtgaacatgaatcagtgcaatggatgcaactttgcaggctggtgggccgggaatccgacggacggaggcgcgtcggtgcatgcgcaatactattctcttctattcgttgccgactggcttaaaagtgggatgcgagtggcatcgttattcgactcttctcggccgaaggtgtccccgtatgttggatacatgaacggcgtactggaccgctatgcggtacttgacctaaatgaatccaatgcgacggatagtcgggttgaacgcacatttgagcttggggtcccagcagatgtcaaaactgctgagctccgtaggctcacgggcggtggaatcagccgcgattcaacgtacttgggtgcagcaaacatgacgtatgccggaatgcggtactctgcggacgatcctgctggattcaatgcaggccaggggccgaccacgataagtgcgacgaatggtaaattgacgtttcagctcagcgcttcggaagcggttctggtcctactgcatcggtag

SEQ ID NO: 28182 - protein, 502 aa, Muscodor strobelii
  misc_feature: SGI Peptide ID NO. 569667
  misc_feature (25)..(500): NCBI GI: 238507952 Blast Desc: conserved [Aspergillus flavus NRRL3357] gi|220688696|gb|EED45048.1| conserved [Aspergillus flavus NRRL3357]
  misc_feature (33)..(500): NCBI GI: 116208738 Blast Desc: CHGG_03662 [Chaetomium globosum CBS 148.51] gi|88184259|gb|EAQ91727.1| CHGG_03662 [Chaetomium globosum CBS 148.51]
  misc_feature (81)..(442): NCBI GI: 169610051 Blast Desc: SNOG_08119 [Phaeosphaeria nodorum SN15] gi|160701970|gb|EAT84395.2| SNOG_08119 [Phaeosphaeria nodorum SN15]
  misc_feature (26)..(498): NCBI GI: 145248900 Blast Desc: An14g01620 [Aspergillus niger] gi|134081462|emb|CAK46475.1| protein product [Aspergillus niger]
  misc_feature (35)..(498): NCBI GI: 169778435 Blast Desc: [Aspergillus oryzae RIB40] gi|83772420|dbj|BAE62550.1| protein product [Aspergillus oryzae]
  misc_feature (34)..(428): NCBI GI: 261358686 Blast Desc: beta-glucuronidase [Verticillium albo-atrum VaMs.102]
  misc_feature (35)..(420): NCBI GI: 145233889 Blast Desc: An02g11890 [Aspergillus niger] gi|134057255|emb|CAK96418.1| protein product [Aspergillus niger]
  misc_feature (285)..(500): NCBI GI: 169784824 Blast Desc: [Aspergillus oryzae RIB40] gi|83775620|dbj|BAE65740.1| protein product [Aspergillus oryzae]
  misc_feature (9)..(416): NCBI GI: 85114813 Blast Desc: NCU00937 [Neurospora crassa OR74A] gi|28926556|gb|EAA35527.1| [Neurospora crassa OR74A] gi|156071386|dbj|BAF75800.1| beta-glucuronidase [Neurospora
  misc_feature (12)..(343): NCBI GI: 170099433 Blast Desc: glycoside hydrolase family 79 protein [Laccaria bicolor S238N-H82] gi|164644460|gb|EDR08710.1| glycoside hydrolase family 79 protein [Laccaria bicolor S238N-H82]
MTHSRCARMAMLSLAFLASWVAADTISINAPFQPPAAVSSPVDSSFLGIMVETTSWPWYAVRSSSATLIGNILNRTGEIIIRVGGTSGDHVFLNASQAESVIRDDPSDHSLMANVTLGREWLNGFGQLPPGVRYVVQVPLARRPMKKAIQFATDAAPYITNLEAMQIGNEPNLFDSQKNIQAPKPYNQTSYASDFLAYTAAIHAKLPNVRFQAGGLADQSQWSAESVYTAGLQKSDMIKTFAMHYYQSQLSALPTLRGKYLNHTAVRERLARLQDDIAAVRQRNNTPFVLEEVGSSLSPIHSAYEADIDQSLGSSLWAVDLMLLAQVWNVSRVNMNQCNGCNFAGWWAGNPTDGGASVHAQYYSLLFVADWLKSGMRVASLFDSSRPKVSPYVGYMNGVLDRYAVLDLNESNATDSRVERTFELGVPADVKTAELRRLTGGGISRDSTYLGAANMTYAGMRYSADDPAGFNAGQGPTTISATNGKLTFQLSASEAVLVLLHR

SEQ ID NO: 28183 - DNA, 169 bp, Muscodor strobelii
  misc_feature: SGI EST ID NO. CUFF.66453.0
  misc_feature: Variant of the nucleotide sequence at SEQ ID NO 28181
tgaatcagtgcaatggatgcaactttgcaggctggtgggccgggaatccgacggacggaggcgcgtcggtgcatgcgcaatactattctcttctattcgttgccgactggcttaaaagtgggatgcgagtggcatcgttattcgactcttctcggccgaaggtgtcccc

SEQ ID NO: 28184 - DNA, 312 bp, Muscodor strobelii
  misc_feature: SGI cDNA ID NO. 569668
  misc_feature: Encodes the peptide sequence at SEQ ID NO 28185
atggagtcgacccaggagatcactttagatcgcatcgtcgtcgtcggtgcccaacctcaaaagagtaacgacgaccggtcatcccaagcccggaccacagaatccatccaggaacatgctcacgaccttcatgacgagcaagaatataccatcagagagtcaatcgagggaggtccatcagagcactgtgatgaacatcacggcgagaagtctcaaacacccgtcatggattctaaagaggtcggccttcaggcaactcgagacttgccttcgcggaatgccgaaaccatcgaagcaaatgccagtcagtag

SEQ ID NO: 28185 - protein, 103 aa, Muscodor strobelii
  misc_feature: SGI Peptide ID NO. 569668
MESTQEITLDRIVVVGAQPQKSNDDRSSQARTTESIQEHAHDLHDEQEYTIRESIEGGPSEHCDEHHGEKSQTPVMDSKEVGLQATRDLPSRNAETIEANASQ

SEQ ID NO: 28186 - DNA, 2853 bp, Muscodor strobelii
  misc_feature: SGI cDNA ID NO. 569669
  misc_feature: Encodes the peptide sequence at SEQ ID NO 28187
atgtcatgtaccccgaagtacccctcctggcgcgtaccctggaggcaggccggtgccagtctacagcgcaagcagctagcgccccggctcgtcgctgtcgctcgctggccttcgctgtccctgggtggtgcctctctgctcccgtggcctgcgaaccgtggcgggcgctgtcgagagacccccccagtcgctagggtcgctgatgctgcccgctgtcgccggtacctctggcgaccaacagaggacaggtacctggcagctaccgcccacatcgagttgatcaagctcgtccttcctctcctcctcttcctcttctatctcctgcctcctcctcaccaccgtcccggagacagcctcttcgacttgtctcctcctctcgtctctcttcttccttcccactctctctttccccttcaccctcttctcccctcgcgccctcgttcgccgcccgtcccatctccgtgcactgccgccgacctccccaattcgccgggttgcaggtcgccgaggtttagagccacaagagttaagagactcgactcgcccaaaccggcagagcaaccgaaagtgctggcatccgtgacccgctcactcgagctgcctgcccgcgtcgtccaagccgtcaagctggatctcccaccgatctcgtatccgcaaacccggggaacgtccgacataccgccctactacggtgccctgcctgcccagcgcccgccgtatgtgagcgagaaactgccctcgctcccctttcctcagccgcccctggcgtactccccgagcacctcgtctccccgggttagctcgatagcctcctcggccagctccaacggcgactcccagtcgtccttcacctcggcaccctcgtccaacgggcccaagacgccctcgcccaacctgcccgtctcgactgcgccgcctaccagcgtcggtggattcgaccagtatcccgccatgaatccccagcccgacatgtactaccaaccacagcacatgtctgcaggtccggctcccacgccgcagaccgtcacctccagctcgctgccccagtacggccaccagcccaccctcctgcagccgggaccagcccagtactcggcgcctccgtacccgtatccctacggcaatgggctcgcttcgccccagtccgccccgcccgctgtgtcggcgtccatgggggctgctacggttctgcctctgcccggcgtgcccaaccagcccggcatgcagaaccagtaccagggcttcgacaccacgggacagatagcaccaccgggcatgaaaccccgcgtgacggccaccctgtgggaagacgaaggcagtctgtgcttccaggtcgaggccaggggcatctgcgttgcgcgtcgtgaagacaaccacatgatcaacggcacaaagctgctcaacgttgccggcatgacgcgcggaaggcgcgatggcattctcaagagcgagaagatcagacacgtcgtcaagatcggcccgatgcacctcaagggtgtctggataccctttgaacgagctctggactttgcaaacaaggagaagatcaccgagctattgtaccccttgtttgtgcataacatcggggctttgctgtatcacccgacaaaccagaacaggaccaaccaggtcatggccgccgccgagcgtaggaaacaggaagtgagccagatgcgcaacggcccaggcccgggaccgtcacctccaagtggtgtgttgccttcgatacagcagcatcagcaccatcaccacatgagtcttcccggcccgccccagccatctttgccctcacataacagcgctgcccggccatcgctggaccgagcccacacgttcccaacgccaccgactagtgcgtcgggcgtcatgggcggcatgggttctgccgataacttccagtggagccaacaaggcatgaacggcagccaaggccctaatcccatgtccattgacaccaacttgagtaatgctgctgcccgatcgatgccagcaacaccagccaccacgccgcctggcaactcaatccagagcatgcagccgtaccctcaagtaagccagccgtacgacaatgcccgtggcatgtacaacagcgccagtcaacagtcaccttaccccccttccaacagtagcccccaggaccggattccgtatggccaggccggaacctacaatatgaagagtgaaatgggccctccatccgggcggccagtcgttcccggatcgactgacccagcagatgtcaagccgcctaatggacttatgcagcacggtgatgcggtgccgcatgccgccggcgaagacgaagccgaccacgaggccgagtatacccatgacagcggagcttacgacgcgaaccgcaatgcgtacaactacaaccagcctcccgtcgcgcccatggcaggcgaccatcatttgtcctcggatatgtctggctctccaggccaccaagctaattctgggcgagccactccaagaacagcggccccccaacagccctattacgcacagcctacgggatacaacacaccgccacgaggtcctcagccctcatcaaatctctataatgtaatgacgaatgatcggggccctaatggagcgccggcacatgatgtatacggctcccaaccggaaatgaaccaatccatgcaaaacgggtacgccggagcacccattctaaatggtgctccgcatttgaaacgaggacgcgatgacgaggaagatctatcacgatcttctagcggcggactggaactgaagcgtcggaaaaccctcgttgatgctcccatgccgacccctggctacagcaccttgaaccgaccaacatcggctgtgggcggtccgcggcagagataa

SEQ ID NO: 28187 - protein, 950 aa, Muscodor strobelii
  misc_feature: SGI Peptide ID NO. 569669
  misc_feature (451)..(531): Pfam Id: PF02292 Pfam Desc: APSES domain
  misc_feature (242)..(950): NCBI GI: 261351827 Blast Desc: cell pattern formation-associated protein stuA [Verticillium albo-atrum VaMs.102]
  misc_feature (242)..(935): NCBI GI: 146746041 Blast Desc: APSES transcription factor [Glomerella cingulata] gi|146746046|gb|ABQ43363.1| APES transcription factor [Glomerella cingulata] gi|157004267|gb|ABV00676.1| APSES transcription factor
  misc_feature (324)..(950): NCBI GI: 256732172 Blast Desc: NECHADRAFT_41703 [Nectria haematococca mpVI 77-13-4]
  misc_feature (323)..(950): NCBI GI: 171691817 Blast Desc: protein product [Podospora anserina] gi|170945857|emb|CAP72658.1| protein product [Podospora anserina]
  misc_feature (305)..(950): NCBI GI: 116179896 Blast Desc: CHGG_00576 [Chaetomium globosum CBS 148.51] gi|88184873|gb|EAQ92341.1| CHGG_00576 [Chaetomium globosum CBS 148.51]
  misc_feature (318)..(950): NCBI GI: 145611030 Blast Desc: MGG_00692 [Magnaporthe grisea 70-15] gi|67906141|dbj|BAE00061.1| pathogenicity related transcriptional factor [Magnaporthe grisea] gi|145018377|gb|EDK02656.1| MGG_00692
  misc_feature (323)..(944): NCBI GI: 156048899 Blast Desc: SS1G_08156 [Sclerotinia sclerotiorum 1980] gi|154692555|gb|EDN92293.1| SS1G_08156 [Sclerotinia sclerotiorum 1980]
  misc_feature (318)..(935): NCBI GI: 85099721 Blast Desc: NCU01414 [Neurospora crassa OR74A] gi|1517923|gb|AAB06995.1| ascospore maturation 1 protein [Neurospora crassa] gi|28922364|gb|EAA31601.1| NCU01414 crassa 1
  misc_feature (323)..(944): NCBI GI: 154295401 Blast Desc: BC1G_13179 [Botryotinia fuckeliana B05.10] gi|150844047|gb|EDN19240.1| BC1G_13179 [Botryotinia fuckeliana B05.10]
  misc_feature (318)..(844): NCBI GI: 28208639 Blast Desc: AF428248_1 ascospore maturation protein Ama-1 [Neurospora africana]
MSCTPKYPSWRVPWRQAGASLQRKQLAPRLVAVARWPSLSLGGASLLPWPANRGGRCRETPPVARVADAARCRRYLWRPTEDRYLAATAHIELIKLVLPLLLFLFYLLPPPHHRPGDSLFDLSPPLVSLLPSHSLFPLHPLLPSRPRSPPVPSPCTAADLPNSPGCRSPRFRATRVKRLDSPKPAEQPKVLASVTRSLELPARVVQAVKLDLPPISYPQTRGTSDIPPYYGALPAQRPPYVSEKLPSLPFPQPPLAYSPSTSSPRVSSIASSASSNGDSQSSFTSAPSSNGPKTPSPNLPVSTAPPTSVGGFDQYPAMNPQPDMYYQPQHMSAGPAPTPQTVTSSSLPQYGHQPTLLQPGPAQYSAPPYPYPYGNGLASPQSAPPAVSASMGAATVLPLPGVPNQPGMQNQYQGFDTTGQIAPPGMKPRVTATLWEDEGSLCFQVEARGICVARREDNHMINGTKLLNVAGMTRGRRDGILKSEKIRHVVKIGPMHLKGVWIPFERALDFANKEKITELLYPLFVHNIGALLYHPTNQNRTNQVMAAAERRKQEVSQMRNGPGPGPSPPSGVLPSIQQHQHHHHMSLPGPPQPSLPSHNSAARPSLDRAHTFPTPPTSASGVMGGMGSADNFQWSQQGMNGSQGPNPMSIDTNLSNAAARSMPATPATTPPGNSIQSMQPYPQVSQPYDNARGMYNSASQQSPYPPSNSSPQDRIPYGQAGTYNMKSEMGPPSGRPVVPGSTDPADVKPPNGLMQHGDAVPHAAGEDEADHEAEYTHDSGAYDANRNAYNYNQPPVAPMAGDHHLSSDMSGSPGHQANSGRATPRTAAPQQPYYAQPTGYNTPPRGPQPSSNLYNVMTNDRGPNGAPAHDVYGSQPEMNQSMQNGYAGAPILNGAPHLKRGRDDEEDLSRSSSGGLELKRRKTLVDAPMPTPGYSTLNRPTSAVGGPRQR

SEQ ID NO: 28188 - DNA, 4060 bp, Muscodor strobelii
  misc_feature: SGI EST ID NO. CUFF.67115.0
  misc_feature: Variant of the nucleotide sequence at SEQ ID NO 28186
cagaggacaggtacctggcagctaccgcccacatcgagttgatcaagctcgtccttcctctcctcctcttcctcttctatctcctgcctcctcctcaccaccgtcccggagacagcctcttcgacttgtctcctcctctcgtctctcttcttccttcccactctctctttccccttcaccctcttctcccctcgcgccctcgttcgccgcccgtcccatctccgtgcactgccgccgacctccccaattcgccgggttgcaggtcgccgaggtttagagccacaagagttaagagactcgactcgcccaaaccggcagagcaaccgaaagtgctggcatccgtgacccgctgtgtcctgtcttgtcccgccgtgtctgccgcgcaaaagttggctgtcgtcaaacgacgacgaccacgataacgaccctagtgccgctctcaaggaataattcgcccctcagcacgtttgtgtgtccttggtctttcgttcacgcccgtcacgacttcacgtctccggccctgatatcagccagaacaggctgttgagagaggaaatctatccagcgcccacctcttgtgtgtcagctcgaatttcgcctagacgagcactctgccactcacggtctcaatttcctaccgtattcacctcaattggaggctctttggacagcattcacgacctgttacgacttgatcacgagacatttgttcggccatcagttttgctctgcgttcgacgtccctccgagcctgtctgcgactaccaccacccaccgtcagaccaacgtcccggttttctacacactctcacgactattcacgtctccacgacagatactgcccctctgatcgacagatagttgtcatacgaggccaattgaccctctcagcagtgacaaaccggcctgttacaagcctgcaccacctgcggaatcagggttctcataccgctcaagtcgcccagacctgagcactcgagctgcctgcccgcgtcgtccaagccgtcaagctggatctcccaccgatctcgtatccgcaaacccggggaacgtccgacataccgccctactacggtgccctgcctgcccagcgcccgccgtatgtgagcgagaaactgccctcgctcccctttcctcagccgcccctggcgtactccccgagcacctcgtctccccgggttagctcgatagcctcctcggccagctccaacggcgactcccagtcgtccttcacctcggcaccctcgtccaacgggcccaagacgccctcgcccaacctgcccgtctcgactgcgccgcctaccagcgtcggtggattcgaccagtatcccgccatgaatccccagcccgacatgtactaccaaccacagcacatgtctgcaggtccggctcccacgccgcagaccgtcacctccagctcgctgccccagtacggccaccagcccaccctcctgcagccgggaccagcccagtactcggcgcctccgtacccgtatccctacggcaatgggctcgcttcgccccagtccgccccgcccgctgtgtcggcgtccatgggggctgctacggttctgcctctgcccggcgtgcccaaccagcccggcatgcagaaccagtaccagggcttcgacaccacgggacagatagcaccaccgggcatgaaaccccgcgtgacggccaccctgtgggaagacgaaggcagtctgtgcttccaggtcgaggccaggggcatctgcgttgcgcgtcgtgaagacaaccacatgatcaacggcacaaagctgctcaacgttgccggcatgacgcgcggaaggcgcgatggcattctcaagagcgagaagatcagacacgtcgtcaagatcggcccgatgcacctcaagggtgtctggtacgttggtgctgatcgggagccctcttgctgcgatgactaacgagccgtgccaggataccctttgaacgagctctggactttgcaaacaaggagaagatcaccgagctattgtaccccttgtttgtgcataacatcggggctttgctgtatcacccgacaaaccagaacaggaccaaccaggtcatggccgccgccgagcgtaggaaacaggaagtgagccagatgcgcaacggcccaggcccgggaccgtcacctccaagtggtgtgttgccttcgatacagcagcatcagcaccatcaccacatgagtcttcccggcccgccccagccatctttgccctcacataacagcgctgcccggccatcgctggaccgagcccacacgttcccaacgccaccgactagtgcgtcgggcgtcatgggcggcatgggttctgccgataacttccagtggagccaacaaggcatgaacggcagccaaggccctaatcccatgtccattgacaccaacttgagtaatgctgctgcccgatcgatgccagcaacaccagccaccacgccgcctggcaactcaatccagagcatgcagccgtaccctcaagtaagccagccgtacgacaatgcccgtggcatgtacaacagcgccagtcaacagtcaccttaccccccttccaacagtagcccccaggaccggattccgtatggccaggccggaacctacaatatgaagagtgaaatgggccctccatccgggcggccagtcgttcccggatcgactgacccagcagatgtcaagccgcctaatggacttatgcagcacggtgatgcggtgccgcatgccgccggcgaagacgaagccgaccacgaggccgagtatacccatgacagcggagcttacgacgcgaaccgcaatgcgtacaactacaaccagcctcccgtcgcgcccatggcaggcgaccatcatttgtcctcggatatgtctggctctccaggccaccaagctaattctgggcgagccactccaagaacagcggccccccaacagccctattacgcacagcctacgggatacaacacaccgccacgaggtcctcagccctcatcaaatctctataatgtaatgacgaatgatcggggccctaatggagcgccggcacatgatgtatacggctcccaaccggaaatgaaccaatccatgcaaaacgggtacgccggagcacccattctaaatggtgctccgcatttgaaacgaggacgcgatgacgaggaagatctatcacgatcttctagcggcggactggaactgaagcgtcggaaaaccctcgttgatgctcccatgccgacccctggctacagcaccttgaaccgaccaacatcggctgtgggcggtccgcggcagagataaagccgcacttcctctaattggtggctacgttgatgtccattcactggcgctacgattttgtcaagatccgataatgcattgcatccataaagcggcttccatttgccatacactccttcgattccttcactacacgtttttgtattcgcagccaacgactgatcatcggcatgtttccaccgaccgcgccagaagacacgatgacgaaaattacgacccgcttgcttcttgcttgttatttaaaatgccactcgagggccgtgtaaatgcttgacgaactgatgcgtcgcatggcggaacagtaattctttgagacgagataatacttggcgacgttgataacgccgagcgaaatgagacactcgaccaacggaataaaaaaagccccctatcacgacttcttaggcgggtaacgttcatgaccgaggcagcttttgtttcactttgttcatcacatccgccggcctgggcccacaaaagatggccgggccgtgtggtacagattactcacttttttttttattccctagcttatgaatgatgaaatgacctgaaatttttcttgttcttgttcgcaccaaaaaggggacggtcggtggccagtgggcgtgtgttggaaatgtgtcttcacatggtattattcatggtcatgaggattaaaaagcttcgacctgggcttcatacatcgtgaattagatactgagctacatacagttgaactcactcaatgagaaaaaagactactacttcaatcacacttgctggaag

SEQ ID NO: 28189 - DNA, 978 bp, Muscodor strobelii
  misc_feature: SGI cDNA ID NO. 569670
  misc_feature: Encodes the peptide sequence at SEQ ID NO 28190
atgccgtcgccatccaagcagcccattacgaaggccgcgcaacccaagttcggacagtccttcgacccatggaactcatcatcaactggccaccagcgtgcagagaatcgactcggcgctagcacaggatggcgagactcgcggaacaagaaactgacgagccaattctcgggcggcgctggtggtggcgaacgcgtatctgacagcgtgggcgctggttccgagaattgggacgctcataccaaagcagtaatcaccccagaggtccgatctcgagggcaaaagtctgtctacgacatgctgtcgaaaccgggctcgatgaaagaacagggcattatcacttcaaaaacatcctcgtcccgccagttaagcagtgcatgggatggagattccgttacttcgccgcctaagaacagttccgtcattaccaatgagcagtttgaggcgaatattgaaaatgagacgacatcaccatcaacacaaggtcgaaagatctttgaaggcgtcatcgtttatgtaaatgggagtacgtacccccacatctcagaccataagctcaagcacctgcttgcagaaaacggtggccagatgtcgagccacttggggcgaaggagagttacgcatgtcgtcctcggtcgtcacgccggtagcgcttccggtttaggctctggaggcggtctcgctgcgagtaaactgcagcgcgagattcaaaaagtcagtggtgctgctgtgaaatatgtcaccgtcgagtgggtcctggagagcctcaaggccggtaagaggttgcccgagggcagattttcagatctcaagatcgcctctgctaaacagaagagtgtttacgggttatattctaagaaggtgggggatattactaatgatgcagatgccaacggagcttccaaagcacggcattctaacattgccgatagtgatctgccacccccgagtgcgcagcgtttcgcacaagatgactga

SEQ ID NO: 28190 - protein, 325 aa, Muscodor strobelii
  misc_feature: SGI Peptide ID NO. 569670
  misc_feature (4)..(287): NCBI GI: 256731784 Blast Desc: NECHADRAFT_80512 [Nectria haematococca mpVI 77-13-4]
  misc_feature (8)..(289): NCBI GI: 46137223 Blast Desc: FG10127.1 [Gibberella zeae PH-1]
  misc_feature (1)..(286): NCBI GI: 156048887 Blast Desc: SS1G_08150 [Sclerotinia sclerotiorum 1980] gi|154692549|gb|EDN92287.1| SS1G_08150 [Sclerotinia sclerotiorum 1980]
  misc_feature (18)..(285): NCBI GI: 28949994 Blast Desc: [Neurospora crassa]
  misc_feature (18)..(285): NCBI GI: 164426258 Blast Desc: NCU10417 [Neurospora crassa OR74A] gi|157071263|gb|EDO65221.1| conserved [Neurospora crassa OR74A]
  misc_feature (1)..(250): NCBI GI: 154295383 Blast Desc: BC1G_13170 [Botryotinia fuckeliana B05.10] gi|150844038|gb|EDN19231.1| BC1G_13170 [Botryotinia fuckeliana B05.10]
  misc_feature (11)..(251): NCBI GI: 145611034 Blast Desc: MGG_00691 [Magnaporthe grisea 70-15] gi|145018379|gb|EDK02658.1| MGG_00691 [Magnaporthe grisea 70-15]
  misc_feature (3)..(285): NCBI GI: 240105866 Blast Desc: BRCA1 C Terminus (BRCT) domain containing protein [Coccidioides posadasii C735 delta SOWgp]
  misc_feature (1)..(288): NCBI GI: 225559472 Blast Desc: conserved [Ajellomyces capsulatus G186AR]
  misc_feature (1)..(288): NCBI GI: 240272888 Blast Desc: conserved [Ajellomyces capsulatus H143]
MPSPSKQPITKAAQPKFGQSFDPWNSSSTGHQRAENRLGASTGWRDSRNKKLTSQFSGGAGGGERVSDSVGAGSENWDAHTKAVITPEVRSRGQKSVYDMLSKPGSMKEQGIITSKTSSSRQLSSAWDGDSVTSPPKNSSVITNEQFEANIENETTSPSTQGRKIFEGVIVYVNGSTYPHISDHKLKHLLAENGGQMSSHLGRRRVTHVVLGRHAGSASGLGSGGGLAASKLQREIQKVSGAAVKYVTVEWVLESLKAGKRLPEGRFSDLKIASAKQKSVYGLYSKKVGDITNDADANGASKARHSNIADSDLPPPSAQRFAQDD

SEQ ID NO: 28191 - DNA, 2152 bp, Muscodor strobelii
  misc_feature: SGI EST ID NO. CUFF.66544.1
  misc_feature: Variant of the nucleotide sequence at SEQ ID NO 28189
actcatccatcaggagtcaacccacggtcatcgcgcgtgccagtccgcatgctgcatagcccaccttcgacccaatccaaatgttctgtgcatcaatggtacaggaggaacagaggtatgccggagatcctgttcgacgattcaacaattcccggcgccttactgcttaggcatcatgatcccaactgggtattatgggttaacttatctcacgattcactgttgagacttgtggagcaatgcggcacaggtgttgttcagatggatctaataaggagcgaaggagtatactcgtagagtaagccgacacggcaattgatacttgctctaggtattgacactgtatttgcgtcgaaatgacatgcgccataacaccaaatgatcacacttgtcatgataaaggactgatcatcgtagataccacgatggcgacgattgatgacgggctgagggcctcaattgcggccaggttaggtgaatagcccaagtcacgtggcctggaagtgtttagctttggcgcttgagtgactcgttggtgggctcccgcactctaaaatcgatgacatgattggtcttggattgtcaaacagcacagcgcagcaagaagctgatgcagacaaagaacaacaacacaatccggcaacgcccagagccgggcggatctgtatcgtgttgaccttgtcatgaaagcagcatgtcttcgggctgccccgttctcacttcattgaatatcggactggcaacgacccctaagacctgacggatcaggttgttaatcatatcatcatgccgtcgccatccaagcagcccattacgaaggccgcgcaacccaagttcggacagtccttcgacccatggaactcatcatcaactggccaccagcgtgcagagaatcgactcggcgctagcacaggatggcgagactcgcggaacaagaaactgacgagccaattctcgggcggcgctggtggtggcgaacgcgtatctgacagcgtgggcgctggttccgagaattgggacgctcataccaaagcagtaatcaccccagaggtccgatctcgagggcaaaagtctgtctacgacatgctgtcgaaaccgggctcgatgaaagaacagggcattatcacttcaaaaacatcctcgtcccgccagttaagcagtgcatgggatggagattccgttacttcgccgcctaagaacagttccgtcattaccaatgagcagtttgaggcgaatattgaaaatgagacgacatcaccatcaacacaaggtcgaaagatctttgaaggcgtcatcgtttatgtaaatgggagtacgtacccccacatctcagaccataagctcaagcacctgcttgcagaaaacggtggccagatgtcgagccacttggggcgaaggagagttacgcatgtcgtcctcggtcgtcacgccggtagcgcttccggtttaggctctggaggcggtctcgctgcgagtaaactgcagcgcgagattcaaaaagtcagtggtgctgctgtgaaatatgtcaccgtcgagtgggtcctggagagcctcaaggccggtaagaggttgcccgagggcagattttcagatctcaagatcgcctctgctaaacagaagagtgtttacgggttatattctaagaaggtgggggatattactaatgatgcagatgccaacggagcttccaaagcacggcattctaacattgccgatagtgatctgccacccccgagtgcgcagcgtttcgcacaagatgactgaatgggaatatgagtgtgacggctgcatatggggttaggtgcatctggggctgcattaaagggcgttttgttatcattttgtcgtgtattcgatttcgatatcgattcgacgcatgtgctgcacttccgataggtctacggagactttggcgtaggctgtggattagactttctcgcttcactacttttaagccaatgttgatgctgcgttcaatcctatgatcataggaaatgtagtgtatactggcactatgttttgttcaataagtcggcgacctgtgtgctgttctcgatctttctgtctgtgtggttttgatcaaacccgagtccttaattatacgtcacattggggcgattctatcgtccacacaatataacgttagttgtcg

SEQ ID NO: 28192 - DNA, 366 bp, Muscodor strobelii
  misc_feature: SGI cDNA ID NO. 569671
  misc_feature: Encodes the peptide sequence at SEQ ID NO 28193
atgggtgaccctgatgatgctctgccctatttcaaaaccttcggctcatgtatgatgagcgagatagccagtatggaggtcctcaatactgacatcgctaaaactaccttcattgcttccatatcccacgacttacgatcaccgcttcatggtctgcttggtaatctcgaattcttagaagacacactctcgaccgcctatcagatgagtcttataggagcaattgagacgtgcggcaaaacattacttgacacaatcgaccatcttctcgattacgcaaaaattaacaacctaagacggtcatctggatcagaggtgcaaaaagatcacgtacaatcaggcccacatctcttcaagattcactaa

SEQ ID NO: 28193 - protein, 121 aa, Muscodor strobelii
  misc_feature: SGI Peptide ID NO. 569671
  misc_feature (33)..(98): Pfam Id: PF00512 Pfam Desc: His Kinase A (phosphoacceptor) domain
  misc_feature (4)..(109): NCBI GI: 169596977 Blast Desc: SNOG_01265 [Phaeosphaeria nodorum SN15] gi|160707415|gb|EAT90914.2| SNOG_01265 [Phaeosphaeria nodorum SN15]
  misc_feature (4)..(112): NCBI GI: 39656331 Blast Desc: histidine kinase HHK9p [Cochliobolus heterostrophus]
  misc_feature (4)..(102): NCBI GI: 189195366 Blast Desc: histidine kinase G7 [Pyrenophora tritici-repentis Pt-1C-BFP] gi|187979900|gb|EDU46526.1| histidine kinase G7 [Pyrenophora tritici-repentis Pt-1C-BFP]
  misc_feature (1)..(101): NCBI GI: 256729500 Blast Desc: NECHADRAFT_105157 [Nectria haematococca mpVI 77-13-4]
  misc_feature (1)..(98): NCBI GI: 39726391 Blast Desc: histidine kinase M3EDp [Gibberella moniliformis]
  misc_feature (4)..(111): NCBI GI: 169604298 Blast Desc: SNOG_05160 [Phaeosphaeria nodorum SN15] gi|111066431|gb|EAT87551.1| SNOG_05160 [Phaeosphaeria nodorum SN15]
  misc_feature (1)..(112): NCBI GI: 46117208 Blast Desc: FG04446.1 [Gibberella zeae PH-1]
  misc_feature (1)..(106): NCBI GI: 169782159 Blast Desc: [Aspergillus oryzae RIB40] gi|83774285|dbj|BAE64409.1| protein product [Aspergillus oryzae]
  misc_feature (8)..(95): NCBI GI: 189195654 Blast Desc: two-component sensor protein histidine protein kinase [Pyrenophora tritici-repentis Pt-1C-BFP] gi|187980044|gb|EDU46670.1| two-component sensor protein protein
  misc_feature (1)..(106): NCBI GI: 238500600 Blast Desc: sensor histidine kinase/response regulator, [Aspergillus flavus NRRL3357] gi|220691771|gb|EED48118.1| sensor histidine kinase/response regulator, [Aspergillus flavus
  misc_feature (2)..(95): SWISSPROT Homolog: EC 2.7.13.3 Histidine kinase
MGDPDDALPYFKTFGSCMMSEIASMEVLNTDIAKTTFIASISHDLRSPLHGLLGNLEFLEDTLSTAYQMSLIGAIETCGKTLLDTIDHLLDYAKINNLRRSSGSEVQKDHVQSGPHLFKIH

SEQ ID NO: 28194 - DNA, 1244 bp, Muscodor strobelii
  misc_feature: SGI EST ID NO. CUFF.66524.0
  misc_feature: Variant of the nucleotide sequence at SEQ ID NO 28192
gcgaaatatcatgaaaaataactaacgcgacacctttctggctaccagattctcgcgacaatgtgtctaaccacgaggaagatcgcgattcggccaaaaataatatccggcgaatcttcgttcaggcttcacaattgattcgcgagcaagccagagccacggggtgtctctttacagatgccgcatccggcttgttttccggccagtctatcgggggcaaatctccatcgggtagtgttgatccatgggtgacggttgatgttgcgctggatgcaactgaagacgatgagccaggtgctagcgacacaacaaaaactcctctcaccccaacaggtctatttgaggccaagttcggagataggccggacgacatggccgatgtaataagccttgctcttgctgaaggctgcagcgatgatctaagctccggcattatcaagcgcaaaagtttgaaaaattgcatcatgcgatacccattcggtaaatgtttttacttaaacaaaggacgtgtgattcttgatgatagcatcgtggtcgacgaagccatcacaggtggtggttccactcaaaaatcatccgatgctgcagcacgtctgaaggatcaacttcccactgcgctaccgagggaggtactaaatcgcatccccgatgcgaagtggttgatattcctacctttgtttaattgtatgtaaccgtgcccaaaacaaccgccaccaggaaattggccatgtggaatgaaactaagtcttctttcaaccgccagacgcccagcgacagtggtgtgcggtagggtttatctggggaaatgacttcaagatgggtgaccctgatgatgctctgccctatttcaaaaccttcggctcatgtatgatgagcgagatagccagtatggaggtcctcaatactgacatcgctaaaactaccttcattgcttccatatcccacgacttacgatcaccgcttcatggtctgcttggtaatctcgaattcttagaagacacactctcgaccgcctatcagatgagtcttataggagcaattgagacgtgcggcaaaacattacttgacacaatcgaccatcttctcgattacgcaaaaattaacaacctaagacggtcatctggatcagaggtgcaaaaagatcacgtacaatcaggcccacatctcttcaagattcactaacaacctcgtttgacttgtctgtccttctggaagaagtggtagaagctgtttttgctggacaa

SEQ ID NO: 28195 - DNA, 1527 bp, Muscodor strobelii
  misc_feature: SGI cDNA ID NO. 569672
  misc_feature: Reduced expression when VOC is produced
  misc_feature: Encodes the peptide sequence at SEQ ID NO 28196
atgaccgccgcatcgagacgcgcttcaactgccagctccagtgccgaaaacgcgcgacagcgcgaccttaacaaatactatcagccatggttggacttcaaggcattaaatgctgtccccgccgacacaggaccagatgctagtagtccgaaacggacttctcctgacgctacactcactgcgttcacacagctggcggctttacggctgaatgtcaagcgtgctatggtatcgttgatcgatgcccagacgcaaatcgtccttgccgaagccacgcagacggtgtccctcatcgatgagagtcgtcacgcgccgggtgatcacatctggctgggtaatgtggctctgccaagagccgactgtatggacgaacatacactgaatagtctcaccacattccataattcagaaggccgagaggtcgaggtcgaggcattcattgttcctgatacactactcgatgaccgcttcaaagaccgaccgtatgttacatctggctttgctgtcaggttctattcgggcgtgccgatcgtcacaaagcagggccatgcaattggcgtttatgctgtttcggacatcaaacctcggcacggcttaacatatgacgaagtgcagttcatgacggatgttgcgcagatcatcgccgagcacctcgaccgagtgatggggtccatgggccgggtgtcggagagagatttcatgcggggaatttcttattttttggaagacctcagcgaatacaaatacaaaatcaacaaccttggccggtcgaagtcacctggtccttcacagtcttcggatattcttgctacagatcctcggactacgccatctcgtggccggcaaagtcatcccgggcccacagcgaattcgccatcttcggcgcgagatgagcgctcggctccagctgtcgaccaggcttcacaattgattcgcgagcaagccagagccacggggtgtctctttacagatgccgcatccggcttgttttccggccagtctatcgggggcaaatctccatcgggtagtgttgatccatgggtgacggttgatgttgcgctggatgcaactgaagacgatgagccaggtgctagcgacacaacaaaaactcctctcaccccaacaggtctatttgaggccaagttcggagataggccggacgacatggccgatgtaataagccttgctcttgctgaaggctgcagcgatgatctaagctccggcattatcaagcgcaaaagtttgaaaaattgcatcatgcgatacccattcggtaaatgtttttacttaaacaaaggacgtgtgattcttgatgatagcatcgtggtcgacgaagccatcacaggtggtggttccactcaaaaatcatccgatgctgcagcacgtctgaaggatcaacttcccactgcgctaccgagggagtatgtaaccgtgcccaaaacaaccgccaccaggaaattggccatgtggaatgaaactaagtcttctttcaaccgccagacgcccagcgacagtggtgtgcggtag

SEQ ID NO: 28196 - protein, 508 aa, Muscodor strobelii
  misc_feature: SGI Peptide ID NO. 569672
  misc_feature (54)..(218): Pfam Id: PF01590 Pfam Desc: GAF domain
  misc_feature (16)..(440): NCBI GI: 169596977 Blast Desc: SNOG_01265 [Phaeosphaeria nodorum SN15] gi|160707415|gb|EAT90914.2| SNOG_01265 [Phaeosphaeria nodorum SN15]
  misc_feature (16)..(491): NCBI GI: 189195366 Blast Desc: histidine kinase G7 [Pyrenophora tritici-repentis Pt-1C-BFP] gi|187979900|gb|EDU46526.1| histidine kinase G7 [Pyrenophora tritici-repentis Pt-1C-BFP]
  misc_feature (53)..(491): NCBI GI: 39656331 Blast Desc: histidine kinase HHK9p [Cochliobolus heterostrophus]
  misc_feature (12)..(245): NCBI GI: 39726391 Blast Desc: histidine kinase M3EDp [Gibberella moniliformis]
  misc_feature (12)..(245): NCBI GI: 256729500 Blast Desc: NECHADRAFT_105157 [Nectria haematococca mpVI 77-13-4]
  misc_feature (15)..(248): NCBI GI: 154296920 Blast Desc: conserved [Botryotinia fuckeliana B05.10] gi|150843203|gb|EDN18396.1| conserved [Botryotinia fuckeliana B05.10]
  misc_feature (18)..(432): NCBI GI: 119501709 Blast Desc: sensor histidine kinase/response regulator, [Neosartorya fischeri NRRL 181] gi|119415777|gb|EAW25714.1| sensor histidine kinase/response regulator, [Neosartorya fischeri
  misc_feature (52)..(242): NCBI GI: 159121966 Blast Desc: sensor histidine kinase/response regulator, [Aspergillus fumigatus A1163]
  misc_feature (18)..(302): NCBI GI: 121704549 Blast Desc: sensor histidine kinase/response regulator, [Aspergillus clavatus NRRL 1] gi|119398683|gb|EAW09112.1| sensor histidine kinase/response regulator, [Aspergillus clavatus NRRL
  misc_feature (18)..(248): NCBI GI: 156043976 Blast Desc: SS1G_10091 [Sclerotinia sclerotiorum 1980] gi|154694480|gb|EDN94218.1| SS1G_10091 [Sclerotinia sclerotiorum 1980]
  misc_feature: Useful for introducing or modulating the production of volatile compounds
MTAASRRASTASSSAENARQRDLNKYYQPWLDFKALNAVPADTGPDASSPKRTSPDATLTAFTQLAALRLNVKRAMVSLIDAQTQIVLAEATQTVSLIDESRHAPGDHIWLGNVALPRADCMDEHTLNSLTTFHNSEGREVEVEAFIVPDTLLDDRFKDRPYVTSGFAVRFYSGVPIVTKQGHAIGVYAVSDIKPRHGLTYDEVQFMTDVAQIIAEHLDRVMGSMGRVSERDFMRGISYFLEDLSEYKYKINNLGRSKSPGPSQSSDILATDPRTTPSRGRQSHPGPTANSPSSARDERSAPAVDQASQLIREQARATGCLFTDAASGLFSGQSIGGKSPSGSVDPWVTVDVALDATEDDEPGASDTTKTPLTPTGLFEAKFGDRPDDMADVISLALAEGCSDDLSSGIIKRKSLKNCIMRYPFGKCFYLNKGRVILDDSIVVDEAITGGGSTQKSSDAAARLKDQLPTALPREYVTVPKTTATRKLAMWNETKSSFNRQTPSDSGVR

SEQ ID NO: 28197 - DNA, 1244 bp, Muscodor strobelii; identical to SEQ ID NO: 28194
  misc_feature: SGI EST ID NO. CUFF.66524.0
  misc_feature: Variant of the nucleotide sequence at SEQ ID NO 28195

SEQ ID NO: 28198 - DNA, 855 bp, Muscodor strobelii
  misc_feature: SGI cDNA ID NO. 569673
  misc_feature: Encodes the peptide sequence at SEQ ID NO 28199
atgactgacgatgctcccacgaataagtacatcctccacaacgagaacgagctcactcggctcgcatggcagcatcgaatcatcaaagatgcgatgaataacaagctggtgttggcgccagtcgacttgaagcaatctgcgctgcgcatcttggatagcggcacggctgatggagcatggatacgggatctgcagtctgacattacgcgcgacgatacgcagcatacctacataggcatcgacatcgaggggtcgtacttcccgtcagatccacccaagaatacctcgtaccacgtccaagacgtaaatggggcctatccagtcgaatggaaaagatcttttgatttaattcatcaacgtctcacgctctgtgtctcgggaggcgtggagtcaacatacgatgcggtgaggaagcaggtcgagctgttgaagccaggcggctggatccagtatgtggaaggaccaggctggacagaagatgttgatggccgaggctggaaagactttacaacctgcgtgactgacttggtcgcgtccgtcggctcctcggtcactcatattgaccgtgccaaaggatggcttcaagatttgggactcgttgatgtggaggatgctgttcttgaaggcaactttggcactcgggatgacaaggagctggaaactttggccaagaaatcggcacttctcaccgcgcagagcgttctgggtgtcgcacagacatttccgcaagagcttctgtcacttcccgtgtcgcgaattcctcagatcatgacagatctcgaaaaggagatgaatacggaaccgaccaacgcccactggtacttcaaagttgtctgggggagaaagccagaatga

SEQ ID NO: 28199 - protein, 284 aa, Muscodor strobelii
  misc_feature: SGI Peptide ID NO. 569673
  misc_feature (14)..(283): NCBI GI: 145606524 Blast Desc: MGG_02274 [Magnaporthe grisea 70-15] gi|145014160|gb|EDJ98801.1| MGG_02274 [Magnaporthe grisea 70-15]
  misc_feature (15)..(283): NCBI GI: 242815587 Blast Desc: methyltransferase SirN-like, [Talaromyces stipitatus ATCC 10500] gi|218714937|gb|EED14360.1| methyltransferase SirN-like, [Talaromyces stipitatus ATCC 10500]
  misc_feature (8)..(283): NCBI GI: 70992025 Blast Desc: methyltransferase GliN [Aspergillus fumigatus Af293] gi|66848494|gb|EAL88823.1| methyltransferase GliN [Aspergillus fumigatus Af293] gi|159124429|gb|EDP49547.1| methyltransferase
  misc_feature (16)..(245): NCBI GI: 46114430 Blast Desc: FG03057.1 [Gibberella zeae PH-1]
  misc_feature (8)..(283): NCBI GI: 119470768 Blast Desc: NFIA_055410 [Neosartorya fischeri NRRL 181] gi|119406241|gb|EAW16192.1| conserved [Neosartorya fischeri NRRL 181]
  misc_feature (8)..(283): NCBI GI: 56609351 Blast Desc: GliN [Aspergillus fumigatus]
  misc_feature (15)..(202): NCBI GI: 55823914 Blast Desc: methyltransferase [Fusarium heterosporum]
  misc_feature (12)..(219): NCBI GI: 70983245 Blast Desc: methyltransferase SirN-like [Aspergillus fumigatus Af293] gi|66844775|gb|EAL85112.1| methyltransferase SirN-like, [Aspergillus fumigatus Af293] gi|159124035|gb|EDP49154.1| A1163]
  misc_feature (14)..(282): NCBI GI: 212529358 Blast Desc: conserved [Penicillium marneffei ATCC 18224] gi|210074234|gb|EEA28321.1| conserved [Penicillium marneffei ATCC 18224]
  misc_feature (12)..(263): NCBI GI: 121719576 Blast Desc: conserved [Aspergillus clavatus NRRL 1] gi|119404685|gb|EAW15061.1| conserved [Aspergillus clavatus NRRL 1]
MTDDAPTNKYILHNENELTRLAWQHRIIKDAMNNKLVLAPVDLKQSALRILDSGTADGAWIRDLQSDITRDDTQHTYIGIDIEGSYFPSDPPKNTSYHVQDVNGAYPVEWKRSFDLIHQRLTLCVSGGVESTYDAVRKQVELLKPGGWIQYVEGPGWTEDVDGRGWKDFTTCVTDLVASVGSSVTHIDRAKGWLQDLGLVDVEDAVLEGNFGTRDDKELETLAKKSALLTAQSVLGVAQTFPQELLSLPVSRIPQIMTDLEKEMNTEPTNAHWYFKVVWGRKPE

SEQ ID NO: 28200 - DNA, 658 bp, Muscodor strobelii
  misc_feature: SGI EST ID NO. CUFF.66542.0
  misc_feature: Variant of the nucleotide sequence at SEQ ID NO 28198
cgcgcatcatgaatgccttcgcgtagactcttgacagaagaaaagcagtgcaatagggccaaggacagttaagctagcgatcaacgctgagttcttcgaagctaggtgttcaaagtttgggatcacgcccaaaggtggaggctcaagcagcagattggccatgtctgccggtatgcctccatttgagatatccataatgaggaagcgagtggatgatgataaaatggtctctcaagtgtataacacgacgtgctacgcagagataataagtcataaaaacggtttgcaaaatggaaaaggggctcggttacaggggcttgggtcgtacaagtaataaaagccagctcaaatgccgaataatccgaccctttcatgcaaggggccaaggctggctctttgattataaaatcccaccacaaactcatctaccaacccaagaagcactgatacagtcatcgacgccatgactgacgatgctcccacgaataagtacatcctccacaacgagaacgagctcactcggctcgcatggcagcatcgaatcatcaaagatgcgatgaataacaagctggtgttggcgccagtcgacttgaagcaatctgcgctgcgcatcttggatagcggcacggctgatggagcatggatacgggatctgcag

SEQ ID NO: 28201 - DNA, 711 bp, Muscodor strobelii
  misc_feature: SGI cDNA ID NO. 569674
  misc_feature: Encodes the peptide sequence at SEQ ID NO 28202
atgacgtctcaggagcggccagtcggcccaatcgttgaaggaagtacgcctcgccaaccaatccgaaatataacactcatcggccgcaacatcacaattaaagctctcaacccctcccacgtcgaagcattctaccctcacatctcaggcgaaaagaatgcctcactctgggactacatgggggacgagccctacacctccgtagaccaattccgtgccgcagtaaagagcaaaagccaaagtgcagacccactcttctacgccatcgttctcaacacgcaacctctagcagacggaagtgacaacatcataggttgggcaagccatatgcgcatcgatatgcccaatcggtctatcgaactaggaaacctcatgtattcgcccgaactccagcgcacgcccgcttcgacagaggtcatgtacctcctagcgaaacatgcattcgacgatctgggattccgcagatatgaatggaagtgcaatgcgctgaatgcaccgagccgaagagcagcgctgagactcgggtttacgtttgaaggcgtgttcagaaaacacatgattgtcaagggacggagtagagacacggcttggttctcaataacagacgatgagtggcctgctattagacatgggctagagaaatggttggatccctcgaattttgatcagcatggtattcagaagaagaggttggaggagttgaggaaataa

SEQ ID NO: 28202 - protein, 236 aa, Muscodor strobelii
  misc_feature: SGI Peptide ID NO. 569674
  misc_feature (95)..(177): Pfam Id: PF00583 Pfam Desc: Acetyltransferase (GNAT) family
  misc_feature (8)..(234): NCBI GI: 256729964 Blast Desc: NECHADRAFT_82479 [Nectria haematococca mpVI 77-13-4]
  misc_feature (6)..(235): NCBI GI: 121709654 Blast Desc: acetyltransferase, GNAT family, [Aspergillus clavatus NRRL 1] gi|119400629|gb|EAW11054.1| acetyltransferase, GNAT family, [Aspergillus clavatus NRRL 1]
  misc_feature (6)..(235): NCBI GI: 70982634 Blast Desc: GNAT family acetyltransferase [Aspergillus fumigatus Af293] gi|66844469|gb|EAL84807.1| GNAT family acetyltransferase, [Aspergillus fumigatus Af293] gi|159122912|gb|EDP48032.1| GNAT
  misc_feature (6)..(235): NCBI GI: 119488538 Blast Desc: acetyltransferase, GNAT family, [Neosartorya fischeri NRRL 181] gi|119410877|gb|EAW20822.1| acetyltransferase, GNAT family, [Neosartorya fischeri NRRL 181]
  misc_feature (7)..(235): NCBI GI: 154245940 Blast Desc: GCN5-related N-acetyltransferase [Xanthobacter autotrophicus Py2] gi|154160025|gb|ABS67241.1| GCN5-related N-acetyltransferase [Xanthobacter autotrophicus Py2]
  misc_feature (24)..(235): NCBI GI: 240110594 Blast Desc: [Coccidioides posadasii C735 delta SOWgp]
  misc_feature (6)..(235): NCBI GI: 67903234 Blast Desc: AN8604.2 [Aspergillus nidulans FGSC A4] gi|40741448|gb|EAA60638.1| AN8604.2 [Aspergillus nidulans FGSC A4] gi|259483181|tpe|CBF78348.1| TPA: GNAT family AFUA_7G00850)
  misc_feature (2)..(235): NCBI GI: 158425375 Blast Desc: GCN5-related N-acetyltransferase [Azorhizobium caulinodans ORS 571] gi|158332264|dbj|BAF89749.1| GCN5-related N-acetyltransferase [Azorhizobium caulinodans ORS 571]
  misc_feature (24)..(235): NCBI GI: 119196005 Blast Desc: CIMG_02377 [Coccidioides immitis RS]
  misc_feature (7)..(235): NCBI GI: 255936079 Blast Desc: Pc13g06320 [Penicillium chrysogenum Wisconsin 54-1255] gi|211583686|emb|CAP91701.1| Pc13g06320 [Penicillium chrysogenum Wisconsin 54-1255]
MTSQERPVGPIVEGSTPRQPIRNITLIGRNITIKALNPSHVEAFYPHISGEKNASLWDYMGDEPYTSVDQFRAAVKSKSQSADPLFYAIVLNTQPLADGSDNIIGWASHMRIDMPNRSIELGNLMYSPELQRTPASTEVMYLLAKHAFDDLGFRRYEWKCNALNAPSRRAALRLGFTFEGVFRKHMIVKGRSRDTAWFSITDDEWPAIRHGLEKWLDPSNFDQHGIQKKRLEELRK

SEQ ID NO: 28203 - DNA, 2919 bp, Muscodor strobelii
  misc_feature: SGI cDNA ID NO. 569675
  misc_feature: Encodes the peptide sequence at SEQ ID NO 28204
atggccgaagctgtcggtcttgtactcggcgtggctggtgtaatcggcaccttcaaaagctgtgtggatctatttgccttcttctcgtcaagcagtagtttcggccgggatcaccaaatcatcgaaacaaagcttcatgtacaaaaggctctattgttgcaatgggcagagcgtgtacgactcgtctatcctgactataacaagcgacttgatgatccaacaactcagtcagtcgtatcacgaattctcgcaggcgtccagcaactattgaccgaaagcactctattagagcagcgctatggactgcgcgcagctgaggtatcttctacgatttatgcttcgcatcaagaatcccgtatcaatcgcatgacctcgttccgcttagatcagttcaataccaattttaaaaaactcaaaatcgatatcaaagagaatgggaaagcggtctcagcaactagcagaatgcgatgggttatttccgacagagagaagttcgaaaagcttgtgcaagagctttcagattttgtgtctggcttgcatcaattgatcccagagacagaaaagactgagaaatctctggcgagagaagacatgttgcgtctgaaagatgtgaggtcgctcgctttgatttacgacgctacgtgtcatgatcaagattacatagcggacgcggctcttgatcgaatacatgatctacatgtgcaggagatcttgagtaaattatggttcccgagcctagatgacaggagagacgccgtcgtcccgccccatcatgaaacttttcagtgggctcttgagcaccctctggactcacctatcgtggccgaaggagcaacatgggatgatttaccatgctggctggcgtcgggaagcgagatgtattggatttctggcaaagctggaagtgggaagtctacgctaatgaagtatctataccaccatccaactacgctcggcctattatccgagtgggcaggggcaattccattgtccgttgggtcgttctttttctggaacttaggcgcacccgagcagagatccttgaacggtctgtcacgggcaatcttgcatcaagtattggatacgcagcatcatctagtaccggcgctgttgccgaagatgtggcaagaacgagagcgacgggacggaacagattccaataccccgacagatgctgacttaagacttgctatcgaagaactatcgactacacctagtcttagtcgttccttctgcttcttcattgacgggcttgacgagttcgatggagatcactatcaagcaacaacattagtgaagagacttgccggcaatccgcgaataaagattgttatgtctagtcgtcccattcccccatgcgtattggcattctcaaaattgcccagtttacatctccaggatcttactcgtcgcgacatcaccaactatgtcatggccaccattggcacccatccctacatggaagaccttgcagagtcggactctgatactgcggcattaatctcaaatgaactaatcgtcaaagcttcaggagtcttcttgtgggttgtattagcatgtcgctcagttattgcaggatttgcggcatgcgacaatattcgagagctcatacaacgcgttaacgagctacccgcggagcttgaggacttgttcaagcatatgctagagcgtgttgagccgcgataccacggtcaaatggccaaaatgctgcgactctgccagcaaaggcagcttctacctgccgttggagacgcaaaattgatttataccgtagcttggtctatcatggacaacttcgacttgaagtttgaagatagcggaccacttccatttcttacaccaaagcagcgcatcgcaatatgcgcgccgacgccaggtcgactgcggagtcggtgtggtggacttcttgaaatcaagcatcgagtccatcactgtcaatgtgggcgggtagggttgaaatccggacatagtcgatctgttgactctactatcgaatttatgcatcgaacaatgtttgagttcttaaacaatcctactacctgggagcacagttgtcttcaaatcacagaccaagacttcgatgcgaacgtcgctctatctatcatgtctctacagatggctcggctacatctccacgaacattatacagactcttaccaacagttcattgctgacgcgatcatgtgcgcaagacatgcggatttgtcaatgggagacaaaggctttctcgttctatcgaaactagaagagatagctgctgtcgtccaacaagtgacccaacatgtccttgatcctcagatttcgtgtttggctctagcaatcgaatcgggcatggtgacctgcacaaagtacctgctgagaaggacgccaatggatgaggcgcgaccgtctttccctttactgtaccacgcaatccgccgtccactatactggcgaactctccagttgttccgaagcgccgagatgattcgtttggtcttacccgaagacggtgggcctaatgagtacttcagaaatgccgagggattgaggactacaccatggcgggaatggttgcgggagatgcacaggatgggacgttcagatgtacttcagacacttgatataacagaagccttcgtgaaaggtggagccgacctagcaccagaaagcttggagcctcctgatcaaatcgtgagacggcatctaggtcatatacagagcattacaagcgaaggccggaggctactgattctagcagaaaattttctagctttagtccaggacataaaagaaggcaaagcggaggaacaagttgcctcaaaccctggagaaagaagaaagaggcgacactcagaagatgatgatgaacagcgcaagccattatcgaagaatgcaaggacagcatatccccaagacggggttccacaatgcgtatga

SEQ ID NO: 28204 - protein, 972 aa, Muscodor strobelii
  misc_feature: SGI Peptide ID NO. 569675
  misc_feature (1)..(880): NCBI GI: 256721455 Blast Desc: NECHADRAFT_55084 [Nectria haematococca mpVI 77-13-4]
  misc_feature (3)..(857): NCBI GI: 9453820 Blast Desc: related to small s protein [Neurospora crassa]
  misc_feature (3)..(877): NCBI GI: 116205553 Blast Desc: CHGG_10660 [Chaetomium globosum CBS 148.51] gi|88176788|gb|EAQ84256.1| CHGG_10660 [Chaetomium globosum CBS 148.51]
  misc_feature (1)..(741): NCBI GI: 256722211 Blast Desc: NECHADRAFT_86865 [Nectria haematococca mpVI 77-13-4]
  misc_feature (8)..(687): NCBI GI: 46133835 Blast Desc: FG09057.1 [Gibberella zeae PH-1]
  misc_feature (3)..(640): NCBI GI: 256734179 Blast Desc: NECHADRAFT_35981 [Nectria haematococca mpVI 77-13-4]
  misc_feature (3)..(561): NCBI GI: 164423377 Blast Desc: NCU11388 [Neurospora crassa OR74A] gi|157070066|gb|EDO64960.1| [Neurospora crassa OR74A]
  misc_feature (3)..(639): NCBI GI: 46120494 Blast Desc: FG04894.1 [Gibberella zeae PH-1]
  misc_feature (10)..(638): NCBI GI: 256733741 Blast Desc: NECHADRAFT_36311 [Nectria haematococca mpVI 77-13-4]
  misc_feature (221)..(878): NCBI GI: 116198607 Blast Desc: CHGG_07459 [Chaetomium globosum CBS 148.51] gi|88178738|gb|EAQ86206.1| CHGG_07459 [Chaetomium globosum CBS 148.51]
MAEAVGLVLGVAGVIGTFKSCVDLFAFFSSSSSFGRDHQIIETKLHVQKALLLQWAERVRLVYPDYNKRLDDPTTQSVVSRILAGVQQLLTESTLLEQRYGLRAAEVSSTIYASHQESRINRMTSFRLDQFNTNFKKLKIDIKENGKAVSATSRMRWVISDREKFEKLVQELSDFVSGLHQLIPETEKTEKSLAREDMLRLKDVRSLALIYDATCHDQDYIADAALDRIHDLHVQEILSKLWFPSLDDRRDAVVPPHHETFQWALEHPLDSPIVAEGATWDDLPCWLASGSEMYWISGKAGSGKSTLMKYLYHHPTTLGLLSEWAGAIPLSVGSFFFWNLGAPEQRSLNGLSRAILHQVLDTQHHLVPALLPKMWQERERRDGTDSNTPTDADLRLAIEELSTTPSLSRSFCFFIDGLDEFDGDHYQATTLVKRLAGNPRIKIVMSSRPIPPCVLAFSKLPSLHLQDLTRRDITNYVMATIGTHPYMEDLAESDSDTAALISNELIVKASGVFLWVVLACRSVIAGFAACDNIRELIQRVNELPAELEDLFKHMLERVEPRYHGQMAKMLRLCQQRQLLPAVGDAKLIYTVAWSIMDNFDLKFEDSGPLPFLTPKQRIAICAPTPGRLRSRCGGLLEIKHRVHHCQCGRVGLKSGHSRSVDSTIEFMHRTMFEFLNNPTTWEHSCLQITDQDFDANVALSIMSLQMARLHLHEHYTDSYQQFIADAIMCARHADLSMGDKGFLVLSKLEEIAAVVQQVTQHVLDPQISCLALAIESGMVTCTKYLLRRTPMDEARPSFPLLYHAIRRPLYWRTLQLFRSAEMIRLVLPEDGGPNEYFRNAEGLRTTPWREWLREMHRMGRSDVLQTLDITEAFVKGGADLAPESLEPPDQIVRRHLGHIQSITSEGRRLLILAENFLALVQDIKEGKAEEQVASNPGERRKRRHSEDDDEQRKPLSKNARTAYPQDGVPQCV

SEQ ID NO: 28205 - DNA, 6807 bp, Muscodor strobelii
  misc_feature: SGI EST ID NO. CUFF.66559.0
  misc_feature: Variant of the nucleotide sequence at SEQ ID NO 28203
tgcatatcattctagtgctgtatttgtccgtccacggtcagatgagacgttactggaagacgctacaagccctcgattcctcaaagttgtgactctgagttcctgtcaggccgtaggggacgtcgcagaagactcctaaacctcggcatttcaattgtccatcctcataggttcgaatgcccttctaactcaacgacttcgagcgaacttcgtcattctgctgggtctttccagaactacagcttttagctttgctggcgatcgcttgggacacgaagcctgcttcgtatagaacatggccgacaatgtctattgggctagagaataatgaacacgatttatgcacaatataacttatttcctcaactcctccaacctcttcttctgaataccatgctgatcaaaattcgagggatccaaccatttctctagcccatgtctaatagcaggccactcatcgtctgttattgagaaccaagccgtgtctctactccgtcccttgacaatcatgtgttttctgaacacgccttcaaacgtaaacccgagtctcagcgctgctcttcggctcggtgcattcagcgcattgcacttccattcatatctgcggaatcccagatcgtcgaatgcatgtttcgctaggaggtacatgacctctgtcgaagcgggcgtgcgctggagttcgggcgaatacatgaggtttcctagttcgatagaccgattgggcatatcgatgcgcatatggcttgcccaacctatgatgttgtcacttccgtctgctagaggttgcgtgttgagaacgatggcgtagaagagtgggtctgcactttggcttttgctctttactgcggcacggaattggtctacggaggtgtagggctcgtcccccatgtagtcccagagtgaggcattcttttcgcctgagatgtgagggtagaatgcttcgacgtgggaggggttgagagctttaattgtgatgttgcggccgatgagtgttatatttcggattggttggcgaggcgtacttccttcaacgattgggccgactggccgctcctgagacgtcatgtgtgatattgattgtggttgcagttcgtgtgatcgcagctctctattcctgatataccaggctctgctcatgaacaccaattcctgcatacagtttatattatcatatttctttttgagagaggacaaagtgaggggactcctttccaaagctaggtcactccggagccggaccccacacgggtttccacgttgcacagctgcattccgagtctctcgcatactccgagagcaactagcttagattggtaggtatatgcgacatcttgggatgcgggctgaggtccatctaagataccgtggagttcaagtggaatcatggcacaatagctaggttagtgtgccgtcaaatataccttcatatcatggcagagcaccacttttgcgatccagggaaagttggtcaagcaatcaatctagactgacgggggtctataatgccgccgatttatttgccattttcccgtcgcttctttgatcgcgctcagctacgggttgtcatgcaagaaacgcgaggatcagattgagggtcagaaaggattgataagtacgcaggccgctgcgacaggtggtcaatgcatcatcggcaccatttcgcgacaaatccgatgcatcacgatacaagcaagtgtgcgggttggatcttaaaccagtaaacctcaactttaacaaacacttcagctatgtctttcttacgctattctcacgtttcgtctaaagctgacgatgagctctttcgtgaacattgacgccatggagatccatgtgataaataattaacaatatttaccgctggggctgcatgcagaggccgacaaatgaacgacggtcgaaatgtaacacgaggcgaggggcctgctgcatttggtggtctgcgtcaggacggttgcatcacggttgcctacatggtcatcatactaattcctctcctcgtccattgcttcgtcccagagaaagaacttggcgtttcggtgcctcgtcttattccgtacggcttccaggctgagtgaatgcgcccggttcatatcgcaaatcctcaagccatggtacgagaatgcatcaaaatagcgtcgactgcaattcagactcgttttgatttcagttcgctatgatctacaagccctagttttccgcgaaccgtatattcggataatccaccattggacgtgatggccgaagctgtcggtcttgtactcggcgtggctggtgtaatcggcaccttcaaaagctgtgtggatctatttgccttcttctcgtcaagcagtagtttcggccgggatcaccaaatcatcgaaacaaagcttcatgtacaaaaggctctattgttgcaatgggcagagcgtgtacgactcgtctatcctgactataacaagcgacttgatgatccaacaactcagtcagtcgtatcacgaattctcgcaggcgtccagcaactattgaccgaaagcactctattagagcagcgctatggactgcgcgcagctgaggtatcttctacgatttatgcttcgcatcaagaatcccgtatcaatcgcatgacctcgttccgcttagatcagttcaataccaattttaaaaaactcaaaatcgatatcaaagagaatgggaaagcggtctcagcaactagcagaatgcgatgggttatttccgacagagagaagttcgaaaagcttgtgcaagagctttcagattttgtgtctggcttgcatcaattgatcccagagacagaaaagactgagaaatctctggcgagagaagacatgttgcgtctgaaagatgtgaggtcgctcgctttgatttacgacgctacgtgtcatgatcaagattacatagcggacgcggctcttgatcgaatacatgatctacatgtgcaggagatcttgagtaaattatggttcccgagcctagatgacaggagagacgccgtcgtcccgccccatcatgaaacttttcagtgggctcttgagcaccctctggactcacctatcgtggccgaaggagcaacatgggatgatttaccatgctggctggcgtcgggaagcgagatgtattggatttctggcaaagctggaagtgggaagtctacgctaatgaagtatctataccaccatccaactacgctcggcctattatccgagtgggcaggggcaattccattgtccgttgggtcgttctttttctggaacttaggcgcacccgagcagagatccttgaacggtctgtcacgggcaatcttgcatcaagtattggatacgcagcatcatctagtaccggcgctgttgccgaagatgtggcaagaacgagagcgacgggacggaacagattccaataccccgacagatgctgacttaagacttgctatcgaagaactatcgactacacctagtcttagtcgttccttctgcttcttcattgacgggcttgacgagttcgatggagatcactatcaagcaacaacattagtgaagagacttgccggcaatccgcgaataaagattgttatgtctagtcgtcccattcccccatgcgtattggcattctcaaaattgcccagtttacatctccaggatcttactcgtcgcgacatcaccaactatgtcatggccaccattggcacccatccctacatggaagaccttgcagagtcggactctgatactgcggcattaatctcaaatgaactaatcgtcaaagcttcaggagtcttcttgtgggttgtattagcatgtcgctcagttattgcaggatttgcggcatgcgacaatattcgagagctcatacaacgcgttaacgagctacccgcggagcttgaggacttgttcaagcatatgctagagcgtgttgagccgcgataccacggtcaaatggccaaaatgctgcgactctgccagcaaaggcagcttctacctgccgttggagacgcaaaattgatttataccgtagcttggtctatcatggacaacttcgacttgaagtttgaagatagcggaccacttccatttcttacaccaaagcagcgcatcgcaatatgcgcgccgacgccaggtcgactgcggagtcggtgtggtggacttcttgaaatcaagcatcgagtccatcactgtcaatgtgggcgggtagggttgaaatccggacatagtcgatctgttgactctactatcgaatttatgcatcgaacaatgtttgagttcttaaacaatcctactacctgggagcacagttgtcttcaaatcacagaccaagacttcgatgcgaacgtcgctctatctatcatgtctctacagatggctcggctacatctccacgaacattatacagactcttaccaacagttcattgctgacgcgatcatgtgcgcaagacatgcggatttgtcaatgggagacaaaggctttctcgttctatcgaaactagaagagatagctgctgtcgtccaacaagtgacccaacatgtccttgatcctcagatttcgtgtttggctctagcaatcgaatcgggcatggtgacctgcacaaagtacctgctgagaaggacgccaatggatgaggcgcgaccgtctttccctttactgtaccacgcaatccgccgtccactatactggcgaactctccagttgttccgaagcgccgagatgattcgtttggtcttacccgaagacggtgggcctaatgagtacttcagaaatgccgagggattgaggactacaccatggcgggaatggttgcgggagatgcacaggatgggacgttcagatgtacttcagacacttgatataacagaagccttcgtgaaaggtggagccgacctagcaccagaaagcttggagcctcctgatcaaatcgtgagacggcatctaggtcatatacagagcattacaagcgaaggccggaggctactgattctagcagaaaattttctagctttagtccaggacataaaagaaggcaaagcggaggaacaagttgcctcaaaccctggagaaagaagaaagaggcgacactcagaagatgatgatgaacagcgcaagccattatcgaagaatgcaaggacagcatatccccaagacggggttccacaatgcgtatgagagatatccgcgactgtacaagaaagctgatgaagccgggctcaaatatctcgcggccagactcgcactcttacaacgtcgcgaacgttggcacaatttcacatggtagctcatcaacactacagcttaagattagtgcagctctgaagaccagaatatttgatatcacgacttacagttacgaccgctgggcccgggttggtgtagttggttgggatcggccagtacaaattgatcagaatgccagggtcagtggccttcaacccgcaagagttagtacgagttcgagatctgtatagacccttttgggccacttacagagtatgcgccaggaagcgatacaccactgaaggtcttggtaccgctaccggcaacgttgagctgagcgcaacctaggtagaactgcaagagcatcaacgatcagcatcaaccctttctctcacgaaagggatattcattttacctgaacaccgccaacggttgatgcgctgtgcagtgcaatgtgctcaacgcgaaggaggtagtagcctggtgcgaggcatgaggggatcgtgaccgatgtcgtggtttcggcactggtgtatgacttgaattgcagaccggttgagtcgatcgttggatgctcctcatagatcttgaaccagacggcgccgtcgccgttgaaagtctctgctgtctgacccgatggtgccttggccatgtaatattgcattgggccagggtgctctgatgattgattaattcagcaaccgttctctaacacaaagtcggtggcatactcacgaacagcagggtctattctgaatccgactgtgtcgccggcattaacattcatagtggcagcaccctccgagccttccgcgagctgataacaccggatctgagggtcattgacatcctgaacggggccgtgggagttgtaattggttgtcttcctcacgtaggcccagtctgcttgagtgacgcccttatatataaggccgggctagagaaatcattaggaaatcgtcgacgtcagctcaacacgtaagggacaaacatacgaatgtgtctatcatgtcaagatcatcagcatccgagtctcaagaggctataaatgcatgggcttacaatgggcctgagcaacgcccaacagaccgagaacggcagcgtacttcatagctcgagcgaggagggctagcgtcagtgataatgggtaaatcagagtcttgaaagtagtggtgtcgacgacgatgagcgcgaagactagaaacaagcgcgagtatagaaggcaagacaagtcgtcttgttatatactcggaagcttgtggaccgggtgacgttctacagaactgcggaaactctgagcatggaggccgatggaggtcctattttccctcccctatcctcatcaacgaggtcgccgggttcctgtcgcgtcttcgatggagtaggtgactttggaatcgtgggagtggatggaaataagtaccggaaataggcacgctgaaaactaggtgacatcaaattcggtccgtgatcaacgtaatgtttcgtgactggctgcaattacttgtgtttcgggttgatggaagactgaaggtgtgctgtattgatggggttgatataccctgcaggatggacttcaatctcgcacgcattatttccgtcgcga

SEQ ID NO: 28206 - DNA, 744 bp, Muscodor strobelii
  misc_feature: SGI cDNA ID NO. 569676
  misc_feature: Encodes the peptide sequence at SEQ ID NO 28207
atgaagtacgctgccgttctcggtctgttgggcgttgctcaggcccattacacattccccggccttatatataagggcgtcactcaagcagactgggcctacgtgaggaagacaaccaattacaactcccacggccccgttcaggatgtcaatgaccctcagatccggtgttatcagctcgcggaaggctcggagggtgctgccactatgaatgttaatgccggcgacacagtcggattcagaatagaccctgctgttcagcaccctggcccaatgcaatattacatggccaaggcaccatcgggtcagacagcagagactttcaacggcgacggcgccgtctggttcaagatctatgaggagcatccaacgatcgactcaaccggtctgcaattcaagtcatacaccagtgccgaaaccacgacatcggtcacgatcccctcatgcctcgcaccaggctactacctccttcgcgttgagcacattgcactgcacagcgcatcaaccgttggcggtgttcagttctacctaggttgcgctcagctcaacgttgccggtagcggtaccaagaccttcagtggtgtatcgcttcctggcgcatactctgccactgaccctggcattctgatcaatttgtactggccgatcccaaccaactacaccaacccgggcccagcggtcgtaactgtaagtcgtgatatcaaatattctggtcttcagagctgcactaatcttaagctgtag

SEQ ID NO: 28207 - protein, 247 aa, Muscodor strobelii
  misc_feature: SGI Peptide ID NO. 569676
  misc_feature (1)..(222): Pfam Id: PF03443 Pfam Desc: Glycosyl hydrolase family 61
  misc_feature (144)..(213): Pfam Id: PF03443 Pfam Desc: Glycosyl hydrolase family 61
  misc_feature (1)..(227): NCBI GI: 189202962 Blast Desc: fungal cellulose binding domain containing protein [Pyrenophora tritici-repentis Pt-1C-BFP] gi|187984916|gb|EDU50404.1| fungal cellulose binding domain
  misc_feature (16)..(228): NCBI GI: 171681359 Blast Desc: protein product [Podospora anserina] gi|170940638|emb|CAP65866.1| protein product [Podospora anserina]
  misc_feature (16)..(229): NCBI GI: 169596128 Blast Desc: SNOG_00815 [Phaeosphaeria nodorum SN15] gi|160701235|gb|EAT92310.2| SNOG_00815 [Phaeosphaeria nodorum SN15]
  misc_feature (16)..(227): NCBI GI: 116203843 Blast Desc: CHGG_09805 [Chaetomium globosum CBS 148.51] gi|88175933|gb|EAQ83401.1| CHGG_09805 [Chaetomium globosum CBS 148.51]
  misc_feature (16)..(229): NCBI GI: 262118540 Blast Desc: CHGG_09805 [Chaetomium globosum CBS 148.51] gi|88175933|gb|EAQ83401.1| CHGG_09805 [Chaetomium globosum CBS 148.51]
  misc_feature (16)..(229): NCBI GI: 85092580 Blast Desc: NCU02344 [Neurospora crassa OR74A] gi|28920895|gb|EAA30230.1| conserved [Neurospora crassa OR74A] gi|40804596|emb|CAF05857.1| related to cellulose binding protein
  misc_feature (18)..(229): NCBI GI: 171680024 Blast Desc: protein product [Podospora anserina] gi|170939638|emb|CAP64865.1| protein product [Podospora anserina]
  misc_feature (5)..(227): NCBI GI: 116200239 Blast Desc: CHGG_08275 [Chaetomium globosum CBS 148.51] gi|88179554|gb|EAQ87022.1| CHGG_08275 [Chaetomium globosum CBS 148.51]
  misc_feature (4)..(229): NCBI GI: 85076191 Blast Desc: NCU03328 [Neurospora crassa OR74A] gi|28881165|emb|CAD70347.1| related to cellulose binding protein CEL1 [Neurospora crassa] gi|28916920|gb|EAA26656.1| conserved
  misc_feature (16)..(229): NCBI GI: 39946514 Blast Desc: MGG_08254 [Magnaporthe grisea 70-15] gi|145020107|gb|EDK04335.1| MGG_08254 [Magnaporthe grisea 70-15]
  misc_feature (52)..(229): SWISSPROT Homolog: EC 3.2.1.4 Cellulase
MKYAAVLGLLGVAQAHYTFPGLIYKGVTQADWAYVRKTTNYNSHGPVQDVNDPQIRCYQLAEGSEGAATMNVNAGDTVGFRIDPAVQHPGPMQYYMAKAPSGQTAETFNGDGAVWFKIYEEHPTIDSTGLQFKSYTSAETTTSVTIPSCLAPGYYLLRVEHIALHSASTVGGVQFYLGCAQLNVAGSGTKTFSGVSLPGAYSATDPGILINLYWPIPTNYTNPGPAVVTVSRDIKYSGLQSCTNLKL

SEQ ID NO: 28208 - DNA, 555 bp, Muscodor strobelii
  misc_feature: SGI cDNA ID NO. 569677
  misc_feature: Encodes the peptide sequence at SEQ ID NO 28209
atggacccttcaccgatgacagagccggcaacgtacaagctaccctctctgcgtcgcatgggctacgttgacgctgtccaaggcgacgatgtctataacttcttcggcaacagagttgtcgagcatgtcaccaagtccagcgaagtactcgctatcaaagtaaagccatcagaaggaatggaccgttctgaaggggacatgatgcattatgcagcaacacatggtatcttggcaccccgcgtaaggagcatttatgatgtgatcggcctacaaccactcgcgcgcgtgctcattagcgagttcgttgaaggcgaccctcttagcgaggtgtgggatgacctcgacgacacgcaaaagtccaatatcaagaatcagctccgcgaacagatagcgtgtatgcgtgcctgcactcaatcattcatcgggcgtgtaaacaaccagcatttccgcaatgtctatgatcgcttgccccagatgtactgcggaccgttcgccgacgaggaggagtttgacaagtggtgcctagcccgcatagataacagactatctcggtga

SEQ ID NO: 28209 - protein, 184 aa, Muscodor strobelii
  misc_feature: SGI Peptide ID NO. 569677
  misc_feature (4)..(184): NCBI GI: 171677550 Blast Desc: protein product [Podospora anserina] gi|170936843|emb|CAP61501.1| protein product [Podospora anserina]
  misc_feature (9)..(180): NCBI GI: 169772835 Blast Desc: [Aspergillus oryzae RIB40] gi|83768747|dbj|BAE58884.1| protein product [Aspergillus oryzae]
  misc_feature (31)..(178): NCBI GI: 116200770 Blast Desc: [Chaetomium globosum CBS 148.51] gi|88175644|gb|EAQ83112.1| [Chaetomium globosum CBS 148.51]
  misc_feature (1)..(184): NCBI GI: 115390326 Blast Desc: [Aspergillus terreus NIH2624] gi|114195064|gb|EAU36764.1| [Aspergillus terreus NIH2624]
  misc_feature (28)..(184): NCBI GI: 225555170 Blast Desc: conserved [Ajellomyces capsulatus G186AR]
  misc_feature (22)..(180): NCBI GI: 258573953 Blast Desc: [Uncinocarpus reesii 1704] gi|237901424|gb|EEP75825.1| [Uncinocarpus reesii 1704]
  misc_feature (22)..(180): NCBI GI: 261200139 Blast Desc: conserved [Ajellomyces dermatitidis SLH14081] gi|239593542|gb|EEQ76123.1| conserved [Ajellomyces dermatitidis SLH14081] gi|239607580|gb|EEQ84567.1| conserved [Ajellomyces
  misc_feature (15)..(180): NCBI GI: 240107314 Blast Desc: Phosphotransferase family protein [Coccidioides posadasii C735 delta SOWgp]
  misc_feature (22)..(180): NCBI GI: 119190801 Blast Desc: [Coccidioides immitis RS]
  misc_feature (28)..(178): NCBI GI: 225679673 Blast Desc: conserved [Paracoccidioides brasiliensis Pb03] gi|226291410|gb|EEH46838.1| conserved [Paracoccidioides brasiliensis Pb18]
MDPSPMTEPATYKLPSLRRMGYVDAVQGDDVYNFFGNRVVEHVTKSSEVLAIKVKPSEGMDRSEGDMMHYAATHGILAPRVRSIYDVIGLQPLARVLISEFVEGDPLSEVWDDLDDTQKSNIKNQLREQIACMRACTQSFIGRVNNQHFRNVYDRLPQMYCGPFADEEEFDKWCLARIDNRLSR

SEQ ID NO: 28210 - DNA, 412 bp, Muscodor strobelii
  misc_feature: SGI EST ID NO. CUFF.66565.0
  misc_feature: Variant of the nucleotide sequence at SEQ ID NO 28208
ccaacaatcaatcactctgcctcactaaaaaaaacataaagcactcagtcttttggtttgctcccgacattctacgccggactgcaaaaatgcaaaggctcttccgcaattgcgtcaattctctctacaaatggacccttcaccgatgacagagccggcaacgtacaagctaccctctctgcgtcgcatgggctacgttgacgctgtccaaggcgacgatgtctataacttcttcggcaacagagttgtcgagcatgtcaccaagtccagcgaagtactcgctatcaaagtaaagccatcagaaggaatggaccgttctgaaggggacatgatgcattatgcagcaacacatggtatcttggcaccccgcgtaaggagcatttatgatgtgatcggcctacaaccactcgcg

SEQ ID NO: 28211 - DNA, 7707 bp, Muscodor strobelii
  misc_feature: SGI cDNA ID NO. 569678
  misc_feature: Encodes the peptide sequence at SEQ ID NO 28212
atggagccgattgccatcgtcggaaaggcgtttagattgccacagggtgtagataacgacaccaagctctggagcttacttgaagccgccggaaatgtgaagacaccatggccagactcaaggatcaatatagatgcgttttatcaccctgatggtagtaggagtaacacattgagatcgagggaaggctgtttcctgaaagacgacctggcttcgttcgacgccccttttttctccattccctcaaacgaagctgccgccatggacccacagcagcgcttgctgctcgaagtcgcttatcatgctatcgaggacgccgggattccagtagagaacctggcaggctcgcgaactggggtcttcgcagggagtatggaaagtgactatctccgacaggtatccagagatccagatggagcacctcagatggttgctacgggtatctcaagctctctcctggctaatagactgagttggtacttcgacctacaagggcccagcatccagctcaatactgcgtgttcttcaagtctgacggccatggatattgcttgccagtcgctccgcaatggccagatttctacggctctggtagccgggtcaagcctgtacctgaaccccgagatgtcagtctatctttctaatatgaacatgctttcgccggatggatgctgctacagctttgaccatcgcgcgaacggttatggtaggggagagggaatcatcgtcatcgtgctcaagaccctgtccgcagcgatcaaggacggtgatcggattcgagccgtcgtacggggcatcgggtctaaccaagacggacgtactccgggaatcactcagccgagttctgcctctcaggagaagcttatcaaacaggtctaccagagttcaggtctagatgttaagtctactcgctatgttgaagcacacggtactgggacgcagattggagacgccactgaggcaaaggctcttgggaatgtcttcagaagtgccaggactgctcatgctcccctctacatcggctcgatcaaagccaacatcggacacctagaaggtggcagcgggctagctggtattctgaagtgtctactggttttggaaaaggggctcatccctccaagcgcactctttgagaagctgaaccccaagatcaatgccaagagggaccgtattcaagttccaactttgggcactccatggccttgcgatggactccgaagggtttcgatcaattctttcggcttcggtggatccaatgcccatgttatcttagacgacacacatcatacactagaaacgatcaacttcaacagtcaagtcaaggatctacatttttctctctcttcacccttgttgaatggaacatcgggaaacgaacatagacatcacaatcacagtacaaatagcgtccatgtttttgaagagactgtcagtgcacttccgggacaaccactgaccaatggtgatattcactattccaacgggacacacagacctcttgagtatcaactgctcatttattcggcgcgagatgaagcagctttgaagcgcatgatacagcagtacgcagagtactatgacaagatcgcgaaaggttcagaaagtaagctacggagcttagcttatacactcgctgcgcgccgaagcttgatgggttggcgatcatttgtcgtagcgagccttaatccatcacctgaagagacaaacctggcccaatgggaatgcgtgcgttcgtcttcggcgagacagatagcgtttgttttcactggccaaggagcccagtatcccgaaatgggactacacctggtccagtattcggtcttcctatcagcgttgaagaaagctgatagtgtgttccaatctttaggagcagattggtcactatttgacaagcttgaagacaccaccaccattaaccaaccggccttcagtcaggctttatgtactgctttacagctagcccttgtagagctactgaagagcttgaatatcagaccgattgcagtcgtcggtcactcgtccggggagattgccgccgcatatactgctggggctatatctttcagatcagcttgcattatcgcctaccacagagggagattgagctcccaactggcgaattctacgacgacacctggcgctatgctctcggtcaatgtccgggaaagagatgtccaggtgcatgcaaatgaggccttgccaggggagaacattcaagttgcatgcgtgaacagcccctataatgtcaccttagcaggattggaagttcatatcgacagactcaaagcctacttcgatagtattgggatattctgccagaagctgaacacaggtatcgcctatcattcccaagcgatgcaagagatacgtgccgactatctgtcatctcttggttctctcgatacttttgtccagagcgacagtaaggtgttgatgatctcgtctctcaccggtaagcaggctacttcacatcaactttcaaccgcacaatattgggttgacaatttgacgtcctccgtacggttcgtcgacgcactgcaatatcttgctcaggcagctcccaggctagacgggatcaaagccatctctgatttcgttgaggtcggacctcacggcgcgttgcgacggccagtcaacgataccctgacagacactctgaaagggtcagagtacaaataccactccgtgctatctcgatttcacccagcggcgaagaccttgatggaaacagttggtagtctattctcacgtgggtatcctgtgtctctaacctcggtcaaccaccacgaagatgcgaactacccgcctcgattatccgctgatgcgccacaatatccattcgatcactcccgccaatattggcatgagagccgccttagtcgcgactggcgcttgcgagggtgtgccccaagggatgttttagggacgaggtcattcgactggaatccccttgaaccaagatggcgacagctactgagtataaaggaaatgccgtggattgccgatcacgtcgtcgatggtgtggttgtttttccggctgcagggacactagccatggccatagaggccgttaaccagacgttgtcatctgaacaggccatttcagcttttctcatcaaggaaggaacattctcgaatccaatctttgttaaggaagggcagaagaaagaggtccagacacagctgcggagcatacaagcttcctatgagaggtcatcgttgcgcttcgaagtcactgtgtcttcaatgaatgaagagggctggactgaatgtttcggaggaatcatacacgccatcatcgcccctggctcgaacgaggttgatgggggagccgaggacttggctaggaggaaggcatccaaacaatgctatgaacgagccagtctgtcgtgcacaaagcgtatcgacaagggcgcgttctacaagggactcgcaaagcagcatcttgaatatggagaggcgtttgccctggcagaagacatatcctgggacggggaagaggtgtgcatagctcgagtcaatgtcaccgacccgtccaaggcgtaccaaggagctgtgcatcccgcaattctcgatacctgcctacatctatgttctgtggcaccatcgaaagggatgtcaagcttcgtgggcacatttatcccccatcgggtacgagatatgtgtatttctgcctctggatggcagtatccacagacggaaacgatccggatacaaaccgaagccaaactgaacacgtcctctacaggggtcattgcttctatacttgttctttcggatgattcgtctgtcttgtgtgatgcaaagagggttgagatggcttctgttgctaataataaagatctcgtcgatgaatctccaaggaagctccttcattccattgagtggaagccgcatctgtcttttctcagccagagacaactgcctgatttgtgcgacgccgatagatttgacgacgacgagtcagccgcgagcgagtataatatccgattagacactgcacttctcacttatcttcaccgaaatctgggacggtttcaagtgctagttggtccccagacgccaccacatatcaagcacttcgtctcttggattgagaggcagttactgatagatcacgctagaaatctcgatcttgagttgggagacgagtctcttgccgccgaacttgaagctctaattgtggccaaaccagcttggagactcttcgttgaagtggcaagggctcttgaatcgatcatactaggtgaaacgaatccacttgagcttctattctcaactcccttggcgcaagatctatacaacgaattcttcgagcgcacatgtaatcacaaattcgaagcttatctccaattggctgcacataagacgcccgatcagagggtattggaagtcggcgccggcactggcggctggacgaaagagattctctcggtcctgcagagcatagaggatcgtacgggcgggacggcgtttagcgagtatgcgtatacagatatatctcctgcttactttgaaagcgcccggcaaaagttctcccagtaccaaccgcgcatgagttttaaagccctggatctcgagcgagatatcacgactcagggcttagagccaggttcttatgacatgatcttagctggtagcgtactacacgcgaccaaaaacctatccgccaccctgcagaacttgcgacaagctttaaggccaggcggccaactagtcatccaggagacaacggcgccagactgctttactatgagctttggcttcggaatcctgcctggttggtgggccgctgaagaagagttccgaacctggtgcccaactgtcaccgaagacgaatggggttcgttattgcgtgataacggattctcgggcaatgacttggtaattcgagattacaaggacgacgacgctcactggatgagcatcatggtttcctcagtcaccacttcagcagatccaatgacagggtgtaggagaatatatatagtcacagatggccaacatgagacccaggctgaattggccgggactctgaaagacaggttgtcacattcaccggcgcagcatgtcatatcgatcacgatgtctcacataatagatgtcaacttagaatctaacgacctgatactattactcgcagatctcgacaaccacctactcgccgacccttcggatgagatatttaaacaaattcagtggctcgtacagcattcaacgcaactactttggttgacatcatccgctatcgaacaagaatcctacccctatacagctatcaaagatggtttcctccgcgttctgaggtcagaaagcgaggggaagaaactcgtctctctttccctcgagcatgaagactacacagcttgcatcgagcagatagtccaagtattcgaattggccttcgagacgcatatgccagattgcgagtacattctacgagacggccacatccaaacaggtcgccttatcgaaaaagtcaaccaaaacaacgacctcaacgcttcaatcgttccgcaagctagtcgcggaccttggctcccgggtcctcccctgaagtttgacgtcgcaacccgaggatcgcttgacactttacgtttcgtagaagatcacgatcaatacaaggagctcggcctgagggaggtcgaggtcgaggttaaggcgtggccgctcggattccgcgacgtctttagcgccctgggccgcatagacgagaatgagttcggcactgactacgcgggggttgtcactcgagtaggcccgcaatgcaccgcactccgtcctgggaaccgagtctgtgggtcgtacctcgggtgcatgcggacgtacatgcgggcctcagaggcggatctcctaaccgtccctgagtccctcacgctggaagaggcctgtagtataatcaaccccggcatgaccgcatggtactcactcgttgacgtggctcgcctgaagaaaggagaaaaggttcttgtccattcaggctccgggtcgaccggccagctttgcattcaaatcgccaaaatgatcggggccgatgtctacgcgacagtggggtacgatcacaagaaacagcagttgatcgacgactacgatatcccgtcatcacatatcttttatagtcgagacttgagcttcgcatctggaatcatgcgagtgacggaagggtacggtgtggacgtcgtggtgaactcgctaacaggggagggcttacgcgcatcgtgggagtgtatcgctccgtttggacgcttcatagagataggcaaggccgacatcaacgctaacacgcctctgccgatggcatccttcgctcacaatgtaacatttgccgcagtcgacctccgcgatttcttctaccgaaacatgaaactcgcgagagaggtgttcttcaccgtcatggaccttgctcaaaatggatcgatcacgagtccaaagccaattaatgtcttctccgtttcggctatcgaggaagcgtttcgctacatgcaaagtgggaaacacatggggcggattgtgattcaaaccgagcgctctgcggaggtcccgaaatatctcaagtacgagaagtcatggatcttccatgagaatgcaagctaccttgtcgccggagggttgggtagtgttgggcgggcgatcatccgatggatggcaacgaagggcgtaaagcacgttattgttccctcacgatccggagccgcatccgaggaagcaaaacaaatcttgcaggaactcgttaagattggcgtcgatgtcgccacgcctcagtgcgacgtgtccgacgcgctcagcctccagcatcttctagaacaacacgccatcaccggacgtgctattagagggtgtattaatgcatcaatggttctccaggatgcagtcttcgagaacatgaacaacgcccaatggaagaccacaatccgctccaaagtccagacctcatggaatcttcacaagcatctcccccgcgatctcgattttttcgtcctactatcctccatatccggcgttggcgggaacccaggccagtccaactacgccgccggctgcacgtttcaagacgccctagcactgcaccgcacccatcggaagcagcggggcgtgtctctcgacatcggagccatacgagacaccggtgtagtggcggagaatcacgtaaagatgtcgcttcagaagttcgttggcgaagctcgcattgaagaggaagacctgctctcgcttctcaacatcgtctgtgcgccagactacttctcgccagagaccaacagcaagagtcagatcacaatcggcctacctacgcccgcagaactcgcacgccagggtcatggcgcgcttctggagcacctacaccgatcgcttttcgcctattttggtcaggaccacggaccaccgagcggcactagtggcgtatcgagcgctgacaagcctgggactctgttcagagaggccgagacaggccaagagcgggccaaagttgttgtcgagtcgctggtaagcaaggtagctcgctctatttctgtggacgccaaagatatggatgatactaagccactgcacctgtatggtgttgattcactcgtagctgttgagatccggaattggatcgccaaggagttctctgctgatgtagctgtcttcgagttgatgagcggtaagactattttggctatcggtgagcttgtgagtgagacgagcaaattgcgaaagccagagtga

SEQ ID NO: 28212 - protein, 2568 aa, Muscodor strobelii
  misc_feature: SGI Peptide ID NO. 569678
  misc_feature (585)..(921): Pfam Id: PF00698 Pfam Desc: Acyl transferase domain
  misc_feature (2196)..(2362): Pfam Id: PF00106 Pfam Desc: short chain dehydrogenase
  misc_feature (1985)..(2137): Pfam Id: PF00107 Pfam Desc: Zinc-binding dehydrogenase
  misc_feature (2)..(252): Pfam Id: PF00109 Pfam Desc: Beta-ketoacyl synthase, N-terminal domain
  misc_feature (260)..(378): Pfam Id: PF02801 Pfam Desc: Beta-ketoacyl synthase, C-terminal domain
  misc_feature (2196)..(2375): Pfam Id: PF08659 Pfam Desc: KR domain
  misc_feature (1463)..(1574): Pfam Id: PF08241 Pfam Desc: Methyltransferase domain
  misc_feature (1463)..(1572): Pfam Id: PF08242 Pfam Desc: Methyltransferase domain
  misc_feature (4)..(2558): NCBI GI: 256727768 Blast Desc: NECHADRAFT_46230 [Nectria haematococca mpVI 77-13-4]
  misc_feature (2)..(2558): NCBI GI: 145607551 Blast Desc: MGG_12214 [Magnaporthe grisea 70-15] gi|145015078|gb|EDJ99646.1| MGG_12214 [Magnaporthe grisea 70-15]
  misc_feature (1)..(2566): NCBI GI: 40806899 Blast Desc: polyketide synthase [Gibberella moniliformis]
  misc_feature (1)..(2564): NCBI GI: 46118226 Blast Desc: FG04694.1 [Gibberella zeae PH-1]
  misc_feature (1)..(2568): NCBI GI: 146322741 Blast Desc: polyketide synthase [Aspergillus fumigatus Af293] gi|129556779|gb|EAL87227.2| polyketide synthase, [Aspergillus fumigatus Af293]
  misc_feature (1)..(2568): NCBI GI: 159128679 Blast Desc: polyketide synthase, [Aspergillus fumigatus A1163]
  misc_feature (1)..(2568): NCBI GI: 119497865 Blast Desc: polyketide synthase, [Neosartorya fischeri NRRL 181] gi|119413854|gb|EAW23793.1| polyketide synthase, [Neosartorya fischeri NRRL 181]
  misc_feature (1)..(2566): NCBI GI: 238501530 Blast Desc: polyketide synthase, [Aspergillus flavus NRRL3357] gi|220692236|gb|EED48583.1| polyketide synthase, [Aspergillus flavus NRRL3357]
  misc_feature (3)..(2568): NCBI GI: 121711140 Blast Desc: polyketide synthase, [Aspergillus clavatus NRRL 1] gi|119401336|gb|EAW11760.1| polyketide synthase, [Aspergillus clavatus NRRL 1]
  misc_feature (1)..(2566): NCBI GI: 169769096 Blast Desc: [Aspergillus oryzae RIB40] gi|83766876|dbj|BAE57016.1| protein product [Aspergillus oryzae]
  misc_feature: Useful for fungicidal and/or biocontrol applications
MEPIAIVGKAFRLPQGVDNDTKLWSLLEAAGNVKTPWPDSRINIDAFYHPDGSRSNTLRSREGCFLKDDLASFDAPFFSIPSNEAAAMDPQQRLLLEVAYHAIEDAGIPVENLAGSRTGVFAGSMESDYLRQVSRDPDGAPQMVATGISSSLLANRLSWYFDLQGPSIQLNTACSSSLTAMDIACQSLRNGQISTALVAGSSLYLNPEMSVYLSNMNMLSPDGCCYSFDHRANGYGRGEGIIVIVLKTLSAAIKDGDRIRAVVRGIGSNQDGRTPGITQPSSASQEKLIKQVYQSSGLDVKSTRYVEAHGTGTQIGDATEAKALGNVFRSARTAHAPLYIGSIKANIGHLEGGSGLAGILKCLLVLEKGLIPPSALFEKLNPKINAKRDRIQVPTLGTPWPCDGLRRVSINSFGFGGSNAHVILDDTHHTLETINFNSQVKDLHFSLSSPLLNGTSGNEHRHHNHSTNSVHVFEETVSALPGQPLTNGDIHYSNGTHRPLEYQLLIYSARDEAALKRMIQQYAEYYDKIAKGSESKLRSLAYTLAARRSLMGWRSFVVASLNPSPEETNLAQWECVRSSSARQIAFVFTGQGAQYPEMGLHLVQYSVFLSALKKADSVFQSLGADWSLFDKLEDTTTINQPAFSQALCTALQLALVELLKSLNIRPIAVVGHSSGEIAAAYTAGAISFRSACIIAYHRGRLSSQLANSTTTPGAMLSVNVRERDVQVHANEALPGENIQVACVNSPYNVTLAGLEVHIDRLKAYFDSIGIFCQKLNTGIAYHSQAMQEIRADYLSSLGSLDTFVQSDSKVLMISSLTGKQATSHQLSTAQYWVDNLTSSVRFVDALQYLAQAAPRLDGIKAISDFVEVGPHGALRRPVNDTLTDTLKGSEYKYHSVLSRFHPAAKTLMETVGSLFSRGYPVSLTSVNHHEDANYPPRLSADAPQYPFDHSRQYWHESRLSRDWRLRGCAPRDVLGTRSFDWNPLEPRWRQLLSIKEMPWIADHVVDGVVVFPAAGTLAMAIEAVNQTLSSEQAISAFLIKEGTFSNPIFVKEGQKKEVQTQLRSIQASYERSSLRFEVTVSSMNEEGWTECFGGIIHAIIAPGSNEVDGGAEDLARRKASKQCYERASLSCTKRIDKGAFYKGLAKQHLEYGEAFALAEDISWDGEEVCIARVNVTDPSKAYQGAVHPAILDTCLHLCSVAPSKGMSSFVGTFIPHRVRDMCISASGWQYPQTETIRIQTEAKLNTSSTGVIASILVLSDDSSVLCDAKRVEMASVANNKDLVDESPRKLLHSIEWKPHLSFLSQRQLPDLCDADRFDDDESAASEYNIRLDTALLTYLHRNLGRFQVLVGPQTPPHIKHFVSWIERQLLIDHARNLDLELGDESLAAELEALIVAKPAWRLFVEVARALESIILGETNPLELLFSTPLAQDLYNEFFERTCNHKFEAYLQLAAHKTPDQRVLEVGAGTGGWTKEILSVLQSIEDRTGGTAFSEYAYTDISPAYFESARQKFSQYQPRMSFKALDLERDITTQGLEPGSYDMILAGSVLHATKNLSATLQNLRQALRPGGQLVIQETTAPDCFTMSFGFGILPGWWAAEEEFRTWCPTVTEDEWGSLLRDNGFSGNDLVIRDYKDDDAHWMSIMVSSVTTSADPMTGCRRIYIVTDGQHETQAELAGTLKDRLSHSPAQHVISITMSHIIDVNLESNDLILLLADLDNHLLADPSDEIFKQIQWLVQHSTQLLWLTSSAIEQESYPYTAIKDGFLRVLRSESEGKKLVSLSLEHEDYTACIEQIVQVFELAFETHMPDCEYILRDGHIQTGRLIEKVNQNNDLNASIVPQASRGPWLPGPPLKFDVATRGSLDTLRFVEDHDQYKELGLREVEVEVKAWPLGFRDVFSALGRIDENEFGTDYAGVVTRVGPQCTALRPGNRVCGSYLGCMRTYMRASEADLLTVPESLTLEEACSIINPGMTAWYSLVDVARLKKGEKVLVHSGSGSTGQLCIQIAKMIGADVYATVGYDHKKQQLIDDYDIPSSHIFYSRDLSFASGIMRVTEGYGVDVVVNSLTGEGLRASWECIAPFGRFIEIGKADINANTPLPMASFAHNVTFAAVDLRDFFYRNMKLAREVFFTVMDLAQNGSITSPKPINVFSVSAIEEAFRYMQSGKHMGRIVIQTERSAEVPKYLKYEKSWIFHENASYLVAGGLGSVGRAIIRWMATKGVKHVIVPSRSGAASEEAKQILQELVKIGVDVATPQCDVSDALSLQHLLEQHAITGRAIRGCINASMVLQDAVFENMNNAQWKTTIRSKVQTSWNLHKHLPRDLDFFVLLSSISGVGGNPGQSNYAAGCTFQDALALHRTHRKQRGVSLDIGAIRDTGVVAENHVKMSLQKFVGEARIEEEDLLSLLNIVCAPDYFSPETNSKSQITIGLPTPAELARQGHGALLEHLHRSLFAYFGQDHGPPSGTSGVSSADKPGTLFREAETGQERAKVVVESLVSKVARSISVDAKDMDDTKPLHLYGVDSLVAVEIRNWIAKEFSADVAVFELMSGKTILAIGELVSETSKLRKPE

SEQ ID NO: 28213 - DNA, 2929 bp, Muscodor strobelii
  misc_feature: SGI EST ID NO. CUFF.66581.0
  misc_feature: Variant of the nucleotide sequence at SEQ ID NO 28211
tatagtcacagatggccaacatgagacccaggctgaattggccgggactctgaaagacaggttgtcacattcaccggcgcagcatgtcatatcgatcacgatgtctcacataatagatgtcaacttagaatctaacgacctgatactattactcgcagatctcgacaaccacctactcgccgacccttcggatgagatatttaaacaaattcagtggctcgtacagcattcaacgcaactactttggttgacatcatccgctatcgaacaagaatcctacccctatacagctatcaaagatggtttcctccgcgttctgaggtcagaaagcgaggggaagaaactcgtctctctttccctcgagcatgaagactacacagcttgcatcgagcagatagtccaagtattcgaattggccttcgagacgcatatgccagattgcgagtacattctacgagacggccacatccaaacaggtcgccttatcgaaaaagtcaaccaaaacaacgacctcaacgcttcaatcgttccgcaagctagtcgcggaccttggctcccgggtcctcccctgaagtttgacgtcgcaacccgaggatcgcttgacactttacgtttcgtagaagatcacgatcaatacaaggagctcggcctgagggaggtcgaggtcgaggttaaggcgtggccgctcggattccgcgacgtctttagcgccctgggccgcatagacgagaatgagttcggcactgactacgcgggggttgtcactcgagtaggcccgcaatgcaccgcactccgtcctgggaaccgagtctgtgggtcgtacctcgggtgcatgcggacgtacatgcgggcctcagaggcggatctcctaaccgtccctgagtccctcacgctggaagaggcctgtagtataatcaaccccggcatgaccgcatggtactcactcgttgacgtggctcgcctgaagaaaggagaaaaggttcttgtccattcaggctccgggtcgaccggccagctttgcattcaaatcgccaaaatgatcggggccgatgtctacgcgacagtggggtacgatcacaagaaacagcagttgatcgacgactacgatatcccgtcatcacatatcttttatagtcgagacttgagcttcgcatctggaatcatgcgagtgacggaagggtacggtgtggacgtcgtggtgaactcgctaacaggggagggcttacgcgcatcgtgggagtgtatcgctccgtttggacgcttcatagagataggcaaggccgacatcaacgctaacacgcctctgccgatggcatccttcgctcacaatgtaacatttgccgcagtcgacctccgcgatttcttctaccgaaacatgaaactcgcgagagaggtgttcttcaccgtcatggaccttgctcaaaatggatcgatcacgagtccaaagccaattaatgtcttctccgtttcggctatcgaggaagcgtttcgctacatgcaaagtgggaaacacatggggcggattgtgattcaaaccgagcgctctgcggaggtcccgaaatatctcaagtacgagaagtcatggatcttccatgagaatgcaagctaccttgtcgccggagggttgggtagtgttgggcgggcgatcatccgatggatggcaacgaagggcgtaaagcacgttattgttccctcacgatccggagccgcatccgaggaagcaaaacaaatcttgcaggaactcgttaagattggcgtcgatgtcgccacgcctcagtgcgacgtgtccgacgcgctcagcctccagcatcttctagaacaacacgccatcaccggacgtgctattagagggtgtattaatgcatcaatggttctccaggatgcagtcttcgagaacatgaacaacgcccaatggaagaccacaatccgctccaaagtccagacctcatggaatcttcacaagcatctcccccgcgatctcgattttttcgtcctactatcctccatatccggcgttggcgggaacccaggccagtccaactacgccgccggctgcacgtttcaagacgccctagcactgcaccgcacccatcggaagcagcggggcgtgtctctcgacatcggagccatacgagacaccggtgtagtggcggagaatcacgtaaagatgtcgcttcagaagttcgttggcgaagctcgcattgaagaggaagacctgctctcgcttctcaacatcgtctgtgcgccagactacttctcgccagagaccaacagcaagagtcagatcacaatcggcctacctacgcccgcagaactcgcacgccagggtcatggcgcgcttctggagcacctacaccgatcgcttttcgcctattttggtcaggaccacggaccaccgagcggcactagtggcgtatcgagcgctgacaagcctgggactctgttcagagaggccgagacaggccaagagcgggccaaagttgttgtcgagtcgctggtaagcaaggtagctcgctctatttctgtggacgccaaagatatggatgatactaagccactgcacctgtatggtgttgattcactcgtagctgttgagatccggaattggatcgccaaggagttctctgctgatgtagctgtcttcgagttgatgagcggtaagactattttggctatcggtgagcttgtgagtgagacgagcaaattgcgaaagccagagtgatgggtggagaattggagtgtttcactagcgggtaggctgcatgagaaaggggtgtcgatcttgcgcgttgcgcttgacgtcgagtagaaaagggggtatttttgtatctagaagcggagcacatcttgaagcgaaacataagttagacgggcgtcttgatatctgatattgctacctcattaccattatgtttaacatatttgattt

SEQ ID NO: 28214 - DNA, 1455 bp, Muscodor strobelii
  misc_feature: SGI cDNA ID NO. 569679
  misc_feature: Elevated expression when VOC is produced
  misc_feature: Encodes the peptide sequence at SEQ ID NO 28215
atgggcagctacgaggagaacccagatttcgctaaggcgaatacgcttgtcaaacatatccgctcacaacagcttcaacagaaaacaaccaagaaaaatcagccgatattctttcgcaatcttcaggatgcgctcgacgcccgtcggagcacccaaagtctcttctctcttgtcgacaacaactggcagacgaaaaatgccgtcgacttctgttctaacgattatctctcctggaactctaccggtctcatccgggagcgcttccttaccgaactcaaccgccatcccgacttcaatgtcgctgctggtggctcgagagtcatggaaggcaactatccttacatagaagagactgaggtagagatcgccctggctcacggagctgaggcgggtctactgacgagttccgcattcgacgccaacgtcatgatatggaccgccctaccacgacctggcgatgccatcgtctacgatgccttggttcatgctagtacacacgagggtatggaccgcagtctcgcgattcaaaaaactgacttcaagcacaacgacgtcgattcattccgagaaacgttgctctccatactggactctcagccactcgtcagacaaggcagacgctctatcctcgtagctgtggagtccatctatagtatggagggcgacgtctgccctcttcaagaactgcttgacgtcgcagaagaaatctcgccgggccatggcaatattcagttcgtcgtagacgaaacgcatagcaccgggcttttcggccctaatggctatgggcttgtttgtgatctggccttgcaagatgaaattgcggtgcgggtgcataccttttcgaaagcaatgggggcttgtggaggtatcatacttggttcagaaactatcaagagtgctattgtcaacttttcgcggcccccagtgtactcttcatcattgccgtttccatttgttgcagctatcagagctgggcacagactcctagacgatccaaaggtggcagagagccaggagaaaatacaatctcttgccgggagtttcttcgaagctttgacgtcacatcctctctggcgaacggcgcgagaaaaaggcgtcctcgcagttccgctggctgctgattgggaagaacgcacgttcttgacacatatagttgtattatggactcgacagaggtatctctattggctgtatctccacttgctgtcttgctcattctacgtgctgcctgtcaagcatcccatcgttcccgtcggcgagagtcgtatcaggatcacctttcacgccgagaacagtactgaacaggttctcgctctggtagatgagattttcaattgggtagcggaggtcatgacaattgaacggggcgaaacatcacagaaggtcacgaaggcggccgggacagtctacgcatggatgaaacaggagggattggagggtttcggcatgccttga

SEQ ID NO: 28215 - protein, 484 aa, Muscodor strobelii
  misc_feature: SGI Peptide ID NO. 569679
  misc_feature (65)..(443): Pfam Id: PF00155 Pfam Desc: Aminotransferase class I and II
  misc_feature (121)..(354): Pfam Id: PF00155 Pfam Desc: Aminotransferase class I and II
  misc_feature (16)..(473): NCBI GI: 121714881 Blast Desc: aminotransferase, [Aspergillus clavatus NRRL 1] gi|119403206|gb|EAW13624.1| aminotransferase, [Aspergillus clavatus NRRL 1]
  misc_feature (16)..(473): NCBI GI: 70998869 Blast Desc: aminotransferase [Aspergillus fumigatus Af293] gi|66851793|gb|EAL92118.1| aminotransferase, [Aspergillus fumigatus Af293] gi|159127174|gb|EDP52289.1| aminotransferase,
  misc_feature (16)..(473): NCBI GI: 119490158 Blast Desc: aminotransferase, [Neosartorya fischeri NRRL 181] gi|119411152|gb|EAW21095.1| aminotransferase, [Neosartorya fischeri NRRL 181]
  misc_feature (16)..(483): NCBI GI: 256723458 Blast Desc: NECHADRAFT_42251 [Nectria haematococca mpVI 77-13-4]
  misc_feature (32)..(480): NCBI GI: 145244068 Blast Desc: An11g05560 [Aspergillus niger] gi|134079230|emb|CAK40713.1| protein product [Aspergillus niger]
  misc_feature (22)..(448): NCBI GI: 154291955 Blast Desc: BC1G_14280 [Botryotinia fuckeliana B05.10] gi|150846381|gb|EDN21574.1| BC1G_14280 [Botryotinia fuckeliana B05.10]
  misc_feature (32)..(475): NCBI GI: 121703335 Blast Desc: class II aminotransferase/8-amino-7-oxononanoate synthase [Aspergillus clavatus NRRL 1] gi|119398075|gb|EAW08506.1| class II synthase [Aspergillus NRRL
  misc_feature (32)..(453): NCBI GI: 115433306 Blast Desc: [Aspergillus terreus NIH2624] gi|114189642|gb|EAU31342.1| [Aspergillus terreus NIH2624]
  misc_feature (27)..(476): NCBI GI: 261354426 Blast Desc: 8-amino-7-oxononanoate synthase [Verticillium albo-atrum VaMs.102]
  misc_feature (36)..(449): NCBI GI: 145245850 Blast Desc: An12g00920 [Aspergillus niger] gi|134079890|emb|CAK41022.1| protein product [Aspergillus niger]
  misc_feature (70)..(448): SWISSPROT Homolog: EC 2.3.1.37 5-aminolevulinate synthase
  misc_feature: Useful for introducing or modulating the production of volatile compounds
MGSYEENPDFAKANTLVKHIRSQQLQQKTTKKNQPIFFRNLQDALDARRSTQSLFSLVDNNWQTKNAVDFCSNDYLSWNSTGLIRERFLTELNRHPDFNVAAGGSRVMEGNYPYIEETEVEIALAHGAEAGLLTSSAFDANVMIWTALPRPGDAIVYDALVHASTHEGMDRSLAIQKTDFKHNDVDSFRETLLSILDSQPLVRQGRRSILVAVESIYSMEGDVCPLQELLDVAEEISPGHGNIQFVVDETHSTGLFGPNGYGLVCDLALQDEIAVRVHTFSKAMGACGGIILGSETIKSAIVNFSRPPVYSSSLPFPFVAAIRAGHRLLDDPKVAESQEKIQSLAGSFFEALTSHPLWRTAREKGVLAVPLAADWEERTFLTHIVVLWTRQRYLYWLYLHLLSCSFYVLPVKHPIVPVGESRIRITFHAENSTEQVLALVDEIFNWVAEVMTIERGETSQKVTKAAGTVYAWMKQEGLEGFGMP

SEQ ID NO: 28216 - DNA, 4079 bp, Muscodor strobelii
  misc_feature: SGI EST ID NO. CUFF.66734.0
  misc_feature: Variant of the nucleotide sequence at SEQ ID NO 28214
gcaaggttatttcattggctgcgtctaattgtctccccgatagtatcgttcaaatagttgttacatttggcaatgctcggcattgaacatttcaatcaaatgggcatgcaaaggagtacaaaacattcgtccgagccaccagagtcatcaaatctttttggtttagatattgcggtttaaaacttcattgcacttgcgtgtataaggaagcagagcaatgtgagttgatacgatgtgacaactaatactaaggcagactcgtccttttcgatattgatctgcatagctgaaggatccgacaatccaacgtcagctccaaaatgtaaccccaaccccaaccgcctacacaataccctctttgcggtcgtatatggccaagttaggggcctgaaagcttcacgtcgcagagccagagccagaggcagaagcggtatttgtggattcatgcacgtcgtcgttttcattctcgcccgacgtcgtacgctccacttgactgggtgtgctatccttacccaatgtggttcccacggagatcatatcgtgcgtctccaaatcagtgatctcccagagcccacgacgccgccggctcttcggcttgtaaaactgccatgcttcgggcgagagcacggaattggaccgaccccgagaccagagcgaatggaagtatgaagccatcctatccgacaggggtagcatcttgaacactcgtggaaaagctgggattcccatgatcagaaatcccgtcgtcagctctagtatactccaaaggccaacgcccgagaagacgtatacaacatcatcgttcgacaggagttggatgaagtacacgagacgcacgacgccaaaaacccacgcactatttgtatgatggttagttagccccgagacactaggcgcaaagcgtaggtgaaagatgtggaagtaccacctacccaactcctattacgaagaggaaagatatgccccattttctagcacgtgacatctggagtttccagatgatccattggggggcggccaatatcacactgtccgagagaaagttgagaacgctcgtagcgatgttctgaccgttgatatcgatggtgcataccccaccttcgaaaaaggggtcccagatcttctgtcgcggggtgcagcggaagatctccgttactgtcgtaatcaggtaaaaaacaatgttagaccagagcaggccgtgaagaatccaaaagaaagctccacgtgtacccttgggcacgaagatccgcaaccagttgaccaaaatggaaactttgatgaggcatgaaataggaccgtagaaaacagctcccaaatgcacgtcctagactgagtcagcgctagttgcattcatcactacgaagattaccatagccactcacgtagagatagtgtgacaggaatccattttgcacgttccactgatgcgcccagaatcccgggtaaatcgacaggtcgtatgaaatgtacactatgccgccgaagataccctggcatctgttagcctgcctcgatctcgtttcattgcacgtgtttctggattgtgcgtgtgattgtgacacagcataccaatgctgccagaagaagtacatcttccagctgaatctctcgcctgctaaaaccgctggcaaatcgagccagaactgctccagccgaaatcgcggacgttgagatcagaattgcatatccatattcatgccaaccgccggtgttaacaaagtctggaataacgccgggaggcgggtccaaggcaggcgactgcaggaaggactcattcatggcaggcagaccgaatatctatctcaggtggcctcaagatattggagcatcggtgcatgtgctgcgtgaggcccgaggagggggaaggaatgaggggaagacttgaaatgaatcttgcaaccacgccactatactgcatgtgttgtacactatgccccagaaccatcagctaagaaagcgcatagtttcaagcccctatgaaggattgcagatgctcttaagctctcctacaaactgggctgcagcgcctctctcagttctccaatcactcctacggccggttattggcgcttgagcctgtcactatttatggatgaagcattgctacactagttgccaaaaaacaaccaagaaaaatcagccgatattctttcgcaatcttcaggatgcgctcgacgcccgtcggagcacccaaagtctcttctctcttgtcgacaacaactggcagacgaaaaatgccgtcgacttctgttctaacgattatctctcctggaactctaccggtctcatccgggagcgcttccttaccgaactcaaccgccatcccgacttcaatgtcgctgctggtggctcgagagtcatggaaggcaactatccttacatagaagagactgaggtagagatcgccctggctcacggagctgaggcgggtctactgacgagttccgcattcgacgccaacgtcatgatatggaccgccctaccacgacctggcgatgccatcgtctacgatgccttggttcatgctagtacacacgagggtatggaccgcagtctcgcgattcaaaaaactgacttcaagcacaacgacgtcgattcattccgagaaacgttgctctccatactggactctcagccactcgtcagacaaggcagacgctctatcctcgtagctgtggagtccatctatagtatggagggcgacgtctgccctcttcaagaactgcttgacgtcgcagaagaaatctcgccgggccatggcaatattcagttcgtcgtagacgaaacgcatagcaccgggcttttcggccctaatggctatgggcttgtttgtgatctggccttgcaagatgaaattgcggtgcgggtgcataccttttcgaaagcaatgggggcttgtggaggtatcatacttggttcagaaactatcaagagtgctattgtcaacttttcgcggcccccagtgtactcttcatcattgccgtttccatttgttgcagctatcagagctgggcacagactcctagacgatccaaaggtggcagagagccaggagaaaatacaatctcttgccgggagtttcttcgaagctttgacgtcacatcctctctggcgaacggcgcgagaaaaaggcgtcctcgcagttccgctggctgctgattgggaagaacgcacgttcttgacacatatagttgtattatggactcgacagaggtatctctattggctgtatctccacttgctgtcttgctcattctacgtgctgcctgtcaagcatcccatcgttcccgtcggcgagagtcgtatcaggatcacctttcacgccgagaacagtactgaacaggttctcgctctggtagatgagattttcaattgggtagcggaggtcatgacaattgaacggggcgaaacatcacagaaggtcacgaaggcggccgggacagtctacgcatggatgaaacaggagggattggagggtttcggcatgccttgacttccaaaacatcttgataaaagtcaacgagcctttgcctaatctttgaagctcagtcggctacgacggctagtagcaaggtcataccaggctatacgccagcgctgatcagttgcatgtgtgtgtgcgacctcagtggtgatgaaccttccgcaaccacgtcaaatcccgtttccgtgaccaaatattttttatggcttggcgtagcatgaaattatcgtggaaccttgttgcaggttcgtctcccgagaacgccggaaacacaccctcagatgccgatgaattgagaaataggagccgaatagcttgctacgctgaccgtaaatctggccgccttcagaaagactgtgcgcttcaaacgccagagcgacactgaacgaagagaacaatcaagtcacagtgttaggccacagttaacttacgtttaaaaagaactgataagagacgagcaaaatacgtcagaacgtagtaatagcacccggacagcgaagtgttcgcgctgcgaagtcagttacactgagacaaaagggcaaattctcttttctttttcttgtttctgtgtaaagttgtatacaataatactgca

SEQ ID NO: 28217 - DNA, 1170 bp, Muscodor strobelii
  misc_feature: SGI cDNA ID NO. 569680
  misc_feature: Elevated expression when VOC is produced
  misc_feature: Encodes the peptide sequence at SEQ ID NO 28218
atgaatgagtccttcctgcagtcgcctgccttggacccgcctcccggcgttattccagactttgttaacaccggcggttggcatgaatatggatatgcaattctgatctcaacgtccgcgatttcggctggagcagttctggctcgatttgccagcggttttagcaggcgagagattcagctggaagatgtacttcttctggcagcattgggtatcttcggcggcatagtgtacatttcatacgacctgtcgatttacccgggattctgggcgcatcagtggaacgtgcaaaatggattcctgtcacactatctctacgacgtgcatttgggagctgttttctacggtcctatttcatgcctcatcaaagtttccattttggtcaactggttgcggatcttcgtgcccaagggtacacgtggagctttcttttggattcttcacggcctgctctggtctaacattgttttttacctgattacgacagtaacggagatcttccgctgcaccccgcgacagaagatctgggacccctttttcgaaggtggggtatgcaccatcgatatcaacggtcagaacatcgctacgagcgttctcaactttctctcggacagtgtgatattggccgccccccaatggatcatctggaaactccagatgtcacgtgctagaaaatggggcatatctttcctcttcgtaataggagttggtgcgtgggtttttggcgtcgtgcgtctcgtgtacttcatccaactcctgtcgaacgatgatgttgtatacgtcttctcgggcgttggcctttggagtatactagagctgacgacgggatttctgatcatgggaatcccagcttttccacgagtgttcaagatgctacccctgtcggataggatggcttcatacttccattcgctctggtctcggggtcggtccaattccgtgctctcgcccgaagcatggcagttttacaagccgaagagccggcggcgtcgtgggctctgggagatcactgatttggagacgcacgatatgatctccgtgggaaccacattgggtaaggatagcacacccagtcaagtggagcgtacgacgtcgggcgagaatgaaaacgacgacgtgcatgaatccacaaataccgcttctgcctctggctctggctctgcgacgtga

SEQ ID NO: 28218 - protein, 389 aa, Muscodor strobelii
  misc_feature: SGI Peptide ID NO. 569680
  misc_feature (6)..(362): NCBI GI: 256727941 Blast Desc: NECHADRAFT_26479 [Nectria haematococca mpVI 77-13-4]
  misc_feature (6)..(383): NCBI GI: 46118221 Blast Desc: FG04693.1 [Gibberella zeae PH-1]
  misc_feature (6)..(290): NCBI GI: 212534224 Blast Desc: conserved [Penicillium marneffei ATCC 18224] gi|210069667|gb|EEA23757.1| conserved [Penicillium marneffei ATCC 18224]
  misc_feature (3)..(313): NCBI GI: 256731204 Blast Desc: NECHADRAFT_85215 [Nectria haematococca mpVI 77-13-4]
  misc_feature (34)..(330): NCBI GI: 16945439 Blast Desc: related to integral membrane protein PTH11 [Neurospora crassa]
  misc_feature (92)..(375): NCBI GI: 238489453 Blast Desc: conserved [Aspergillus flavus NRRL3357] gi|220698352|gb|EED54692.1| conserved [Aspergillus flavus NRRL3357]
  misc_feature (3)..(269): NCBI GI: 121706810 Blast Desc: ribosomal protein L36e, [Aspergillus clavatus NRRL 1] gi|119399784|gb|EAW10210.1| ribosomal protein L36e, [Aspergillus clavatus NRRL 1]
  misc_feature (2)..(313): NCBI GI: 145607555 Blast Desc: MGG_04339 [Magnaporthe grisea 70-15] gi|145015080|gb|EDJ99648.1| MGG_04339 [Magnaporthe grisea 70-15]
  misc_feature (16)..(300): NCBI GI: 169781106 Blast Desc: [Aspergillus oryzae RIB40] gi|83773758|dbj|BAE63883.1| protein product [Aspergillus oryzae]
  misc_feature (16)..(300): NCBI GI: 238500906 Blast Desc: conserved [Aspergillus flavus NRRL3357] gi|220691924|gb|EED48271.1| conserved [Aspergillus flavus NRRL3357]
  misc_feature: Useful for introducing or modulating the production of volatile compounds
MNESFLQSPALDPPPGVIPDFVNTGGWHEYGYAILISTSAISAGAVLARFASGFSRREIQLEDVLLLAALGIFGGIVYISYDLSIYPGFWAHQWNVQNGFLSHYLYDVHLGAVFYGPISCLIKVSILVNWLRIFVPKGTRGAFFWILHGLLWSNIVFYLITTVTEIFRCTPRQKIWDPFFEGGVCTIDINGQNIATSVLNFLSDSVILAAPQWIIWKLQMSRARKWGISFLFVIGVGAWVFGVVRLVYFIQLLSNDDVVYVFSGVGLWSILELTTGFLIMGIPAFPRVFKMLPLSDRMASYFHSLWSRGRSNSVLSPEAWQFYKPKSRRRRGLWEITDLETHDMISVGTTLGKDSTPSQVERTTSGENENDDVHESTNTASASGSGSAT

SEQ ID NO: 28219 - DNA, 3088 bp, Muscodor strobelii
  misc_feature: SGI EST ID NO. CUFF.66733.2
  misc_feature: Variant of the nucleotide sequence at SEQ ID NO 28217
tctgtgcccagctctgatagctgcaacaaatggaaacggcaatgatgaagagtacactgggggccgcgaaaagttgacaatagcactcttgatagtttctgaaccaagtatgatacctatgtataggattagctaaagtgtcgggaacagtgtagagcgttgagtaggtacctccacaagcccccattgctttcgaaaaggtatgcacccgcaccgcaatttcatcttgcaaggccagatcacaaacaagcccatagccattagggccgaaaagcccggtgctatgcgtttcgtctacgacgaactgaatattgccatggcccggcgagatttcttctgcgacgtcaagcagttcttgaagagggcagacgtcgccctccatactatagatggactccacagctacgaggatagagcgtctgccttgtctgacgagtggctgagagtccagtatggagagcaacgtttctcggaatgaatcgacgtcgttgtgcttgaagtcagttttttgaatcgcgagactgcggtccataccctcgtgtgtactagcatgaaccaaggcatcgtagacgatggcatcgccaggtcgtggtagggcggtccatatcatgacgttggcgtcgaatgcggaactcgtcagtagacccgcctcagctccgtgagccagggcgatctctacctcagtctcttctatgtaaggatagttgccttccatgactctcgagccaccagcagcgacattgaagtcgggatggcggttgagttcggtaaggaagcgctcccggatgagaccggtagagttccaggagagataatcgttagaacagaagtcgacggcatttttcgtctgccagttgttgtcgacaagagagaagagactttgggtgctccgacgggcgtcgagcgcatcctgaagattgcgaaagaatatcggctgatttttcttggttgttttctgttgaagctgttgtgagcggatatgtttgacaagcgtattcgccttagcgaaatctgggttctcctcgtagctgcccattgtgatacaaatagaatgacagcaagaatcaacgagactgcataggaggttgaagaacgacgtgagaagcaactatgaagtgagctcacttacttggcaactagtgtagcaatgcttcatccataaatagtgacaggctcaagcgccaataaccggccgtaggagtgattggagaactgagagaggcgctgcagcccagtttgtaggagagcttaagagcatctgcaatccttcataggggcttgaaactatgcgctttcttagctgatggttctggggcatagtgtacaacacatgcagtatagtggcgtggttgcttaaagggttattagtcgatgtctggctctttcgagtatataagataagcaccaagattcatttcaagtcttcccctcattccttccccctcctcgggcctcacgcagcacatgcaccgatgctccaatatcttgaggccacctgagatagatattcggtctgcctgccatgaatgagtccttcctgcagtcgcctgccttggacccgcctcccggcgttattccagactttgttaacaccggcggttggcatgaatatggatatgcaattctgatctcaacgtccgcgatttcggctggagcagttctggctcgatttgccagcggttttagcaggcgagagattcagctggaagatgtacttcttctggcagcattgggtatcttcggcggcatagtgtacatttcatacgacctgtcgatttacccgggattctgggcgcatcagtggaacgtgcaaaatggattcctgtcacactatctctacgacgtgcatttgggagctgttttctacggtcctatttcatgcctcatcaaagtttccattttggtcaactggttgcggatcttcgtgcccaagggtacacgtggagctttcttttggattcttcacggcctgctctggtctaacattgttttttacctgattacgacagtaacggagatcttccgctgcaccccgcgacagaagatctgggacccctttttcgaaggtggggtatgcaccatcgatatcaacggtcagaacatcgctacgagcgttctcaactttctctcggacagtgtgatattggccgccccccaatggatcatctggaaactccagatgtcacgtgctagaaaatggggcatatctttcctcttcgtaataggagttggtgcgtgggtttttggcgtcgtgcgtctcgtgtacttcatccaactcctgtcgaacgatgatgttgtatacgtcttctcgggcgttggcctttggagtatactagagctgacgacgggatttctgatcatgggaatcccagcttttccacgagtgttcaagatgctacccctgtcggataggatggcttcatacttccattcgctctggtctcggggtcggtccaattccgtgctctcgcccgaagcatggcagttttacaagccgaagagccggcggcgtcgtgggctctgggagatcactgatttggagacgcacgatatgatctccgtgggaaccacattgggtaaggatagcacacccagtcaagtggagcgtacgacgtcgggcgagaatgaaaacgacgacgtgcatgaatccacaaataccgcttctgcctctggctctggctctgcgacgtgaagctttcaggcccctaacttggccatatacgaccgcaaagagggtattgtgtaggcggttggggttggggttacattttggagctgacgttggattgtcggatccttcagctatgcagatcaatatcgaaaaggacgagtctgccttagtattagttgtcacatcgtatcaactcacattgctctgcttccttatacacgcaagtgcaatgaagttttaaaccgcaatatctaaaccaaaaagatttgatgactctggtggctcggacgaatgttttgtactcctttgcatgcccatttgattgaaatgttcaatgccgagcattgccaaatgtaacaactatttgaacgatactatcggggagacaattagacgcagccaatgaaataaccttgc

SEQ ID NO: 28220 - DNA, 1536 bp, Muscodor strobelii
  misc_feature: SGI cDNA ID NO. 569681
  misc_feature: Encodes the peptide sequence at SEQ ID NO 28221
atgcggaatccaaacaacggcgaggtcggccgcattcgtggcatgggttgccacgagggctaccaaacagcaatgcacactctcgatcagtatcggggaacaatagtggcttgccgataccaactgccggaggacctcgctcaccagtcagcattggcagtactgcagcgtagtgtgtatgacgcagtagctcacgtcgctctagcccagccgcatctacaaacgggtatcattggcgaagactctcccaatcccgccttcgttcgcctgactcgcctagacctcgccaatcatgtaaactgggtagcttgtaaagacgccaagcatgccaagaaactgtacctcgatacactggcatcagagctggattcacgatatgataatctcgctacgcaacccggttggcgggttgtcatcatcaaggaggccgacgcctgccacatggaagttctctatgtctggaaccaccctcaccatgacggcatgagcggtaaaatcttccatcgacagctcctgaacagtctgaatggacaggcagtcaatgacctgccccatccaggtccaggtgacctattcgggtccgatgcggcgagctgggttctggagcttcccgactccacggctaagttaccgcccccacctgaagtgctgacttccttctacatgacgccggtcgttggtttgaagtatctttggaaagaaataaagccctattggttgtttcccgatgctgtgcatgctacctgggcgccggtccacctgacgccgtttaggacaacatttcaaggattcgttgttggtaacgatgccgttacgaaactagccgagatctgccaccagcacgacacaactgtcacggcgctttttcaagctctcatgttggtatctttttcggtccgccttacggatatgaaaggattcgctagtagaacgccttacagtctacgcccgatcttgccgtccaggtctgagaagtacccctggcttgagccagaagaaagtctatgtaattacgtctccgtcatggatcacgagttcgacacgacactggtatcacagattcgatcagaattaacttccaatgtggcatcaggtgcgattgcaggtctaccccacggcgtccgagagattatgtggtccgtcgcagccggagtccgaggtgaatataaagctagactacaggccggtgtgaagaatgactggatccccctgatgaggctcgtgtccgactggagatctcagcaacgaggtgaggcacaaaaggtgcgtcacctgtcgtggcttgtgaccaaccttggtgtcctcgacggacaatgtgccgagcggaaacaggatgctacgcggtgggcaatacaaacggcagacctgctgctaagcgctgaagttccctctgctgctctgtcgctatccctgatgacggtcaaggatcagcagatgtgcgttacatgcagttggcaggactgtgtggtccaaggatctcttgtcgatggtgtgatgagcgatttggagaagtgggtgggtgagattgtcgcgtag

SEQ ID NO: 28221 - protein, 511 aa, Muscodor strobelii
  misc_feature: SGI Peptide ID NO. 569681
  misc_feature (14)..(506): Pfam Id: PF07247 Pfam Desc: Alcohol acetyltransferase
  misc_feature (130)..(320): Pfam Id: PF07247 Pfam Desc: Alcohol acetyltransferase
  misc_feature (5)..(511): NCBI GI: 240273877 Blast Desc: conserved [Ajellomyces capsulatus H143]
  misc_feature (5)..(511): NCBI GI: 225555375 Blast Desc: conserved [Ajellomyces capsulatus G186AR]
  misc_feature (33)..(506): NCBI GI: 256734699 Blast Desc: NECHADRAFT_75213 [Nectria haematococca mpVI 77-13-4]
  misc_feature (5)..(511): NCBI GI: 154286924 Blast Desc: [Ajellomyces capsulatus NAm1] gi|150407898|gb|EDN03439.1| [Ajellomyces capsulatus NAm1]
  misc_feature (12)..(509): NCBI GI: 256728395 Blast Desc: NECHADRAFT_102167 [Nectria haematococca mpVI 77-13-4]
  misc_feature (11)..(507): NCBI GI: 256723526 Blast Desc: NECHADRAFT_94006 [Nectria haematococca mpVI 77-13-4]
  misc_feature (12)..(506): NCBI GI: 145606783 Blast Desc: MGG_03754 [Magnaporthe grisea 70-15] gi|145014434|gb|EDJ99002.1| MGG_03754 [Magnaporthe grisea 70-15]
  misc_feature (13)..(506): NCBI GI: 46108098 Blast Desc: FG00931.1 [Gibberella zeae PH-1]
  misc_feature (12)..(506): NCBI GI: 85089916 Blast Desc: NCU09639 [Neurospora crassa OR74A] gi|28919502|gb|EAA28934.1| [Neurospora crassa OR74A]
  misc_feature (12)..(487): NCBI GI: 46126441 Blast Desc: FG07598.1 [Gibberella zeae PH-1]
MRNPNNGEVGRIRGMGCHEGYQTAMHTLDQYRGTIVACRYQLPEDLAHQSALAVLQRSVYDAVAHVALAQPHLQTGIIGEDSPNPAFVRLTRLDLANHVNWVACKDAKHAKKLYLDTLASELDSRYDNLATQPGWRVVIIKEADACHMEVLYVWNHPHHDGMSGKIFHRQLLNSLNGQAVNDLPHPGPGDLFGSDAASWVLELPDSTAKLPPPPEVLTSFYMTPVVGLKYLWKEIKPYWLFPDAVHATWAPVHLTPFRTTFQGFVVGNDAVTKLAEICHQHDTTVTALFQALMLVSFSVRLTDMKGFASRTPYSLRPILPSRSEKYPWLEPEESLCNYVSVMDHEFDTTLVSQIRSELTSNVASGAIAGLPHGVREIMWSVAAGVRGEYKARLQAGVKNDWIPLMRLVSDWRSQQRGEAQKVRHLSWLVTNLGVLDGQCAERKQDATRWAIQTADLLLSAEVPSAALSLSLMTVKDQQMCVTCSWQDCVVQGSLVDGVMSDLEKWVGEIVA

SEQ ID NO: 28222 - DNA, 4605 bp, Muscodor strobelii
  misc_feature: SGI EST ID NO. CUFF.66871.0
  misc_feature: Variant of the nucleotide sequence at SEQ ID NO 28220
ccgagatgtactaggtatttgttatcgcagaacttcaatgttggtgcagttcaagagagtgtaacaccagatgccaagcaatcatacagcgcggaaatccacagcacttaaactacctgtacgccaatcgaagctcatctacgaggcccactgtagcaacatctgcttggtgtgttctactgtacactcggtttccggcatctacccctacataatgtatctccatcgtatttgaggacccaactgtcgcctggcgcgattcaaagtcaacgtagacgcagcaatatcaaaacttcgactttgctatgcggaatccaaacaacggcgaggtcggccgcattcgtggcatgggttgccacgagggctaccaaacagcaatgcacactctcgatcagtatcggggaacaatagtggcttgccgataccaactgccggaggacctcgctcaccagtcagcattggcagtactgcagcgtagtgtgtatgacgcagtagctcacgtcgctctagcccagccgcatctacaaacgggtatcattggcgaagactctcccaatcccgccttcgttcgcctgactcgcctagacctcgccaatcatgtaaactgggtagcttgtaaagacgccaagcatgccaagaaactgtacctcgatacactggcatcagagctggattcacgatatgataatctcgctacgcaacccggttggcgggttgtcatcatcaaggaggccgacgcctgccacatggaagttctctatgtctggaaccaccctcaccatgacggcatgagcggtaaaatcttccatcgacagctcctgaacagtctgaatggacaggcagtcaatgacctgccccatccaggtccaggtgacctattcgggtccgatgcggcgagctgggttctggagcttcccgactccacggctaagttaccgcccccacctgaagtgctgacttccttctacatgacgccggtcgttggtttgaagtatctttggaaagaaataaagccctattggttgtttcccgatgctgtgcatgctacctgggcgccggtccacctgacgccgtttaggacaacatttcaaggattcgttgttggtaacgatgccgttacgaaactagccgagatctgccaccagcacgacacaactgtcacggcgctttttcaagctctcatgttggtatctttttcggtccgccttacggatatgaaaggattcgctagtagaacgccttacagtctacgcccgatcttgccgtccaggtctgagaagtacccctggcttgagccagaagaaagtctatgtaattacgtctccgtcatggatcacgagttcgacacgacactggtatcacagattcgatcagaattaacttccaatgtggcatcaggtgcgattgcaggtctaccccacggcgtccgagagattatgtggtccgtcgcagccggagtccgaggtgaatataaagctagactacaggccggtgtgaagaatgactggatccccctgatgaggctcgtgtccgactggagatctcagcaacgaggtgaggcacaaaaggtgcgtcacctgtcgtggcttgtgaccaaccttggtgtcctcgacggacaatgtgccgagcggaaacaggatgctacgcggtgggcaatacaaacggcagacctgctgctaagcgctgaagttccctctgctgctctgtcgctatccctgatgacggtcaaggatcagcagatgtgcgttacatgcagttggcaggactgtgtggtccaaggatctcttgtcgatggtgtgatgagcgatttggagaagtgggtgggtgagattgtcgcgtagctgatattcattgccaacgtaagctgtacgtactggccgcttgtgcttggcctccagttcactgtcccccacgtcaattcccttactttgagtcagtaccgtgggcagctctagccatttgactcgcttgggcgagtatttgcaagccctatgaatagaatatgccgtctactcaatacaaggttgggacgggttgggctgcaacggggtctttatctggaacagtccccaatgtgacgtcgggatatctgggaatcagggctccgaagtgagggggatggtcacacaagatacgggacaagtacctcagtcccgcgtaacaaggaccagacatgcagcattttcagctcttgagcttggtagcattcctgttgcaacgtcgttatgctccggcggctcgtcagcctgcagttgcactggagcggcgacaaccattgctatgcatgcttctggaatgtgtaaaatatcgatattatcttccaatagctacgtgctaaccttgcttcgcttctctgccgcttagttcgtctcccaatcaatccgatctccccttcttctctcagcgccagcatgctccattacctgttcgccttctacacctccatcactgtggctctcattttgttatttggtggtacaattctctactgcgcaatcgcacatattgtttacttgcttaatgggcggtaatgagaagtatgggcggagcatagacgccgcgaatcaacttcgcagtcgacctgggtcgagactgagcctgcatctcattttgcattctaactcagcaacttcctcctacggcgtttaatacgttttcttttgcctgagttctctccaaagtggctcccggttcaaaacgactattattctcttatgcagcagggtgtgtacttctgggagagaagtagtttaagggtgaatcatccacgtctggcagtcttcgagcgggagaactcgttgtctgacagctatggtggcaatgcttatgccatgcgcctcttgagttggagtaacaacttggttaggtggtgccaggggaagacgccccagatacaaccccaagtgcaatacatcggtacactttatgtagggtagtattgggggccagaatatccttgatgatgcaaatttggggacagggccaatactctttgccctttcactagtgaacttttcttacatcagatatgcgtgcggagagcttttgtgacatgtagggaatcggtacccgaataatacaaccttccaatcaaaccggccaaacacatggaaaagataatcgatactcccaaagtcaattttcagtcaatttgacatgtcctttcaattggagtatatatatccgtgattgtttaatttaccgatccaagtaagtgatctgtccaaaatagctcgtataccaagggagagcgacattagccagactgcatgcactgagccacatcaacattggctcactaatatccgcgtacatgtgataggaatgggaacccccctgtcattggtgcccgcacgaaaagggggataattgtaggctgcagtgttgtcttaatggcgcaagctacctagttacagcagagtcactcatagagcaaccgtcacggcgggagacacgcgcaagagaccaggacaatgggcattccgttctcaagaaacgagtttccggtggaagggaggacaatcctcatcgccggtggctcaagtggcatgggcttggccctcggccggaagctctctgagatgggagcaaacgtcgccatcgtggcgcgtgatgaacacaagctttcaaaagccatcgagcagatagagcgatgtgcacgtgactctagcccgcgacagcgctttcacagtattagcgcagacttgatggtcgaaccagagtcggcgaggatcatcaacgaagtcacatcatggaatgccggacagccgccggacgtggtctggtgctgcaccggcatgagccacccttcgctctttgttgacgcccctctgtctgaattcaccaggcaaatgaatagcaactatttcgccagtctttacatggcacatgctgcactaagtgtttggttgaaaaagacgacgccctctagccaaaaggtgcctaccagggcaacatcgcggccaccggcccggcacatcatctttacgggctcggtcctctcattctacagtttcgcgggctattctacatatagtccctgtaaggcagccattagggccttgtcggacaatctctcccaggagatgaatctctacaacgctgccaacacgaacgagcccgctatccggatccacacggtctttcctacgggtattcttggaccgtcgtttgatgccgagaacgcgatcaaatgcgatttgaccaaggacctcgagagtatagatgacggcggtcaagcagccgaagtcgttgctgctaagagtatcaagggtctcgagaatggcgaggagctcgtcactaccgagctcttgacctacctggtcaaacgcagtgtgttgggtgggagtgttcgaggagggttcttcagagctgtttgggattgtatactgggatttgttatggggatcgtcatgatattcgttcggcatgattacgatcggaggacgcgggcttgggggcgtctgcatggtacttcgggatacaaatcacccagcaagtgaaaagcgagggagactacaatatctacatcgcacttatttgatccttatcaagataaatatagacttaatattattgaaccgagaacctgctgtccgtgtaatc

SEQ ID NO: 28223 - DNA, 1029 bp, Muscodor strobelii
  misc_feature: SGI cDNA ID NO. 569682
  misc_feature: Elevated expression when VOC is produced
  misc_feature: Encodes the peptide sequence at SEQ ID NO 28224
atgggcattccgttctcaagaaacgagtttccggtggaagggaggacaatcctcatcgccggtggctcaagtggcatgggcttggccctcggccggaagctctctgagatgggagcaaacgtcgccatcgtggcgcgtgatgaacacaagctttcaaaagccatcgagcagatagagcgatgtgcacgtgactctagcccgcgacagcgctttcacagtattagcgcagacttgatggtcgaaccagagtcggcgaggatcatcaacgaagtcacatcatggaatgccggacagccgccggacgtggtctggtgctgcaccggcatgagccacccttcgctctttgttgacgcccctctgtctgaattcaccaggcaaatgaatagcaactatttcgccagtctttacatggcacatgctgcactaagtgtttggttgaaaaagacgacgccctctagccaaaaggtgcctaccagggcaacatcgcggccaccggcccggcacatcatctttacgggctcggtcctctcattctacagtttcgcgggctattctacatatagtccctgtaaggcagccattagggccttgtcggacaatctctcccaggagatgaatctctacaacgctgccaacacgaacgagcccgctatccggatccacacggtctttcctacgggtattcttggaccgtcgtttgatgccgagaacgcgatcaaatgcgatttgaccaaggacctcgagagtatagatgacggcggtcaagcagccgaagtcgttgctgctaagagtatcaagggtctcgagaatggcgaggagctcgtcactaccgagctcttgacctacctggtcaaacgcagtgtgttgggtgggagtgttcgaggagggttcttcagagctgtttgggattgtatactgggatttgttatggggatcgtcatgatattcgttcggcatgattacgatcggaggacgcgggcttgggggcgtctgcatggtacttcgggatacaaatcacccagcaagtga

SEQ ID NO: 28224 - protein, 342 aa, Muscodor strobelii
  misc_feature: SGI Peptide ID NO. 569682
  misc_feature (15)..(206): Pfam Id: PF00106 Pfam Desc: short chain dehydrogenase
  misc_feature (15)..(59): Pfam Id: PF00106 Pfam Desc: short chain dehydrogenase
  misc_feature (1)..(335): NCBI GI: 154314327 Blast Desc: BC1G_05257 [Botryotinia fuckeliana B05.10] gi|150848902|gb|EDN24095.1| BC1G_05257 [Botryotinia fuckeliana B05.10]
  misc_feature (1)..(339): NCBI GI: 46126935 Blast Desc: FG07845.1 [Gibberella zeae PH-1]
  misc_feature (1)..(328): NCBI GI: 156036168 Blast Desc: SS1G_12770 [Sclerotinia sclerotiorum 1980] gi|154698178|gb|EDN97916.1| SS1G_12770 [Sclerotinia sclerotiorum 1980]
  misc_feature (1)..(339): NCBI GI: 256724435 Blast Desc: NECHADRAFT_98034 [Nectria haematococca mpVI 77-13-4]
  misc_feature (5)..(333): NCBI GI: 145239629 Blast Desc: An08g03450 [Aspergillus niger] gi|134076972|emb|CAK45381.1| protein product [Aspergillus niger]
  misc_feature (6)..(333): NCBI GI: 115491549 Blast Desc: conserved [Aspergillus terreus NIH2624] gi|114197262|gb|EAU38962.1| conserved [Aspergillus terreus NIH2624]
  misc_feature (6)..(335): NCBI GI: 121701773 Blast Desc: 3-ketosphinganine reductase (Tsc10), [Aspergillus clavatus NRRL 1] gi|119397294|gb|EAW07725.1| 3-ketosphinganine reductase (Tsc10), [Aspergillus clavatus NRRL 1]
  misc_feature (5)..(339): NCBI GI: 146322596 Blast Desc: 3-ketosphinganine reductase (Tsc10) [Aspergillus fumigatus Af293] gi|129557746|gb|EAL90442.2| 3-ketosphinganine reductase (Tsc10), [Aspergillus fumigatus Af293] reductase A1163]
  misc_feature (5)..(339): NCBI GI: 119495752 Blast Desc: 3-ketosphinganine reductase (Tsc10), [Neosartorya fischeri NRRL 181] gi|119412816|gb|EAW22757.1| 3-ketosphinganine reductase (Tsc10), [Neosartorya fischeri NRRL 181]
  misc_feature (4)..(333): NCBI GI: 255936569 Blast Desc: Pc13g08860 [Penicillium chrysogenum Wisconsin 54-1255] gi|211583931|emb|CAP91955.1| Pc13g08860 [Penicillium chrysogenum Wisconsin 54-1255]
  misc_feature (33)..(333): SWISSPROT Homolog: EC 1.1.1.102 3-dehydrosphinganine reductase
  misc_feature: Useful for introducing or modulating the production of volatile compounds
MGIPFSRNEFPVEGRTILIAGGSSGMGLALGRKLSEMGANVAIVARDEHKLSKAIEQIERCARDSSPRQRFHSISADLMVEPESARIINEVTSWNAGQPPDVVWCCTGMSHPSLFVDAPLSEFTRQMNSNYFASLYMAHAALSVWLKKTTPSSQKVPTRATSRPPARHIIFTGSVLSFYSFAGYSTYSPCKAAIRALSDNLSQEMNLYNAANTNEPAIRIHTVFPTGILGPSFDAENAIKCDLTKDLESIDDGGQAAEVVAAKSIKGLENGEELVTTELLTYLVKRSVLGGSVRGGFFRAVWDCILGFVMGIVMIFVRHDYDRRTRAWGRLHGTSGYKSPSK

SEQ ID NO: 28225 - DNA, 4605 bp, Muscodor strobelii; identical to SEQ ID NO: 28222
  misc_feature: SGI EST ID NO. CUFF.66871.0
  misc_feature: Variant of the nucleotide sequence at SEQ ID NO 28223

SEQ ID NO: 28226 - DNA, 2325 bp, Muscodor strobelii
  misc_feature: SGI cDNA ID NO. 569683
  misc_feature: Encodes the peptide sequence at SEQ ID NO 28227
atggcgtccgattctacaccagccttgcagcggatgtttgagtatgatgtcaaacaatataccgcacagccagagcatggtggcgatcatgctatgagcaattcgcccttcgatactcccacggtcaagggagaggcagtcgtaaccaatcaggaccaagagaatgtctcacccagcaaatcccgtcacagccgcgtcttgtccggcaacgagctatccccattgaagatccttggatctagagacaccgatagtcgatcgacagatagatcctcctcgcccacgaagagccctcggaaatggggaacagaaaagcggttcccggttaaggtccataacgctggttctccagaaaagtcggtagttacgaaacgtgagatgagcatcgacgaagctgtgaaagagaacaaggatcttgcaaaagcgatccagattttcgaagacgaggatacaatgttggatggtggagagatggctggtgatatcagccgcatgactgttgatgtggctcgggatcatgagaatggagatgaggagggcttcggtgcggacgataccatgctaagcacattcagcaccttctcggcggtacccaaccttactatgtttgcaaagattggtcacacgccaaccaagttcgctcagcctgacccggaaccttccactgtccgcaagcagaagagcccctcgcagagaagcccctcccctcacaaaacaccacgccccacgactatccacgagtcaaacaacacaaccagtcttctcgattttactgagcagatccaagggttctcttctcgttacgcacaacagcagattgctagctctcgcggcctttctcctggtaagagataccataacacaatttctactactcctaagaaacgtcactcgcaccttctcgatcttgacatcgatcttcccccagctccgacaccacgcagcctcccctccatcacacctcgagagcttgaatctctgagatcctcgttcctctctgaaatcagcaatctcaaggcctctttgatgggtaaggaagccgaagtcatgtcgctcaagtcggctgttggagacgctgagaagcgtgtgggtgagtcgcaggaggagaaccgcgagctcaagactcaaaaccaagccttgcagcacgacaagtgcgactgggagaagcgcggtgccgatatggagcgcgtattacgagatatcaaggaagagattgttgcctaccgcaatatcagcgacgatctcaacgccaaaatcgaggagagtgagaagcgtcgcgaggcggccgagatcatggcgcaggaggcagaaagcaaactcgccgcgatgaagatcagcaaggtcgcagatgcctcctctggctccggcgacaagccacttgaagaggcgaaggctatgggctctcgcgaagtcgagattgccgtcgagaaggtcgccaaggaactccatgccatgtacaagggcaagcacgagcttaaggttgtcgcgctcaagaagagctacgagaatcgctggttcaagaaggtgtcagagcttgagtcgaaggtcgagcagcttaaggacgagaacgacaagctcaaggatggccgctacgctaccctaacgaagatcgatatgagccaggctcttgccgaggaagagcgcaaagagcaggctaaggagcaggccatcaaggattccgccaagattaaggaacttgaagcagagatcaaaaagctgggcgcggtcatcatctcagttaagaccgacaaccatgaccttcgcgaactcttgaagaaggagcgaatcgagaagggagagctcgtccttctcgccgaggagatgatggctattcagaatcccgctaagtacgatccggatatcccatacccttatcctcccgctgcacctcgcgttgaggctacttcctcgacttccgccgtcgcgactgctccctcgtctcccgccaagactggctctcctcttaagccggtctcccccttgaagagcgcttccccggtcaagggccacaagaaaactcagtctatgaccgcgaccgccgatgcattccgagccagcgccagtggcaatcgtccttctggcctccgaccccctacttccgccgccaagaaggctaagactgccgacactagaaccgctggcatgtcctcggccagttcatcgtctgctggcccatcatctgctggcccgtctgaacgtctacccgctcccgagcgccgacccgttggaatccctcgccctggtagtggcatggcgggtcgatctggcggcatcatgagctcaattgagcagatgggcaatcaccgcggaggtcacagacagtag

SEQ ID NO: 28227 - protein, 774 aa, Muscodor strobelii
  misc_feature: SGI Peptide ID NO. 569683
  misc_feature (6)..(613): NCBI GI: 256732171 Blast Desc: NECHADRAFT_61241 [Nectria haematococca mpVI 77-13-4]
  misc_feature (15)..(770): NCBI GI: 46137229 Blast Desc: FG10130.1 [Gibberella zeae PH-1]
  misc_feature (34)..(770): NCBI GI: 39974321 Blast Desc: MGG_00693 [Magnaporthe grisea 70-15] gi|145018376|gb|EDK02655.1| MGG_00693 [Magnaporthe grisea 70-15]
  misc_feature (41)..(772): NCBI GI: 156048885 Blast Desc: SS1G_08149 [Sclerotinia sclerotiorum 1980] gi|154692548|gb|EDN92286.1| SS1G_08149 [Sclerotinia sclerotiorum 1980]
  misc_feature (57)..(765): NCBI GI: 171691819 Blast Desc: protein product [Podospora anserina] gi|170945858|emb|CAP72659.1| protein product [Podospora anserina]
  misc_feature (57)..(612): NCBI GI: 85099717 Blast Desc: NCU01413 [Neurospora crassa OR74A] gi|28922363|gb|EAA31600.1| [Neurospora crassa OR74A] gi|28949998|emb|CAD70883.1| [Neurospora crassa]
  misc_feature (53)..(584): NCBI GI: 261351766 Blast Desc: conserved [Verticillium albo-atrum VaMs.102]
  misc_feature (48)..(770): NCBI GI: 154295381 Blast Desc: BC1G_13169 [Botryotinia fuckeliana B05.10] gi|150844037|gb|EDN19230.1| BC1G_13169 [Botryotinia fuckeliana B05.10]
  misc_feature (173)..(612): NCBI GI: 115490969 Blast Desc: conserved [Aspergillus terreus NIH2624] gi|114196972|gb|EAU38672.1| conserved [Aspergillus terreus NIH2624]
  misc_feature (149)..(771): NCBI GI: 145253360 Blast Desc: An16g08950 [Aspergillus niger] gi|134083758|emb|CAK47092.1| protein product [Aspergillus niger]
MASDSTPALQRMFEYDVKQYTAQPEHGGDHAMSNSPFDTPTVKGEAVVTNQDQENVSPSKSRHSRVLSGNELSPLKILGSRDTDSRSTDRSSSPTKSPRKWGTEKRFPVKVHNAGSPEKSVVTKREMSIDEAVKENKDLAKAIQIFEDEDTMLDGGEMAGDISRMTVDVARDHENGDEEGFGADDTMLSTFSTFSAVPNLTMFAKIGHTPTKFAQPDPEPSTVRKQKSPSQRSPSPHKTPRPTTIHESNNTTSLLDFTEQIQGFSSRYAQQQIASSRGLSPGKRYHNTISTTPKKRHSHLLDLDIDLPPAPTPRSLPSITPRELESLRSSFLSEISNLKASLMGKEAEVMSLKSAVGDAEKRVGESQEENRELKTQNQALQHDKCDWEKRGADMERVLRDIKEEIVAYRNISDDLNAKIEESEKRREAAEIMAQEAESKLAAMKISKVADASSGSGDKPLEEAKAMGSREVEIAVEKVAKELHAMYKGKHELKVVALKKSYENRWFKKVSELESKVEQLKDENDKLKDGRYATLTKIDMSQALAEEERKEQAKEQAIKDSAKIKELEAEIKKLGAVIISVKTDNHDLRELLKKERIEKGELVLLAEEMMAIQNPAKYDPDIPYPYPPAAPRVEATSSTSAVATAPSSPAKTGSPLKPVSPLKSASPVKGHKKTQSMTATADAFRASASGNRPSGLRPPTSAAKKAKTADTRTAGMSSASSSSAGPSSAGPSERLPAPERRPVGIPRPGSGMAGRSGGIMSSIEQMGNHRGGHRQ

SEQ ID NO: 28228 - DNA, 3275 bp, Muscodor strobelii
  misc_feature: SGI EST ID NO. CUFF.66608.0
  misc_feature: Variant of the nucleotide sequence at SEQ ID NO 28226
cacgcacaacccaatcgttttcacaacgccgcgctttcgaacctttcttgaacgtctctttccctttcaagctctcaagattataatcatccatagagccagttccttgttgacagcttcacagccgaatgaccgcgactgttccagaaccactgtctcccgtgaagtgtcgcgaggcgcgtgcgaataacatggcgtccgattctacaccagccttgcagcggatgtttgagtatgatgtcaaacaatataccgcacagccagagcatggtggcgatcatgctatgagcaattcgcccttcgatactcccacggtcaagggagaggcagtcgtaaccaatcaggaccaagagaatgtctcacccagcaaatcccgtcacagccgcgtcttgtccggcaacgagctatccccattgaagatccttggatctagagacaccgatagtcgatcgacagatagatcctcctcgcccacgaagagccctcggaaatggggaacagaaaagcggttcccggttaaggtccataacgctggttctccagaaaagtcggtagttacgaaacgtgagatgagcatcgacgaagctgtgaaagagaacaaggatcttgcaaaagcgatccagattttcgaagacgaggatacaatgttggatggtggagagatggctggtgatatcagccgcatgactgttgatgtggctcgggatcatgagaatggagatgaggagggcttcggtgcggacgataccatgctaagcacattcagcaccttctcggcggtacccaaccttactatgtttgcaaagattggtcacacgccaaccaagttcgctcagcctgacccggaaccttccactgtccgcaagcagaagagcccctcgcagagaagcccctcccctcacaaaacaccacgccccacgactatccacgagtcaaacaacacaaccagtcttctcgattttactgagcagatccaagggttctcttctcgttacgcacaacagcagattgctagctctcgcggcctttctcctggtaagagataccataacacaatttctactactcctaagaaacgtcactcgcaccttctcgatcttgacatcgatcttcccccagctccgacaccacgcagcctcccctccatcacacctcgagagcttgaatctctgagatcctcgttcctctctgaaatcagcaatctcaaggcctctttgatgggtaaggaagccgaagtcatgtcgctcaagtcggctgttggagacgctgagaagcgtgtgggtgagtcgcaggaggagaaccgcgagctcaagactcaaaaccaagccttgcagcacgacaagtgcgactgggagaagcgcggtgccgatatggagcgcgtattacgagatatcaaggaagagattgttgcctaccgcaatatcagcgacgatctcaacgccaaaatcgaggagagtgagaagcgtcgcgaggcggccgagatcatggcgcaggaggcagaaagcaaactcgccgcgatgaagatcagcaaggtcgcagatgcctcctctggctccggcgacaagccacttgaagaggcgaaggctatgggctctcgcgaagtcgagattgccgtcgagaaggtcgccaaggaactccatgccatgtacaagggcaagcacgagcttaaggttgtcgcgctcaagaagagctacgagaatcgctggttcaagaaggtgtcagagcttgagtcgaaggtcgagcagcttaaggacgagaacgacaagctcaaggatggccgctacgctaccctaacgaagatcgatatgagccaggctcttgccgaggaagagcgcaaagagcaggctaaggagcaggccatcaaggattccgccaagattaaggaacttgaagcagagatcaaaaagctgggcgcggtcatcatctcagttaagaccgacaaccatgaccttcgcgaactcttgaagaaggagcgaatcgagaagggagagctcgtccttctcgccgaggagatgatggctattcagaatcccgctaagtacgatccggatatcccatacccttatcctcccgctgcacctcgcgttgaggctacttcctcgacttccgccgtcgcgactgctccctcgtctcccgccaagactggctctcctcttaagccggtctcccccttgaagagcgcttccccggtcaagggccacaagaaaactcagtctatgaccgcgaccgccgatgcattccgagccagcgccagtggcaatcgtccttctggcctccgaccccctacttccgccgccaagaaggctaagactgccgacactagaaccgctggcatgtcctcggccagttcatcgtctgctggcccatcatctgctggcccgtctgaacgtctacccgctcccgagcgccgacccgttggaatccctcgccctggtagtggcatggcgggtcgatctggcggcatcatgagctcaattgagcagatgggcaatcaccgcggaggtcacagacagtagattacgccattggtctacgaatagcctggatggtgtttttgcgattggttttcacgactattggaattcgcgttctcaattctcgatttggtgttgtcacgtttcacgaatcactgcacaacattgcgttgcatagcatgacacggcggtgttatgtctgaaagataccttgaaggtttttgcttttcgatttggcttctgtttcttgtcaggagtctcggtcaagatttgacgattgcatgagagttttgaggaatgctgggatttgtttcgctgccgtctgctgtgataatgaagggttgatgaatctttgcatgaagactcgcataatgaaggatggaggagtctgtgcatggccctttaccagactttctggctttgcattgagaagatgagatgacagcatgagttgggtgtgaaaatggggtatcgtggaggagacattggctttaggccattggatctgaaacggtgtgtacaaaatcggggttgtggaagagattaattggcagtgcaatgcgttcttacctcgtgtttgaacaactcgtttctgtcaccagtgcaaaggaccagactagtacaggctacggaatgaaatgaaagtcactgataaacatcttttgttttgcgctcttactatacatgtgtggcgaatgtggcttcatgatcgtgtcccattctcatcacatctcatgagctcgtcacgttcgtagctcgtcgtcatccgtaccaggccttgccgtaacctacttgctgtcc

SEQ ID NO: 28229 - DNA, 996 bp, Muscodor strobelii
  misc_feature: SGI cDNA ID NO. 569684
  misc_feature: Encodes the peptide sequence at SEQ ID NO 28230
atggcctcggaagataaatcgggtgattttcctgagcagaacagaccattgtcgatcgagaaggctccttcccgctatcccctgaaccgaacccgcctaggccgacccaacctgccccgagaacttgccccctttcccccaccttacgcagccttcttacctggtcccgccagcgccttggcttatgctacccgcaacccttcggccaacatcccatttgaagaaagcacctcagtctggatcgagaatcttccacctgtctgcgactatgccaggcttcttggcgctatcagagactgcggcaagatttacgcctgcgtcatcaacactcctaccgaaggacactacacatcagcggccaagatcgtgttcttcgacgtcgagggacggtcccgcctgatgctctttgctgagcggggcgaatttatcgtcaacgattatgtccctatcatccgcctccatcgcatcaagacacgttctcaggtgcctggtccgcagtgcagagtgctggtcattagtggaccaccgtcggttgtcaatcagcctcgtctaatgagcagtaagtatcttcgtgacgtgtttcttgtcaagacctgtttcaagatatatccaccatgggggtcaattactaaaacaaccacagtgtttgagaaagcctgctccttcgatatagagtctatcaccaccgttccctatcgccctggcatcgaccaaggcatgatcacgatggagtttcgcttcggcagtttccgcaaccaagccgagcgcgtcatcaagtgtatctccgacgcccgcgataagatgcttgtcaatggctcaaaggcagaacaggatatctggacccaggttgctgcacggttcggttcggatccctgtgaccgcaagacagcactcattgacccccaatttcctactcaagaagacgaggagaccgaaagtcgtagagctctcgtagaggttctcaaaacaataagcaagcaagagaacaacaagtag

SEQ ID NO: 28230 - protein, 331 aa, Muscodor strobelii
  misc_feature: SGI Peptide ID NO. 569684
  misc_feature (62)..(293): NCBI GI: 256723100 Blast Desc: NECHADRAFT_81265 [Nectria haematococca mpVI 77-13-4]
  misc_feature (66)..(292): NCBI GI: 39977813 Blast Desc: MGG_06791 [Magnaporthe grisea 70-15] gi|145013671|gb|EDJ98312.1| MGG_06791 [Magnaporthe grisea 70-15]
  misc_feature (65)..(294): NCBI GI: 116195516 Blast Desc: CHGG_04356 [Chaetomium globosum CBS 148.51] gi|88180269|gb|EAQ87737.1| CHGG_04356 [Chaetomium globosum CBS 148.51]
  misc_feature (61)..(262): NCBI GI: 171683023 Blast Desc: protein product [Podospora anserina] gi|170941471|emb|CAP67122.1| protein product [Podospora anserina]
  misc_feature (65)..(133): NCBI GI: 116195748 Blast Desc: CHGG_04472 [Chaetomium globosum CBS 148.51] gi|88180385|gb|EAQ87853.1| CHGG_04472 [Chaetomium globosum CBS 148.51]
  misc_feature (65)..(126): NCBI GI: 171690952 Blast Desc: protein product [Podospora anserina] gi|170945424|emb|CAP71536.1| protein product [Podospora anserina]
  misc_feature (65)..(191): NCBI GI: 40882203 Blast Desc: conserved [Neurospora crassa]
  misc_feature (65)..(191): NCBI GI: 85085374 Blast Desc: NCU04417 [Neurospora crassa OR74A] gi|28918586|gb|EAA28258.1| [Neurospora crassa OR74A]
MASEDKSGDFPEQNRPLSIEKAPSRYPLNRTRLGRPNLPRELAPFPPPYAAFLPGPASALAYATRNPSANIPFEESTSVWIENLPPVCDYARLLGAIRDCGKIYACVINTPTEGHYTSAAKIVFFDVEGRSRLMLFAERGEFIVNDYVPIIRLHRIKTRSQVPGPQCRVLVISGPPSVVNQPRLMSSKYLRDVFLVKTCFKIYPPWGSITKTTTVFEKACSFDIESITTVPYRPGIDQGMITMEFRFGSFRNQAERVIKCISDARDKMLVNGSKAEQDIWTQVAARFGSDPCDRKTALIDPQFPTQEDEETESRRALVEVLKTISKQENNK

SEQ ID NO: 28231 - DNA, 160 bp, Muscodor strobelii
  misc_feature: SGI EST ID NO. CUFF.66611.0
  misc_feature: Variant of the nucleotide sequence at SEQ ID NO 28229
taaaacaaccacagtgtttgagaaagcctgctccttcgatatagagtctatcaccaccgttccctatcgccctggcatcgaccaaggcatgatcacgatggagtttcgcttcggcagtttccgcaaccaagccgagcgcgtcatcaagtgtatctccgac

SEQ ID NO: 28232 - DNA, 984 bp, Muscodor strobelii
  misc_feature: SGI cDNA ID NO. 569685
  misc_feature: Encodes the peptide sequence at SEQ ID NO 28233
atggctgccgctgttttgtctcgagcttcccaagaaacatctgctcacctccgctcccctcttccgactggctcaaacgagggtacgatcacagcagagcagatgcaatggcttcggcccactgcaaaagacacacgaatcgaggaaatgagagagcgactgcatgctgacgggtatctctttgtcaagcaattgattccgcgtgatgatgtgcttgaggtcaggaaagaatacttttcgaactacgaagcaactggcatacttgagccaggcacggatccggagcttggcattttcaattcgaacgaaaccccggcagcccattcaggtatcggttcgggacagttgccagccaccgacttgcaagtcaagctcatggaggagtcacatcactggccgctttatctcaagttcttagagcaaccagcgctgcgcgatttcgtgagacgcttgatgggatgggacaaggaaatactcctcaggcgaacaatgctacgacacctcgtacctggaggttatagcacagccgtacattatgacaagttgttcctccgagggggcgaggcgttcttcttgactgcgtggatccctattggcgacgtctcccagactggtggcggcctcatgtatctgtcagactcggttggcctaggccaatcgattgagaataatttcaatcaccgcgcaaaagagttaacaccagaagaacggatcagtgcttttaacgtgaatatggaaaagaacggtctattatctcaaaatgcatatcagtttggcgagcaaaatgggcgtcacccgtggctagtagcggattatgaggcaggcgacgtgattttccacgatccctatgcgatacacaccagcactaaaaatgaggacagcgcaggaagaattcgtttaagctcagacatacgattctactgtgagggcactgatattgatcgtcgttggatgaatttttggacccctagcgatggtttgtga

SEQ ID NO: 28233 - protein, 327 aa, Muscodor strobelii
  misc_feature: SGI Peptide ID NO. 569685
  misc_feature (25)..(327): NCBI GI: 145248101 Blast Desc: An13g01600 [Aspergillus niger] gi|134081048|emb|CAK41560.1| protein product [Aspergillus niger]
  misc_feature (26)..(327): NCBI GI: 169781918 Blast Desc: [Aspergillus oryzae RIB40] gi|83774164|dbj|BAE64289.1| protein product [Aspergillus oryzae]
  misc_feature (26)..(327): NCBI GI: 67521610 Blast Desc: AN1262.2 [Aspergillus nidulans FGSC A4] gi|40746699|gb|EAA65855.1| AN1262.2 [Aspergillus nidulans FGSC A4] gi|259488417|tpe|CBF87835.1| TPA: conserved [Aspergillus FGSC
  misc_feature (26)..(327): NCBI GI: 119495955 Blast Desc: NFIA_015480 [Neosartorya fischeri NRRL 181] gi|119412914|gb|EAW22855.1| conserved [Neosartorya fischeri NRRL 181]
  misc_feature (25)..(327): NCBI GI: 256728684 Blast Desc: NECHADRAFT_85877 [Nectria haematococca mpVI 77-13-4]
  misc_feature (26)..(327): NCBI GI: 169781752 Blast Desc: [Aspergillus oryzae RIB40] gi|83774081|dbj|BAE64206.1| protein product [Aspergillus oryzae]
  misc_feature (25)..(327): NCBI GI: 255949542 Blast Desc: Pc22g16220 [Penicillium chrysogenum Wisconsin 54-1255] gi|211592555|emb|CAP98910.1| Pc22g16220 [Penicillium chrysogenum Wisconsin 54-1255]
  misc_feature (26)..(325): NCBI GI: 145239339 Blast Desc: An08g01970 [Aspergillus niger] gi|134076823|emb|CAK39877.1| protein product [Aspergillus niger]
  misc_feature (26)..(311): NCBI GI: 70995243 Blast Desc: conserved [Aspergillus fumigatus Af293] gi|66850018|gb|EAL90345.1| conserved [Aspergillus fumigatus Af293] gi|159131137|gb|EDP56250.1| conserved [Aspergillus A1163]
  misc_feature (26)..(327): NCBI GI: 256724881 Blast Desc: NECHADRAFT_77029 [Nectria haematococca mpVI 77-13-4]
MAAAVLSRASQETSAHLRSPLPTGSNEGTITAEQMQWLRPTAKDTRIEEMRERLHADGYLFVKQLIPRDDVLEVRKEYFSNYEATGILEPGTDPELGIFNSNETPAAHSGIGSGQLPATDLQVKLMEESHHWPLYLKFLEQPALRDFVRRLMGWDKEILLRRTMLRHLVPGGYSTAVHYDKLFLRGGEAFFLTAWIPIGDVSQTGGGLMYLSDSVGLGQSIENNFNHRAKELTPEERISAFNVNMEKNGLLSQNAYQFGEQNGRHPWLVADYEAGDVIFHDPYAIHTSTKNEDSAGRIRLSSDIRFYCEGTDIDRRWMNFWTPSDGL

SEQ ID NO: 28234 - DNA, 1981 bp, Muscodor strobelii
  misc_feature: SGI EST ID NO. CUFF.66620.0
  misc_feature: Variant of the nucleotide sequence at SEQ ID NO 28232
gttgagtctcacggaggaagttcgattggaccagtttaattgatcctcgttgtttttttgctcggaaaagatatctctatgcgtttgctggctttgcaatggctgccgctgttttgtctcgagcttcccaagaaacatctgctcacctccgctcccctcttccgactggctcaaacgagggtacgatcacagcagagcagatgcaatggcttcggcccactgcaaaagacacacgaatcgaggaaatgagagagcgactgcatgctgacgggtatctctttgtcaagcaattgattccgcgtgatgatgtgcttgaggtcaggaaagaatacttttcgaactacgaagcaactggcatacttgagccaggcacggatccggagcttggcattttcaattcgaacgaaaccccggcagcccattcaggtatcggttcgggacagttgccagccaccgacttgcaagtcaagctcatggaggagtcacatcactggccgctttatctcaagttcttagagcaaccagcgctgcgcgatttcgtgagacgcttgatgggatgggacaaggaaatactcctcaggcgaacaatgctacgacacctcgtacctggaggttatagcacagccgtacattatgacaagttgttcctccgagggggcgaggcgttcttcttgactgcgtggatccctattggcgacgtctcccagactggtggcggcctcatgtatctgtcagactcggttggcctaggccaatcgattgagaataatttcaatcaccgcgcaaaagagttaacaccagaagaacggatcagtgcttttaacgtgaatatggaaaagaacggtctattatctcaaaatgcatatcagtttggcgagcaaaatgggcgtcacccgtggctagtagcggattatgaggcaggcgacgtgattttccacgatccctatgcgatacacaccagcactaaaaatgaggacagcgcaggaagaattcgtttaagctcagacatacgattctactgtgagggcactgatattgatcgtcgttggatgaatttttggacccctagcgatggtttgtgaagtgcagactgtgggatttctagaatgcaagtaaaatggccgaaaagagaagtactagatattagacttcagcctactcgaaggcatgagatattaatgcaatgattcgtgtataattgctttaagtctagtctccaacttgaggtttttttttttggccgcccgtgaggtaccgctatcaatgaagtaaagacatttcatgttccaagaagtttccattaaaccaaaacaagaaaagtaagacacgcagtaaacagatgaattgaactacatacattcttggtcgctatgacagaacaaatgattatcatgttcacgtccgaagatgccagcttgcgagacgatcaccaatcagcctctgcccagcttcgtgaatcctgcagacgaaggtctcttaagcgagacgttgcgctcattctccttaattcgtgtccattgcgctgccttctccaattttctctgcccacgcccagcgcatacaccatttcgcgccgataaccgtgctgcctggcgatgacttcgacatcatgctcaatatctgagtcacacgcgccgactctctcgccgaagatctccacgagtggccctttttcaatagaatccggcagactaaacaagtaatgctcgatagctttccaggtttcgagcgagatgtcttcgtcgagagccttttccagttcctgttgcactgtaacgttgacttcgtcgataactgaacgttcttcttcgctcaaatcgtccgcgtgtgtcttgattaccgcagagactggtggctcgccaccgattgaccaaagtgcgtatcgaattgcatcgatatcgcaggttgcgcatcgctccttttgtctgtcttgaagcacgaaatgacggtgcttaatctgttcgcaccacttgccgagtag

SEQ ID NO: 28235 - DNA, 645 bp, Muscodor strobelii
  misc_feature: SGI cDNA ID NO. 569686
  misc_feature: Encodes the peptide sequence at SEQ ID NO 28236
atgtgcgtcaccacgattttacggtcggtcgaagatggccggggaaggaaataccaccgcccaattcatgatcaagacttcccgctctgtctactcggcaagtggtgcgaacagattaagcaccgtcatttcgtgcttcaagacagacaaaaggagcgatgcgcaacctgcgatatcgatgcaattcgatacgcactttggtcaatcggtggcgagccaccagtctctgcggtaatcaagacacacgcggacgatttgagcgaagaagaacgttcagttatcgacgaagtcaacgttacagtgcaacaggaactggaaaaggctctcgacgaagacatctcgctcgaaacctggaaagctatcgagcattacttgtttagtctgccggattctattgaaaaagggccactcgtggagatcttcggcgagagagtcggcgcgtgtgactcagatattgagcatgatgtcgaagtcatcgccaggcagcacggttatcggcgcgaaatggtgtatgcgctgggcgtgggcagagaaaattggagaaggcagcgcaatggacacgaattaaggagaatgagcgcaacgtctcgcttaagagaccttcgtctgcaggattcacgaagctgggcagaggctgattggtga

SEQ ID NO: 28236 - protein, 214 aa, Muscodor strobelii
  misc_feature: SGI Peptide ID NO. 569686
MCVTTILRSVEDGRGRKYHRPIHDQDFPLCLLGKWCEQIKHRHFVLQDRQKERCATCDIDAIRYALWSIGGEPPVSAVIKTHADDLSEEERSVIDEVNVTVQQELEKALDEDISLETWKAIEHYLFSLPDSIEKGPLVEIFGERVGACDSDIEHDVEVIARQHGYRREMVYALGVGRENWRRQRNGHELRRMSATSRLRDLRLQDSRSWAEADW

SEQ ID NO: 28237 - DNA, 75 bp, Muscodor strobelii
  misc_feature: SGI EST ID NO. CUFF.66623.0
  misc_feature: Variant of the nucleotide sequence at SEQ ID NO 28235
gctgataaaccctcggagatttcacaggacttatactcaacacgatatatctttgaccaagattcaacatgtgcg

SEQ ID NO: 28238 - DNA, 1350 bp, Muscodor strobelii
  misc_feature: SGI cDNA ID NO. 569687
  misc_feature: Encodes the peptide sequence at SEQ ID NO 28239
atggcgtcgtcaccctcatctgagtcgcttggaaccagtttcaagaccgccacgggctatcccggcggcgttgagtctactatcggctgtgcctctcctgctggtcatgttactccacctattaccggctctccttctggtatggatgctagtggtatccttagctctccgacactcagctatagtagtgaggagggtatctttcgcatgagtttggatgagcagagcgagagagtcaaggatgaccgacgcgaggctggctttgaccaggatgctgacgcccagtatgagatgacttcaggagctgcacgagagggactacgacttggccctaccagagacatgccccttattatcagtgcacagaaacccggcgctcctcagcttgtttatgagaagcaccacgagcctggcaacgctcatgaactgaatgccagctccaagcgccatccatcgctcatccagcacagtgagccaattcccatccaattcgccatcccacgacgccgcatcccggctttcaatgaagaaggactgccaactattgctggctatgccgcgcctatcaccgctgaagagtaccgtgcattgatccagcaacgacgcgaggaagagatcagagacaagcaacacaagctcaaccaggcccgcatcaccgagtactaccaagaccgccctggcccccccatcacaaagcacagcactcttcccgtactccatcagcccgagcaggtcgtcacctcaccctctgacgaagagatcaccattgagccaactcctgtggtccatcgcaagcaccgcaacccattcaagatgttttcctccttccttcacttcaacggtcgtggtcatggccgcaaggccagtaacgaggctcaaaagaccgccgccgacgcttctcttcccaccgccaccttgcgcaactcggaacgcctcaatctcccccacgccgcagagtacagtcactcattcaccaacacttcgtacgaagagggcctggcggccggcaccaagaccgccaacaccgccgcctaccaggacggctacaaccagggctacaaggacggccatgccgagcgcaaaaatcagatggctcacccccatcgctcggtcgccgccatccccgagcgccgtctttccatccgtcggccggacggcaccaaggttggcactcccgatctcgtccagggagttgccaccatgatggagggccttggtgtcgctcgcgccgacggcatggacgacgaagaccgctgcaagggcaaggagaagcagcaacctcgcagtgacgaggagatcgtagccttcctcgagaaggtcatccacaagatcgaggagaagaaggagtaa

SEQ ID NO: 28239 - protein, 449 aa, Muscodor strobelii
  misc_feature: SGI Peptide ID NO. 569687
MASSPSSESLGTSFKTATGYPGGVESTIGCASPAGHVTPPITGSPSGMDASGILSSPTLSYSSEEGIFRMSLDEQSERVKDDRREAGFDQDADAQYEMTSGAAREGLRLGPTRDMPLIISAQKPGAPQLVYEKHHEPGNAHELNASSKRHPSLIQHSEPIPIQFAIPRRRIPAFNEEGLPTIAGYAAPITAEEYRALIQQRREEEIRDKQHKLNQARITEYYQDRPGPPITKHSTLPVLHQPEQVVTSPSDEEITIEPTPVVHRKHRNPFKMFSSFLHFNGRGHGRKASNEAQKTAADASLPTATLRNSERLNLPHAAEYSHSFTNTSYEEGLAAGTKTANTAAYQDGYNQGYKDGHAERKNQMAHPHRSVAAIPERRLSIRRPDGTKVGTPDLVQGVATMMEGLGVARADGMDDEDRCKGKEKQQPRSDEEIVAFLEKVIHKIEEKKE

SEQ ID NO: 28240 - DNA, 210 bp, Muscodor strobelii
  misc_feature: SGI cDNA ID NO. 569688
  misc_feature: Encodes the peptide sequence at SEQ ID NO 28241
atggaggaggtccacagcgggcctgtcaaggacggaaatttcaacgtggcgatatccgtcaatctagagaagatgaagaccgaagcggatgactatggcgatggcgtcgtgaagaagaaacaaaagaaccagggcaagggtgccactacctccgcctacgatgtcgacaagcacgggtccgttgccactgaaggcaactattcgaagtga

SEQ ID NO: 28241 - protein, 69 aa, Muscodor strobelii
  misc_feature: SGI Peptide ID NO. 569688
MEEVHSGPVKDGNFNVAISVNLEKMKTEADDYGDGVVKKKQKNQGKGATTSAYDVDKHGSVATEGNYSK

SEQ ID NO: 28242 - DNA, 891 bp, Muscodor strobelii
  misc_feature: SGI cDNA ID NO. 569689
  misc_feature: Encodes the peptide sequence at SEQ ID NO 28243
atggacccctactcggcggaaggcgagctgatcaacatccacaaccacttccatcaaggacaatatcaagaagtcatcgacttcgacatctacacctccggtctgtcgtcagagaatcacgtccccgccaagatcttagtagagcgagcacgcatagcactgggtcaagcagaagatgtgttgtcagacttgaagagcgagacggcgcccgagttcgctgctgtgtccgccctggccttatccgcactcggcaggacggacgaagctgttgcggcgattgagaaattagctgatagcgagggagagaaccagactgtgcaggtccttggtggtagtgtgctgcatgccgcgggcaagtcggaagaggctcttgcgctgctctcgagacattctggaagtcttgacgccgtagcgctcataacccaaatccacctccaacagaaccgcacagaccttgccgtcaaggaagtaacagccgcccgccgctgggcacaagacagcatactcgtgaacctcgcagagtcatgggttggcctcagggtgggcggagagaaataccaacaagcattctacgtcttcgaagaactcgcccaatcaaccgccacctcctcgataatctccctcgtctcacaagccgtcagtgaactgcacttgggcagagttgaagaagctcagactgcgctagaacaggctacaaagaaagagcccgagtttgcacatgcgattgcgaatttgttggtcttgacggtgatcactggcaaggatacggaggagctgaagacgcagttgacgagtttggccccgcaacaccccttgctggtcgatatcgaggagaagagcgatctgttcgacaaggctgcttcgaagtttagcgctaaagtcggcgcttag

SEQ ID NO: 28243 - protein, 296 aa, Muscodor strobelii
  misc_feature: SGI Peptide ID NO. 569689
  misc_feature (6)..(291): Pfam Id: PF04733 Pfam Desc: Coatomer epsilon subunit
  misc_feature (1)..(296): NCBI GI: 171691973 Blast Desc: protein product [Podospora anserina] gi|170945935|emb|CAP72736.1| protein product [Podospora anserina]
  misc_feature (1)..(296): NCBI GI: 261355733 Blast Desc: coatomer subunit epsilon [Verticillium albo-atrum VaMs.102]
  misc_feature (1)..(296): NCBI GI: 46137329 Blast Desc: FG10180.1 [Gibberella zeae PH-1]
  misc_feature (1)..(294): NCBI GI: 39971439 Blast Desc: MGG_07035 [Magnaporthe grisea 70-15] gi|145019496|gb|EDK03724.1| MGG_07035 [Magnaporthe grisea 70-15]
  misc_feature (1)..(296): NCBI GI: 256731758 Blast Desc: [Nectria haematococca mpVI 77-13-4]
  misc_feature (2)..(296): NCBI GI: 85103901 Blast Desc: NCU11274 [Neurospora crassa OR74A] gi|28923162|gb|EAA32378.1| NCU11274 [Neurospora crassa OR74A] gi|28950079|emb|CAD70832.1| related to coatomer epsilon subunit
  misc_feature (1)..(296): NCBI GI: 154291953 Blast Desc: BC1G_14279 [Botryotinia fuckeliana B05.10] gi|150846380|gb|EDN21573.1| BC1G_14279 [Botryotinia fuckeliana B05.10]
  misc_feature (1)..(296): NCBI GI: 156044722 Blast Desc: SS1G_10465 [Sclerotinia sclerotiorum 1980] gi|154694853|gb|EDN94591.1| SS1G_10465 [Sclerotinia sclerotiorum 1980]
  misc_feature (1)..(284): NCBI GI: 116180148 Blast Desc: CHGG_00702 [Chaetomium globosum CBS 148.51] gi|88184999|gb|EAQ92467.1| CHGG_00702 [Chaetomium globosum CBS 148.51]
  misc_feature (1)..(296): NCBI GI: 261198705 Blast Desc: coatomer subunit epsilon [Ajellomyces dermatitidis SLH14081] gi|239594906|gb|EEQ77487.1| coatomer subunit epsilon [Ajellomyces dermatitidis SLH14081] gi|239609972|gb|EEQ86959.1|
MDPYSAEGELINIHNHFHQGQYQEVIDFDIYTSGLSSENHVPAKILVERARIALGQAEDVLSDLKSETAPEFAAVSALALSALGRTDEAVAAIEKLADSEGENQTVQVLGGSVLHAAGKSEEALALLSRHSGSLDAVALITQIHLQQNRTDLAVKEVTAARRWAQDSILVNLAESWVGLRVGGEKYQQAFYVFEELAQSTATSSIISLVSQAVSELHLGRVEEAQTALEQATKKEPEFAHAIANLLVLTVITGKDTEELKTQLTSLAPQHPLLVDIEEKSDLFDKAASKFSAKVGA

SEQ ID NO: 28244 - DNA, 3459 bp, Muscodor strobelii
  misc_feature: SGI EST ID NO. CUFF.66862.0
  misc_feature: Variant of the nucleotide sequence at SEQ ID NO 28242
tgtacattgacatgtctcagttgaaggtctcctgaacccgccataccgacaatcagcgaacgagaaaagcagcaattgaacttgcatcgcggacaattacccttctacaaactacccaacaagtcaaccatcaaaacttatctcgatagacggagaagcatcgcccaagatggacccctactcggcggaaggcgagctgatcaacatccacaaccacttccatcaaggacaatatcaagaagtcatcgacttcgacatctacacctccggtctgtcgtcagagaatcacgtccccgccaagatcttagtagagcgagcacgcatagcactgggtcaagcagaagatgtgttgtcagacttgaagagcgagacggcgcccgagttcgctgctgtgtccgccctggccttatccgcactcggcaggacggacgaagctgttgcggcgattgagaaattagctgatagcgagggagagaaccagactgtgcaggtccttggtggtagtgtgctgcatgccgcgggcaagtcggaagaggctcttgcgctgctctcgagacattctggaagtcttgacgccgtagcgctcataacccaaatccacctccaacagaaccgcacagaccttgccgtcaaggaagtaacagccgcccgccgctgggcacaagacagcatactcgtgaacctcgcagagtcatgggttggcctcagggtgggcggagagaaataccaacaagcattctacgtcttcgaagaactcgcccaatcaaccgccacctcctcgataatctccctcgtctcacaagccgtcagtgaactgcacttgggcagagttgaagaagctcagactgcgctagaacaggctacaaagaaagagcccgagtttgcacatgcgattgcgaatttgttggtcttgacggtgatcactggcaaggatacggaggagctgaagacgcagttgacgagtttggccccgcaacaccccttgctggtcgatatcgaggagaagagcgatctgttcgacaaggctgcttcgaagtttagcgctaaagtcggcgcttagatgcgcaattggggctagtgatagggaagaagatgagaagaaaacccatctgaggcagagtcatgatcagccaagatattggtgagcactcataaacggaggaaatggatgacgacacgaagcgaaccggtttgcgatttggggtcggagcctcacagttgggaaatgaaagcagaaagagtgtcgacgtcagacagcttcacgctcccgcctgcgtcgcaaggaaaaagctggtaatgctctgataaatattcggtgttatagacacagtgacatgagcaggaaatgaaaatcacttcagaatctcaaacgcagttcaacccacgaccgtgtctgaataagtaggatcatcgcattgtcgactgggttctgccattagaatgtgctctcacattacgtatgaaataaaacgggtatccagagtctcacgcagatactctctcatcacatcgccctcaatctcaaatcctcaattcgccatcacccatttcacatcccctcacccaaaccccaataccaacactcttatttagtctcctcatcatgaataacaagcgcatcaagaatcttattaaaccccgccacgctcccccgtcccgcatccaactcctcagccgtcttcctcgccctcctaatcaagatatccagcaccttcctcgtatactcaaacgtccccgtctcctcgatatacctcaccgcatatctcttaacgccctcatccgtagtcctctgcctcaaaatattcagaagttgtaaattctccggattagcccttatgctatgaataatgaggaaggagaatttgccctctgttagatcttcgcataggcctttgttagactcatatttgcctgattttaggttgcggtaatcgtcttgtatctggtagattatgcctagcaagttgacaagtggaacacagtcgatgttcgacgaagactcggcttgcatgagttttatcgccaatcggaaaagtccaccggttttgttccccaccatctcgagatagtcttcttccgtcggacaggtcagtgtgtcgcgccagaagagatccatgccctgccctctgtgaagatttatcaattcctccgtaaacacactgacggcttcggggttattcctgagcttttgcagttcttgtaaaagcgcggaagtatacgtagtttcctgagttgatcgtctgtgcgacgccgaagattgagtgagagactggtatcccgcggcgtaggagtgagttgtcttctacgtcgtctactagtaaggacgcagtgtgtagcattgcgacgacgcgcgcgatgacgttgagtgactcttgcggtacttcgagccagacgttaaacgagttgatgagacttgtcctaacgtcttttcccggcacgccgagaaggtagtcgtacggccccatgagagccttttccttttgctcgttccatgatttgagcgcagtgaaatccaagtctttggtctcgtaccgctctgggtcttgcgaccctgttgccgccatccccgtcatggattggtagaatgatgaggttgagcctgtcttgcggtgtgtgttgctgttgctgtggatgttctgcgccaaccagtttccctcgggcacgggccgtagcacagacttggctggcggcagtagcgtgggtgaggtcgtgtaaccggttgaggaagttcggggtggtatggcgttgggtgattgaaggtttatactggtggtgccggctggtgcgccggcgggtgggctaagggggatagacatttgatatgggggtctttcaacgctactactatctgtcttgttacctgttggatatatatggagatgcgcagcctgggtcgcttggagtagggagataagaaggaagccgcgactatgtagtggcttatgtgtccacaatagatatatctgcagatgtcattgagaggtcatgcacggcatacacggcacgaagcctgagccgtagaccgcagggaggctcggaagcggtatacagaagatctccgaacaggctacaggatacacggcggggctctctgtgggggctgaagactgctaccttgcgtatgtttcttggctatctcttttgactcgacttggctcaaataatcagatcagtcttgtctatttatgatgttcattatttatcgcttgagtatagcttcttatataactgtatagtcttacctactgtttatcgaaagacgttggaattcaatggcccccagctgcgtaaccagctgctggaatgaggcgcgacagggctagcagggggcggtatgcagccagttcttggtgcccgctatcagtggctgcagggcagtgagtgatgacgatttagactctgctagctcaggtacgtggacaggcgaatgcgacaatgatgatgccaacatgacacggg

SEQ ID NO: 28245 - DNA, 594 bp, Muscodor strobelii
  misc_feature: SGI cDNA ID NO. 569690
  misc_feature: Encodes the peptide sequence at SEQ ID NO 28246
atgtttgcaggtgcgaagtgtctatgtcagatgactataccgtatagagcgcctgaggtcccatccaacctcgcacctcgacgcatccctccttccctccgaagtcactacaacattattgcagagtccaaaactttccagctcctcgcacacagagcactgcgtcaacctgccacactaaatttgggagcatatctattctccctcgatcagatcacttccacactttcccatagtaagcatctgttcaggcctttcgccatcgatcggctcgcgctgcactcatttgtcggacacagtacccagcgcacgatggctcccaaaatcgatagaaagattggcaaagtccaggcctccggcccccgcgccggcgccagctctacttcacctgcctgcagagtcgtgaagtcgcgtatcacggccaaaaagactcgcttccacctgatcggagaatccgtctccgccgatgcaattgcaaagggcatccgtgagtccatcgcgcgagatcaggtgatcaagacccttgaacgtgagatcagagttctcgaagcattacgtgagaccactgatggcctcaaagctctgaagctctaa

SEQ ID NO: 28246 - protein, 197 aa, Muscodor strobelii
  misc_feature: SGI Peptide ID NO. 569690
MFAGAKCLCQMTIPYRAPEVPSNLAPRRIPPSLRSHYNIIAESKTFQLLAHRALRQPATLNLGAYLFSLDQITSTLSHSKHLFRPFAIDRLALHSFVGHSTQRTMAPKIDRKIGKVQASGPRAGASSTSPACRVVKSRITAKKTRFHLIGESVSADAIAKGIRESIARDQVIKTLEREIRVLEALRETTDGLKALKL

SEQ ID NO: 28247 - DNA, 1395 bp, Muscodor strobelii
  misc_feature: SGI cDNA ID NO. 569691
  misc_feature: Reduced expression when VOC is produced
  misc_feature: Encodes the peptide sequence at SEQ ID NO 28248
atgtggttagatagccggcagagattacgctctttgagcaatcgtctatcccggctacaaaaaatcgccctcggctttgtcatcaccactttcttcatttacgtcatatcgccctacgacagcgccctcagatccttcttcagattccaaggcactgttgtggtcgactactaccagagccattacccatcatcaggatcttggctatacagaaagcagcggtaccccgttgacctcgacaatgaggtcggtgtcataataaaaacaggctacggcaccaagaatcgcatcggcacgtcactgaaggcactcggcaacgagacgttcttccccgacatcctcgtcgttcaggatttcccagtgttaccagagcaaggcaaatatcagctcgcaaacggcaagaaagtggacaccgtcgacatcattggctggaatctggagaggggtgctctgaaaggccgagagcacttggagcgcattgctaaatacacgaacctggctgatgctgttgaggctgaagagtgggcattgtcggaaggattgggtaggcacattggttgggagctggacgccatgaagttccttcctgcccttgaatatgcgtggaataccatgcccaagaagaaatggtatctcatgctcgatgatgatacgtatgtgatcaaggggtctctgagcctcctcctcggccaagtcaactacggccaacctcactatataggcaacccagtaggagactacaaagggcggttttcccatggtggatcgtccgtcattctatcaggagccactctgagaaatctatttgagtggtaccctgaagttgctgccgaaggaaacctcgaatcaccgtcatctgtatggggtgataaactcctagccacaacattgcagaagattggaatctacctcgacgaatcttaccgccggctgttcaatggagaagcgccttgggtgacgcgtatgtggatggatcgactttgtctcccgctcatcggcttccacgggctaaacaacccggatgccatggcacaggttggggagacgttcaaaaaaattgatgggccagttttctggaaaacacttgcccaaatctacgaagcgccggactacgcctcgtttctcgatcagccggttcgagagaacatcaatttcgtcggacgagaggagaacggagtcagtgtggccatcgagggcatcaataataaagaggagtgcgtcgagctctgcaaccgcaattcgcggcaatgcatggcatggacgtacgacgatcgcatcaagcgctgtgtctatgctccgtgggccaccttgggagaattcgcagagggagtcgtttccggaatcaacgcgagggaggcacaaagagcagtatctcactgttatcggcctaggtaa

SEQ ID NO: 28248 - protein, 464 aa, Muscodor strobelii
  misc_feature: SGI Peptide ID NO. 569691
  misc_feature (75)..(460): NCBI GI: 119177659 Blast Desc: CIMG_07745 [Coccidioides immitis RS]
  misc_feature (22)..(455): NCBI GI: 46105541 Blast Desc: FG00379.1 [Gibberella zeae PH-1]
  misc_feature (38)..(460): NCBI GI: 256734585 Blast Desc: glycosyltransferase family 31 [Nectria haematococca mpVI 77-13-4]
  misc_feature (38)..(460): NCBI GI: 169768750 Blast Desc: [Aspergillus oryzae RIB40] gi|83766703|dbj|BAE56843.1| protein product [Aspergillus oryzae]
  misc_feature (36)..(460): NCBI GI: 116198859 Blast Desc: CHGG_07585 [Chaetomium globosum CBS 148.51] gi|88178864|gb|EAQ86332.1| CHGG_07585 [Chaetomium globosum CBS 148.51]
  misc_feature (6)..(443): NCBI GI: 85090098 Blast Desc: NCU07762 [Neurospora crassa OR74A] gi|28919598|gb|EAA29020.1| [Neurospora crassa OR74A]
  misc_feature (18)..(460): NCBI GI: 240107605 Blast Desc: CPC735_042280 [Coccidioides posadasii C735 delta SOWgp]
  misc_feature (36)..(460): NCBI GI: 171693013 Blast Desc: protein product [Podospora anserina] gi|170946455|emb|CAP73256.1| protein product [Podospora anserina]
  misc_feature (282)..(462): NCBI GI: 145615601 Blast Desc: MGG_05717 [Magnaporthe grisea 70-15] gi|145022410|gb|EDK06430.1| MGG_05717 [Magnaporthe grisea 70-15]
  misc_feature (186)..(392): NCBI GI: 50556764 Blast Desc: YALI0F23485p [Yarrowia lipolytica] gi|49651660|emb|CAG78601.1| YALI0F23485p [Yarrowia lipolytica]
  misc_feature: Useful for introducing or modulating the production of volatile compounds
MWLDSRQRLRSLSNRLSRLQKIALGFVITTFFIYVISPYDSALRSFFRFQGTVVVDYYQSHYPSSGSWLYRKQRYPVDLDNEVGVIIKTGYGTKNRIGTSLKALGNETFFPDILVVQDFPVLPEQGKYQLANGKKVDTVDIIGWNLERGALKGREHLERIAKYTNLADAVEAEEWALSEGLGRHIGWELDAMKFLPALEYAWNTMPKKKWYLMLDDDTYVIKGSLSLLLGQVNYGQPHYIGNPVGDYKGRFSHGGSSVILSGATLRNLFEWYPEVAAEGNLESPSSVWGDKLLATTLQKIGIYLDESYRRLFNGEAPWVTRMWMDRLCLPLIGFHGLNNPDAMAQVGETFKKIDGPVFWKTLAQIYEAPDYASFLDQPVRENINFVGREENGVSVAIEGINNKEECVELCNRNSRQCMAWTYDDRIKRCVYAPWATLGEFAEGVVSGINAREAQRAVSHCYRPR

SEQ ID NO: 28249 - DNA, 2769 bp, Muscodor strobelii
  misc_feature: SGI EST ID NO. CUFF.66959.0
  misc_feature: Variant of the nucleotide sequence at SEQ ID NO 28247
ttttgtctttggtttacttgcgttcgacagtgatgcgaattgtagtagagcttgccgtcggtagtgtcatcttcttctgttccagcttctgcgcgtgccaggtgccaagctgttcgagggcgtgtaagacttgcaggatcttctcagcctgcagcctctcaagaaccttgattcgttcaggtgcacgctcctgtacgctcctgaacgcattcctagacctctgacgaaattccctgcacttttacacactctccttttcactgtcacacacagcctttgcttgtcgcacagcacctcgcaaactctcaggtgttgagttctgcccgttagatgtaaacctatctcgtaccgcgtgtttccatttagcctcattgcttgcttgattgcttgctgtattacattacatgcatcttctgtagcgtgcttttgacccgggtcctctttcacacctctgtatatctacctagatggttgactgtctcactgatcggcaccgtttcgaaaccatcgcatcgtgtgtattcgcacacccacgctcgttactcctaccacaacgccgctcttccaccattcctccaaattcgacgccgactgcccactccaagatcttttaggacaaagacagcaaagctagacgcctcgaccgtccgagcccccgatttcccgccagcgaagcaccaacgagagaagaatgtggttagatagccggcagagattacgctctttgagcaatcgtctatcccggctacaaaaaatcgccctcggctttgtcatcaccactttcttcatttacgtcatatcgccctacgacagcgccctcagatccttcttcagattccaaggcactgttgtggtcgactactaccagagccattacccatcatcaggatcttggctatacagaaagcagcggtaccccgttgacctcgacaatgaggtcggtgtcataataaaaacaggctacggcaccaagaatcgcatcggcacgtcactgaaggcactcggcaacgagacgttcttccccgacatcctcgtcgttcaggatttcccagtgttaccagagcaaggcaaatatcagctcgcaaacggcaagaaagtggacaccgtcgacatcattggctggaatctggagaggggtgctctgaaaggccgagagcacttggagcgcattgctaaatacacgaacctggctgatgctgttgaggctgaagagtgggcattgtcggaaggattgggtaggcacattggttgggagctggacgccatgaagttccttcctgcccttgaatatgcgtggaataccatgcccaagaagaaatggtatctcatgctcgatgatgatacgtatgtgatcaaggggtctctgagcctcctcctcggccaagtcaactacggccaacctcactatataggcaacccagtaggagactacaaagggcggttttcccatggtggatcgtccgtcattctatcaggagccactctgagaaatctatttgagtggtaccctgaagttgctgccgaaggaaacctcgaatcaccgtcatctgtatggggtgataaactcctagccacaacattgcagaagattggaatctacctcgacgaatcttaccgccggctgttcaatggagaagcgccttgggtgacgcgtatgtggatggatcgactttgtctcccgctcatcggcttccacgggctaaacaacccggatgccatggcacaggttggggagacgttcaaaaaaattgatgggccagttttctggaaaacacttgcccaaatctacgaagcgccggactacgcctcgtttctcgatcagccggttcgagagaacatcaatttcgtcggacgagaggagaacggagtcagtgtggccatcgagggcatcaataataaagaggagtgcgtcgagctctgcaaccgcaattcgcggcaatgcatggcatggacgtacgacgatcgcatcaagcgctgtgtctatgctccgtgggccaccttgggagaattcgcagagggagtcgtttccggaatcaacgcgagggaggcacaaagagcagtatctcactgttatcggcctaggtaaagcatccgagtggtgtccctttatacatgtacctgtattatactacacgaagcatatgcgtatttctttctttgggggcatgggatgcataaggcgtgcctgaactggcacagaggagtccgcaactagagctcggccctccgatagacatggacagggcatttgatgaatttaatgatacccagggggttgcgtctgtaatgtcattaggcggcaacggctcaggatagtggtaatcgtaatgggcaccaaatccgcattgtctaaagctcttcctattgcgcctaatgattaagccttctctagagacgtgtgatcgatctatatcactatatttgcttgttcctctgaaatatagcatgtcacaggtaaatgacaggcgagcattgaatgcaaccctgacaattgcagcgtggttccccaacggaaaaggggtgcatgctgcagcatcacgtcgcaacgcaacctgataaattttggtctggacatgtccccctatcaaaccagctgatcgccagtgacaaaacatttgaacacgccgggctagaaatgagtagactctccgtctacgggggtcgatcgggtaccccgacgcattggcaaatgtacgcaatcccgtagtcaggctgaatatttgtagggatcccatgttgtatgatggcgacaacgttgagcgaccgtgt

SEQ ID NO: 28250 - DNA, 1245 bp, Muscodor strobelii
  misc_feature: SGI cDNA ID NO. 569692
  misc_feature: Encodes the peptide sequence at SEQ ID NO 28251
atgcccgagaacgtgcaaaatccccaggctaccggatccagttggacctcattcctgaagtccattgcgtccttcaacggcgatctcgcctccctgactgcaccgcctttcatcctctcttccaccagtctgactgagttcagctcgtactggtgcgagcatccctccgtattcgtcgctcccgccaaggagcaggatcccgcaaagagggctctattggtgcttcagtggttcttgacgactctcaaacaacaatatgcgagccggagtgagcaatatggcaacgagaagaagccccttaaccccttcttgggagagctgttcctgggcaaatgggaggacgatgccggcacaactgagctgatcagcgagcaagtcaaccatcacccacctgcaactgcatacagcatcagaaacgaggcgtccggtgtccacctacaaggctacaacgcgcaaaaggccagtttctacaagaccatcaacattaagcagatcggccacgccgtgctatcgcttcccgtacccggaaagcccagcgagaccgagtcctatctcatcaccctcccgtctctgcacgtcgaaggcttgattttcggatcgcctttcgtggagctcgacagcgcgtcctacatcacatcctccacaggtttcaccgccaagatcgactacgcaggcaagggctggatcggtgggaagaagaactcctttaccgccacgctgtacccctcgggcaaggagaaggacgtcatatacaactgctcaggccaatggacaaaggcattcgacatctacagtggtaatcctaagcaaaactctccaaagactctgctaggatcctgggaccctgccaagtcacccaccagcacactcattatcaaacccgtggaccaacagcatccgctcgaatcccggcgcgcatgggccggtgttgcagatggtatcgcgaaggggaatatggacttcgtaggcaaggaaaagactaagatcgagcaggcacagcgcgcaatgcggaagcaggagcaggccgagggcagggagtggacgcggaggtattttactgcccgagccgatccggaccctgtgctcgtgccgctggcgcagtttgtggggttgaatgctaacggggactcggacaagacgggtggactgtggaggtttgacggtgacaaggcagagaaggtcaagggcgaagcactgagtgatgaggataagactaagttggcgaaagagttgcttggtcaatag

SEQ ID NO: 28251 - protein, 414 aa, Muscodor strobelii
  misc_feature: SGI Peptide ID NO. 569692
  misc_feature (6)..(406): Pfam Id: PF01237 Pfam Desc: Oxysterol-binding protein
  misc_feature (68)..(352): Pfam Id: PF01237 Pfam Desc: Oxysterol-binding protein
  misc_feature (6)..(61): Pfam Id: PF01237 Pfam Desc: Oxysterol-binding protein
  misc_feature (18)..(414): NCBI GI: 171680373 Blast Desc: protein product [Podospora anserina] gi|170939813|emb|CAP65039.1| protein product [Podospora anserina]
  misc_feature (18)..(414): NCBI GI: 164423267 Blast Desc: NCU08578 [Neurospora crassa OR74A] gi|157070018|gb|EAA28639.2| NCU08578 [Neurospora crassa OR74A]
  misc_feature (5)..(414): NCBI GI: 116206838 Blast Desc: conserved [Chaetomium globosum CBS 148.51] gi|88183309|gb|EAQ90777.1| conserved [Chaetomium globosum CBS 148.51]
  misc_feature (5)..(414): NCBI GI: 39941614 Blast Desc: MGG_05718 [Magnaporthe grisea 70-15] gi|145022411|gb|EDK06431.1| MGG_05718 [Magnaporthe grisea 70-15]
  misc_feature (4)..(414): NCBI GI: 261352857 Blast Desc: kes1 [Verticillium albo-atrum VaMs.102]
  misc_feature (7)..(413): NCBI GI: 46111779 Blast Desc: FG02771.1 [Gibberella zeae PH-1]
  misc_feature (9)..(413): NCBI GI: 256722004 Blast Desc: [Nectria haematococca mpVI 77-13-4]
  misc_feature (14)..(391): NCBI GI: 154314987 Blast Desc: BC1G_04835 [Botryotinia fuckeliana B05.10] gi|150848373|gb|EDN23566.1| BC1G_04835 [Botryotinia fuckeliana B05.10]
  misc_feature (14)..(393): NCBI GI: 156052789 Blast Desc: SS1G_06562 [Sclerotinia sclerotiorum 1980] gi|154704340|gb|EDO04079.1| SS1G_06562 [Sclerotinia sclerotiorum 1980]
  misc_feature (8)..(395): NCBI GI: 189205124 Blast Desc: PTRG_08565 [Pyrenophora tritici-repentis Pt-1C-BFP] gi|187985996|gb|EDU51484.1| PTRG_08565 [Pyrenophora tritici-repentis Pt-1C-BFP]
MPENVQNPQATGSSWTSFLKSIASFNGDLASLTAPPFILSSTSLTEFSSYWCEHPSVFVAPAKEQDPAKRALLVLQWFLTTLKQQYASRSEQYGNEKKPLNPFLGELFLGKWEDDAGTTELISEQVNHHPPATAYSIRNEASGVHLQGYNAQKASFYKTINIKQIGHAVLSLPVPGKPSETESYLITLPSLHVEGLIFGSPFVELDSASYITSSTGFTAKIDYAGKGWIGGKKNSFTATLYPSGKEKDVIYNCSGQWTKAFDIYSGNPKQNSPKTLLGSWDPAKSPTSTLIIKPVDQQHPLESRRAWAGVADGIAKGNMDFVGKEKTKIEQAQRAMRKQEQAEGREWTRRYFTARADPDPVLVPLAQFVGLNANGDSDKTGGLWRFDGDKAEKVKGEALSDEDKTKLAKELLGQ

SEQ ID NO: 28252 - DNA, 5770 bp, Muscodor strobelii
  misc_feature: SGI EST ID NO. CUFF.67110.0
  misc_feature: Variant of the nucleotide sequence at SEQ ID NO 28250
ttcccaccttgagggataggaaagtactgctttacttgacattattcgcattggtctccgtttagtattactgtgtctatccgagcctcatcaggacttgcctcctgccctgtacagtgactctaatgcagtcaatacctgctatctcagctagaaatacaagccatccaacactgccactttcctatgccgtcatgtagctttgttatcactagaacacgcttttccgtagcagaccaacattcagtgtagagccaaagcttgctgtcagacaggcagacacttgattttcccatcgctagatcggcattttccgtcactgacgctctcatcatctacttctccatctctagtaatcctccactatcgactatcaccactcctagttcttccagcctgcccctaccgtcactttgacaccccactcaactgcctagactgagtaccgacgtaccatcattgacccctcaggttcatctaagaatataccgtgcatcgatacgattaatatcactgtatcaaacttaccggcgtccacgtacaaacgcgacacgtcgccatcatgcccgagaacgtgcaaaatccccaggctaccggatccagttggacctcattcctgaagtccattgcgtccttcaacggcgatctcgcctccctgactgcaccgcctttcatcctctcttccaccagtctgactgagttcagctcgtactggtgcgagcatccctccgtattcgtcgctcccgccaaggagcaggatcccgcaaagagggctctattggtgcttcagtggttcttgacgactctcaaacaacaatatgcgagccggagtgagcaatatggcaacgagaagaagccccttaaccccttcttgggagagctgttcctgggcaaatgggaggacgatgccggcacaactgagctgatcagcgagcaagtcaaccatcacccacctgcaactgcatacagcatcagaaacgaggcgtccggtgtccacctacaaggctacaacgcgcaaaaggccagtttctacaagaccatcaacattaagcagatcggccacgccgtgctatcgcttcccgtacccggaaagcccagcgagaccgagtcctatctcatcaccctcccgtctctgcacgtcgaaggcttgattttcggatcgcctttcgtggagctcgacagcgcgtcctacatcacatcctccacaggtttcaccgccaagatcgactacgcaggcaagggctggatcggtgggaagaagaactcctttaccgccacgctgtacccctcgggcaaggagaaggacgtcatatacaactgctcaggccaatggacaaaggcattcgacatctacagtggtaatcctaagcaaaactctccaaagactctgctaggatcctgggaccctgccaagtcacccaccagcacactcattatcaaacccgtggaccaacagcatccgctcgaatcccggcgcgcatgggccggtgttgcagatggtatcgcgaaggggaatatggacttcgtaggcaaggaaaagactaagatcgagcaggcacagcgcgcaatgcggaagcaggagcaggccgagggcagggagtggacgcggaggtattttactgcccgagccgatccggaccctgtgctcgtgccgctggcgcagtttgtggggttgaatgctaacggggactcggacaagacgggtggactgtggaggtttgacggtgacaaggcagagaaggtcaagggcgaagcactgagtgatgaggataagactaagttggcgaaagagttgcttggtcaatagatttaaggggtgctttaaagggtgttttccggatggggactattcgcgaatagaatatggcataatcaagtccatgaacgacgcggaaatgaacgattggttctttttaagttcgtgccattgatgggaacttagtggagtataagacgagatatctacttaccccatcgtcgatggatactaggtagtataacaccttggagcgtcacgatgctgaaggctcataaaaatgtcgttcattgtgtatctcattcataattcttactcatctaccacatcccgcacagcggcgcgggagatcaggggccgctcttccatcataataagtctaagcatattccactacgccgtcctaaactgttccaacaccttatcaggcaatctaggaatggagaaactcttccccttcctattactgacccagattttcgtcctctctctcctctcctcactcaaactacaggtatgtctagcctcagccgacccagctccatcattctagtttgtcgctgtgcgctcgcggcgcggcttcttgaaacaggcgaactccgtcttgctctgttccctcagcttcttgagcagttccctcatgccgggcagctcgtcctgtaacttcgcccgtgccgtgggatccgtcttggagtcgagcatggagtatatctctgcttgtatcgctgatgctttttcggtcgtgtagagactcagtgtctgagctacgaattctacgtctagggtggcttgcatgagagacccgaggtcgaagctcgggcgtgagcggaggacctcgcagagttctcgcgaggtctgctcgaggaggaaggagaggacttggctggttagggatggtgcggtggtggacacttgcgtgtgaactagcacaagtgagaggagtagttggtatacgtaagattttgcttctgtgggcttgcccgatggtgcccagtcgggatcggcaagccctgtgcggatggttttccgggctgcgtcgacggctggtttcgtgtacgtctggaacagtcttgcgtctatttgtcctagtacgtctttgatagttttagactcatccgtgagctggactgagaacgaggtttcgaattgagagttcagatttggcacaacttgtgaacgaagagcttggagattgctgagggttagtagcatgcggacgttctacgcataacattagcagggccgtcgttattaaagtcagttatggaagaaatcacgtactctgtcgccagcgtcgactgtgccctggcaagcgattatggaggttctctccctgttggaatcgctcggagcttcaagatccgtggtccaatcgtcttccgcctttttgatcgacttttcagcgttctcaaccataccactgagtgccttatagagcgtcgtgacatactgagacctcaccatttgcaggagtctgtctggtggcggtagaacgatgtctccagggccagacttagagactgcctcggaaacgtagagtatcttctgcattccggcgagtaatgatccctcgaaagcagcgaaggtggcaggcatgcaagtcacgtctcccgtctctttcgatcgctgccagtcctctacgaatctgatattctgtgcatcattattccacgcagaacatagggcggcaacacatctatcacgtgcggctcctactaggttccttaaaagctccatctgtttagcatcatcctgactgacaggagctacgcctgccatttcagctgcaccagtgccgacgaaaccaagcatcttggacagataatgaacgccgctgagtgagttggaacccggtggccagaacgcaaatttctcccatgattcgcctcttctgggcgaagggggcgggagattgttggcatcaaagttgaatcgaggatctctggcacttgtgggtgaaagttgagcagatctgggtgtgcctggcgatgggggtagaggggagaagagcaacgagatgtcttcagggggaacccccgcgaagaattcaaacacatgagcacggatcatatcgacaagctcgatggtggccttccttaggtccagagtgccctgcgtagagagacgatggtgttcacgagactctccattgtagcccgttgggagagatttctgcgcttttccgtcgatgaagctatcgacagtctgccaaaactccaagacttctcccaagacgccctgagaggacagtaggctcgacagaaatgataccatcttctcccatagttcgacgacttccggagaatccagcccattgggcttatcaccggctgtctgccgaccaatgccgcgcaagtgcgagactaagacttgtgagtttggcttgtcagagttggccaaccggcgtctcaagacttcaatctcgactttagctctatcaccgaccagagagaccctgcccttcaagtagtcatatctactcagaagccacacccagatcggactatcctcaacgccgagttctaacagcaagctgatgagctccatgtgctggtcttgagccggactgctgatgtctgcttttgatacattgtgaagcatggttaacctcctccatacatcgcgtttgaacatcttgatctgatcctcgacatcatgccacatgcgagctgcaatgaggatctggtaggtctggatctcacttggcggcgtcgatcccaggtcgctgacaagcttgcgcgcctcatctgcgaatcgcctggcgcgattgacttcttccaccagcgcatcgtagtcttttcgctttatgctctcggcaatattggagcccgtttcaaagtattccctatagcgatcgagcgaagtggacacagtcttgagattctcctctttttcacgcccccccagcgcggggccccagacctcctcagctttggcggaaacgtcgagcaggggagtcttgatgcccgacacaccgtaatcactctctttgacaagagcattctttttcttggtatcaggcatagtagggacgggcgaggcgagcgggttattcccaaaggcggcaccaccagcgctgcccttgaagctgccgcggcttgcgtggcgcgaatgggcgcgggcgcggttagatggggcagagggtggctcgacgcctctgtatttcatctccttgtagacgttgtcgatggttgccttggcgcgaacgaacctctcgaagttggactcgacgaggaccttcagggaggccgatttctggtcgatggagcgcgatagaagatcgaggccgctcaacaggaactgggtgtcagcattggcatgcatctgcgagaggaacagagcgggcgagaagctcgtggaagacatgaggaagcgattgcgcagacgcggatcgtcttggatgggcactccgagctccttgagcgagcgcacgacgctctcggagcttcccagaggatcgggctcatctctctggacgaggttgctgacgccggtggcagacttctcggagccggcgacgatgctggaccgagtgctcacagcgcgctcgagggcctggtagcgagacttccggcgattgatcttctgcttcctctgctgcagctcgctgtcggaatcgtcggactcgttgttcttctcggccggccaggcggtgggcatcaaggtcgacacgccatagaaatcgaggacctgccgatcgtagtcggccatggttgttgcttgagctgcagatggctacggacggggacgaagagctggggtgatgtggcatgcgaattgggagggagagtggacgtagacagaaaacggttggtgatgaatatcagcgcactcccattgagctgcatgacataattgcctacgctctaggttcagcttgtgacctatctagggttttaacaatggaaaaagaattactgcctcgtgatggccaggcagtatcatgctcgtttcaagctgtgacatctctaattgacaggagatagcacctgggagctctagggtaggctcacg

SEQ ID NO: 28253 - DNA, 3102 bp, Muscodor strobelii
  misc_feature: SGI cDNA ID NO. 569693
  misc_feature: Encodes the peptide sequence at SEQ ID NO 28254
atggccgactacgatcggcaggtcctcgatttctatggcgtgtcgaccttgatgcccaccgcctggccggccgagaagaacaacgagtccgacgattccgacagcgagctgcagcagaggaagcagaagatcaatcgccggaagtctcgctaccaggccctcgagcgcgctgtgagcactcggtccagcatcgtcgccggctccgagaagtctgccaccggcgtcagcaacctcgtccagagagatgagcccgatcctctgggaagctccgagagcgtcgtgcgctcgctcaaggagctcggagtgcccatccaagacgatccgcgtctgcgcaatcgcttcctcatgtcttccacgagcttctcgcccgctctgttcctctcgcagatgcatgccaatgctgacacccagttcctgttgagcggcctcgatcttctatcgcgctccatcgaccagaaatcggcctccctgaaggtcctcgtcgagtccaacttcgagaggttcgttcgcgccaaggcaaccatcgacaacgtctacaaggagatgaaatacagaggcgtcgagccaccctctgccccatctaaccgcgcccgcgcccattcgcgccacgcaagccgcggcagcttcaagggcagcgctggtggtgccgcctttgggaataacccgctcgcctcgcccgtccctactatgcctgataccaagaaaaagaatgctcttgtcaaagagagtgattacggtgtgtcgggcatcaagactcccctgctcgacgtttccgccaaagctgaggaggtctggggccccgcgctgggggggcgtgaaaaagaggagaatctcaagactgtgtccacttcgctcgatcgctatagggaatactttgaaacgggctccaatattgccgagagcataaagcgaaaagactacgatgcgctggtggaagaagtcaatcgcgccaggcgattcgcagatgaggcgcgcaagcttgtcagcgacctgggatcgacgccgccaagtgagatccagacctaccagatcctcattgcagctcgcatgtggcatgatgtcgaggatcagatcaagatgttcaaacgcgatgtatggaggaggttaaccatgcttcacaatgtatcaaaagcagacatcagcagtccggctcaagaccagcacatggagctcatcagcttgctgttagaactcggcgttgaggatagtccgatctgggtgtggcttctgagtagatatgactacttgaagggcagggtctctctggtcggtgatagagctaaagtcgagattgaagtcttgagacgccggttggccaactctgacaagccaaactcacaagtcttagtctcgcacttgcgcggcattggtcggcagacagccggtgataagcccaatgggctggattctccggaagtcgtcgaactatgggagaagatggtatcatttctgtcgagcctactgtcctctcagggcgtcttgggagaagtcttggagttttggcagactgtcgatagcttcatcgacggaaaagcgcagaaatctctcccaacgggctacaatggagagtctcgtgaacaccatcgtctctctacgcagggcactctggacctaaggaaggccaccatcgagcttgtcgatatgatccgtgctcatgtgtttgaattcttcgcgggggttccccctgaagacatctcgttgctcttctcccctctacccccatcgccaggcacacccagatctgctcaactttcacccacaagtgccagagatcctcgattcaactttgatgccaacaatctcccgcccccttcgcccagaagaggcgaatcatgggagaaatttgcgttctggccaccgggttccaactcactcagcggcgttcattatctgtccaagatgcttggtttcgtcggcactggtgcagctgaaatggcaggcgtagctcctgtcagtcaggatgatgctaaacagatggagcttttaaggaacctagtaggagccgcacgtgatagatgtgttgccgccctatgttctgcgtggaataatgatgcacagaatatcagattcgtagaggactggcagcgatcgaaagagacgggagacgtgacttgcatgcctgccaccttcgctgctttcgagggatcattactcgccggaatgcagaagatactctacgtttccgaggcagtctctaagtctggccctggagacatcgttctaccgccaccagacagactcctgcaaatggtgaggtctcagtatgtcacgacgctctataaggcactcagtggtatggttgagaacgctgaaaagtcgatcaaaaaggcggaagacgattggaccacggatcttgaagctccgagcgattccaacagggagagaacctccataatcgcttgccagggcacagtcgacgctggcgacagaaacgtccgcatgctactaaccctcagcaatctccaagctcttcgttcacaagttgtgccaaatctgaactctcaattcgaaacctcgttctcagtccagctcacggatgagtctaaaactatcaaagacgtactaggacaaatagacgcaagactgttccagacgtacacgaaaccagccgtcgacgcagcccggaaaaccatccgcacagggcttgccgatcccgactgggcaccatcgggcaagcccacagaagcaaaatcttacgtataccaactactcctctcacttgtgctagttcacacgcaagtgtccaccaccgcaccatccctaaccagccaagtcctctccttcctcctcgagcagacctcgcgagaactctgcgaggtcctccgctcacgcccgagcttcgacctcgggtctctcatgcaagccaccctagacgtagaattcgtagctcagacactgagtctctacacgaccgaaaaagcatcagcgatacaagcagagatatactccatgctcgactccaagacggatcccacggcacgggcgaagttacaggacgagctgcccggcatgagggaactgctcaagaagctgagggaacagagcaagacggagttcgcctgtttcaagaagccgcgccgcgagcgcacagcgacaaactag

SEQ ID NO: 28254 - protein, 1033 aa, Muscodor strobelii
  misc_feature: SGI Peptide ID NO. 569693
  misc_feature (1)..(1031): NCBI GI: 39971669 Blast Desc: MGG_07150 [Magnaporthe grisea 70-15] gi|145019625|gb|EDK03853.1| MGG_07150 [Magnaporthe grisea 70-15]
  misc_feature (1)..(1024): NCBI GI: 261352304 Blast Desc: conserved [Verticillium albo-atrum VaMs.102]
  misc_feature (1)..(1027): NCBI GI: 171690596 Blast Desc: protein product [Podospora anserina] gi|170945246|emb|CAP71357.1| protein product [Podospora anserina]
  misc_feature (1)..(1027): NCBI GI: 256727591 Blast Desc: [Nectria haematococca mpVI 77-13-4]
  misc_feature (1)..(1027): NCBI GI: 116196028 Blast Desc: CHGG_04612 [Chaetomium globosum CBS 148.51] gi|88180525|gb|EAQ87993.1| CHGG_04612 [Chaetomium globosum CBS 148.51]
  misc_feature (1)..(1027): NCBI GI: 46136127 Blast Desc: FG09579.1 [Gibberella zeae PH-1]
  misc_feature (2)..(1027): NCBI GI: 164423819 Blast Desc: NCU07698 [Neurospora crassa OR74A] gi|157070245|gb|EAA33048.2| conserved [Neurospora crassa OR74A]
  misc_feature (1)..(1033): NCBI GI: 154309631 Blast Desc: BC1G_07286 [Botryotinia fuckeliana B05.10] gi|150852309|gb|EDN27501.1| BC1G_07286 [Botryotinia fuckeliana B05.10]
  misc_feature (1)..(1033): NCBI GI: 156045533 Blast Desc: SS1G_09957 [Sclerotinia sclerotiorum 1980] gi|154694350|gb|EDN94088.1| SS1G_09957 [Sclerotinia sclerotiorum 1980]
  misc_feature (1)..(1026): NCBI GI: 239611808 Blast Desc: exocyst complex component Sec5 [Ajellomyces dermatitidis ER-3]
MADYDRQVLDFYGVSTLMPTAWPAEKNNESDDSDSELQQRKQKINRRKSRYQALERAVSTRSSIVAGSEKSATGVSNLVQRDEPDPLGSSESVVRSLKELGVPIQDDPRLRNRFLMSSTSFSPALFLSQMHANADTQFLLSGLDLLSRSIDQKSASLKVLVESNFERFVRAKATIDNVYKEMKYRGVEPPSAPSNRARAHSRHASRGSFKGSAGGAAFGNNPLASPVPTMPDTKKKNALVKESDYGVSGIKTPLLDVSAKAEEVWGPALGGREKEENLKTVSTSLDRYREYFETGSNIAESIKRKDYDALVEEVNRARRFADEARKLVSDLGSTPPSEIQTYQILIAARMWHDVEDQIKMFKRDVWRRLTMLHNVSKADISSPAQDQHMELISLLLELGVEDSPIWVWLLSRYDYLKGRVSLVGDRAKVEIEVLRRRLANSDKPNSQVLVSHLRGIGRQTAGDKPNGLDSPEVVELWEKMVSFLSSLLSSQGVLGEVLEFWQTVDSFIDGKAQKSLPTGYNGESREHHRLSTQGTLDLRKATIELVDMIRAHVFEFFAGVPPEDISLLFSPLPPSPGTPRSAQLSPTSARDPRFNFDANNLPPPSPRRGESWEKFAFWPPGSNSLSGVHYLSKMLGFVGTGAAEMAGVAPVSQDDAKQMELLRNLVGAARDRCVAALCSAWNNDAQNIRFVEDWQRSKETGDVTCMPATFAAFEGSLLAGMQKILYVSEAVSKSGPGDIVLPPPDRLLQMVRSQYVTTLYKALSGMVENAEKSIKKAEDDWTTDLEAPSDSNRERTSIIACQGTVDAGDRNVRMLLTLSNLQALRSQVVPNLNSQFETSFSVQLTDESKTIKDVLGQIDARLFQTYTKPAVDAARKTIRTGLADPDWAPSGKPTEAKSYVYQLLLSLVLVHTQVSTTAPSLTSQVLSFLLEQTSRELCEVLRSRPSFDLGSLMQATLDVEFVAQTLSLYTTEKASAIQAEIYSMLDSKTDPTARAKLQDELPGMRELLKKLREQSKTEFACFKKPRRERTATN

SEQ ID NO: 28255 - DNA, 5818 bp, Muscodor strobelii
  misc_feature: SGI EST ID NO. CUFF.67111.1
  misc_feature: Variant of the nucleotide sequence at SEQ ID NO 28253
cgtgagcctaccctagagctcccaggtgctatctcctgtcaattagagatgtcacagcttgaaacgagcatgatactgcctggccatcacgaggcagtaattctttttccattgttaaaaccctagataggtcacaagctgaacctagagcgtaggcaattatgtcatgcagctcaatgggagtgcgctgatattcatcaccaaccgttttctgtctacgtccactctccctcccaattcgcatgccacatcaccccagctcttcgtccccgtccgtagccatctgcagctcaagcaacaaccatggccgactacgatcggcaggtcctcgatttctatggcgtgtcgaccttgatgcccaccgcctggccggccgagaagaacaacgagtccgacgattccgacagcgagctgcagcagaggaagcagaagatcaatcgccggaagtctcgctaccaggccctcgagcgcgctgtgagcactcggtccagcatcgtcgccggctccgagaagtctgccaccggcgtcagcaacctcgtccagagagatgagcccgatcctctgggaagctccgagagcgtcgtgcgctcgctcaaggagctcggagtgcccatccaagacgatccgcgtctgcgcaatcgcttcctcatgtcttccacgagcttctcgcccgctctgttcctctcgcagatgcatgccaatgctgacacccagttcctgttgagcggcctcgatcttctatcgcgctccatcgaccagaaatcggcctccctgaaggtcctcgtcgagtccaacttcgagaggttcgttcgcgccaaggcaaccatcgacaacgtctacaaggagatgaaatacagaggcgtcgagccaccctctgccccatctaaccgcgcccgcgcccattcgcgccacgcaagccgcggcagcttcaagggcagcgctggtggtgccgcctttgggaataacccgctcgcctcgcccgtccctactatgcctgataccaagaaaaagaatgctcttgtcaaagagagtgattacggtgtgtcgggcatcaagactcccctgctcgacgtttccgccaaagctgaggaggtctggggccccgcgctgggggggcgtgaaaaagaggagaatctcaagactgtgtccacttcgctcgatcgctatagggaatactttgaaacgggctccaatattgccgagagcataaagcgaaaagactacgatgcgctggtggaagaagtcaatcgcgccaggcgattcgcagatgaggcgcgcaagcttgtcagcgacctgggatcgacgccgccaagtgagatccagacctaccagatcctcattgcagctcgcatgtggcatgatgtcgaggatcagatcaagatgttcaaacgcgatgtatggaggaggttaaccatgcttcacaatgtatcaaaagcagacatcagcagtccggctcaagaccagcacatggagctcatcagcttgctgttagaactcggcgttgaggatagtccgatctgggtgtggcttctgagtagatatgactacttgaagggcagggtctctctggtcggtgatagagctaaagtcgagattgaagtcttgagacgccggttggccaactctgacaagccaaactcacaagtcttagtctcgcacttgcgcggcattggtcggcagacagccggtgataagcccaatgggctggattctccggaagtcgtcgaactatgggagaagatggtatcatttctgtcgagcctactgtcctctcagggcgtcttgggagaagtcttggagttttggcagactgtcgatagcttcatcgacggaaaagcgcagaaatctctcccaacgggctacaatggagagtctcgtgaacaccatcgtctctctacgcagggcactctggacctaaggaaggccaccatcgagcttgtcgatatgatccgtgctcatgtgtttgaattcttcgcgggggttccccctgaagacatctcgttgctcttctcccctctacccccatcgccaggcacacccagatctgctcaactttcacccacaagtgccagagatcctcgattcaactttgatgccaacaatctcccgcccccttcgcccagaagaggcgaatcatgggagaaatttgcgttctggccaccgggttccaactcactcagcggcgttcattatctgtccaagatgcttggtttcgtcggcactggtgcagctgaaatggcaggcgtagctcctgtcagtcaggatgatgctaaacagatggagcttttaaggaacctagtaggagccgcacgtgatagatgtgttgccgccctatgttctgcgtggaataatgatgcacagaatatcagattcgtagaggactggcagcgatcgaaagagacgggagacgtgacttgcatgcctgccaccttcgctgctttcgagggatcattactcgccggaatgcagaagatactctacgtttccgaggcagtctctaagtctggccctggagacatcgttctaccgccaccagacagactcctgcaaatggtgaggtctcagtatgtcacgacgctctataaggcactcagtggtatggttgagaacgctgaaaagtcgatcaaaaaggcggaagacgattggaccacggatcttgaagctccgagcgattccaacagggagagaacctccataatcgcttgccagggcacagtcgacgctggcgacagaaacgtccgcatgctactaaccctcagcaatctccaagctcttcgttcacaagttgtgccaaatctgaactctcaattcgaaacctcgttctcagtccagctcacggatgagtctaaaactatcaaagacgtactaggacaaatagacgcaagactgttccagacgtacacgaaaccagccgtcgacgcagcccggaaaaccatccgcacagggcttgccgatcccgactgggcaccatcgggcaagcccacagaagcaaaatcttacgtataccaactactcctctcacttgtgctagttcacacgcaagtgtccaccaccgcaccatccctaaccagccaagtcctctccttcctcctcgagcagacctcgcgagaactctgcgaggtcctccgctcacgcccgagcttcgacctcgggtctctcatgcaagccaccctagacgtagaattcgtagctcagacactgagtctctacacgaccgaaaaagcatcagcgatacaagcagagatatactccatgctcgactccaagacggatcccacggcacgggcgaagttacaggacgagctgcccggcatgagggaactgctcaagaagctgagggaacagagcaagacggagttcgcctgtttcaagaagccgcgccgcgagcgcacagcgacaaactagaatgatggagctgggtcggctgaggctagacatacctgtagtttgagtgaggagaggagagagaggacgaaaatctgggtcagtaataggaaggggaagagtttctccattcctagattgcctgataaggtgttggaacagtttaggacggcgtagtggaatatgcttagacttattatgatggaagagcggcccctgatctcccgcgccgctgtgcgggatgtggtagatgagtaagaattatgaatgagatacacaatgaacgacatttttatgagccttcagcatcgtgacgctccaaggtgttatactacctagtatccatcgacgatggggtaagtagatatctcgtcttatactccactaagttcccatcaatggcacgaacttaaaaagaaccaatcgttcatttccgcgtcgttcatggacttgattatgccatattctattcgcgaatagtccccatccggaaaacaccctttaaagcaccccttaaatctattgaccaagcaactctttcgccaacttagtcttatcctcatcactcagtgcttcgcccttgaccttctctgccttgtcaccgtcaaacctccacagtccacccgtcttgtccgagtccccgttagcattcaaccccacaaactgcgccagcggcacgagcacagggtccggatcggctcgggcagtaaaatacctccgcgtccactccctgccctcggcctgctcctgcttccgcattgcgcgctgtgcctgctcgatcttagtcttttccttgcctacgaagtccatattccccttcgcgataccatctgcaacaccggcccatgcgcgccgggattcgagcggatgctgttggtccacgggtttgataatgagtgtgctggtgggtgacttggcagggtcccaggatcctagcagagtctttggagagttttgcttaggattaccactgtagatgtcgaatgcctttgtccattggcctgagcagttgtatatgacgtccttctccttgcccgaggggtacagcgtggcggtaaaggagttcttcttcccaccgatccagcccttgcctgcgtagtcgatcttggcggtgaaacctgtggaggatgtgatgtaggacgcgctgtcgagctccacgaaaggcgatccgaaaatcaagccttcgacgtgcagagacgggagggtgatgagataggactcggtctcgctgggctttccgggtacgggaagcgatagcacggcgtggccgatctgcttaatgttgatggtcttgtagaaactggccttttgcgcgttgtagccttgtaggtggacaccggacgcctcgtttctgatgctgtatgcagttgcaggtgggtgatggctggaagactgatgtcagtaggggatgaatttacgggttgcgcggcatcgactcacttgacttgctcgctgatcagctcagttgtgccggcatcgtcctcccatttgcccaggaacagctctcccaagaaggggttaaggggcttcttctcgttgccatattgctcactccggctcgcatattgttgtttgagagtcgtcaagaaccactgaagcaccaatagagccctctttgcgggatcctgctccttggcgggagcgacgaatacggagggatgctcgcaccagtacgagctgaactcagtcagactggtggaagagaggatgaaaggcggtgcagtcagggaggcgagatcgccgttgaaggacgcaatggactggcgacaagacggtcaatatacattgcgcagcgtggggctttcaccgtaccttcaggaatgaggtccaactggatccggtagcctggggattttgcacgttctcgggcatgatggcgacgtgtcgcgtttgtacgtggacgccggtaagtttgatacagtgatattaatcgtatcgatgcacggtatattcttagatgaacctgaggggtcaatgatggtacgtcggtactcagtctaggcagttgagtggggtgtcaaagtgacggtaggggcaggctggaagaactaggagtggtgatagtcgatagtggaggattactagagatggagaagtagatgatgagagcgtcagtgacggaaaatgccgatctagcgatgggaaaatcaagtgtctgcctgtctgacagcaagctttggctctacactgaatgttggtctgctacggaaaagcgtgttctagtgataacaaagctacatgacggcataggaaagtggcagtgttggatggcttgtatttctagctgagatagcaggtattgactgcattagagtcactgtacagggcaggaggcaagtcctgatgaggctcggatagacacagtaatactaaacggagaccaatgcgaataatgtcaagtaaagcagtactttcctatccctcaaggtgggaa

SEQ ID NO: 28256 - DNA, 1728 bp, Muscodor strobelii
  misc_feature: SGI cDNA ID NO. 569694
  misc_feature: Encodes the peptide sequence at SEQ ID NO 28257
atgtgtggcattcatgccatcgtgtctggatctatcccagctcggctctcgcctgagctagaacgatctcttgtcaaccgaggtccagatcacctgggacagactgagcacaatgtcactggtgctgacccaaatcataatgtgcatttgcgtctcacttcgactgtcctagcactacgaggagatcatgtcacgaaacagcctctcgaggaagctttagggacaggctcggctctgtgctggaacggcgaggcgtggaaaatcagtggccaggtcccgggcgggaatgacggagaagcagtattgtctttgctgcagcccccgccatcttccactttacaaacacgtgaagctcatatcgtcaacggaatacgaagtatcgatggcccgttcgcatttgtatatttcgattcgcctgcaaatcgtctatacttcggccgtgaccgcctcgggaggcgatctcttctcgtgaaatactcacctgagacgagttccttcgctatatcaagcattgctgacacgccaagcgccggctgggaagaggtcaacgctactggttttcattccgtagacctgtctacttgtggcaatgcggatcaagttgactggcagagccttgttacggcacatacttggcttgaaactacgagcgcggaaatgatgtcaagtatcggtattttcaataacgaggctccaccttctagccatcagttggactctgattctccatcaattcgaatactcagacactggctggtggaatcgctaaaagcaagagttttagacattccggagccaccatcaccaggtattgaagcggacgttgacacccgtgttgccattcttttctcgggaggcttagattccactgtccttgcaaggctcgcgcacgatttattaccaaagaaccagggtatcgatttgataaatgttgccttcgaaaacccgcgtcaggtggccctagaagcccgacaaccacatttacgtgcttcggatacatatgaagggtgtccagatagagccactggacggaaggctttcgctgaacttcagtccacctgtcctggacgatattggcgcttcatcgccgcaaatgttccgttcgaagaagctatgactcacaaatctaaagtcatatcgttgatgtatccacacgacacagaaatggacttgtccattggtttcgctctatactttgctgccagaggtataggactctcttacgatgatagcgccaactggcagtcttctgccccactggcctgtactcccgcacgggtcctcttgtctggcttaggtgcggacgaactgtttggaggctactcccgtcatgaagtagctttcaaaagaggtggttatgcgctcctaatcgatgagttgaagctcgatgtcggtcgcatcggccagcgcaatcttggccgagacgatcgaattatggcccactgggggaaagaagttcgctttccatacctagatgaggaatttgtgcggtttgcgattggtctaccggtttgggaaaagtgtgatttccagaatgcttttcaccctgcggtcattgatccagctaaacgattgctgagactactggcggaccagctaggtcttccgatcaccgcacgtcaaaagaaaaaggcgattcaattcggctcgagaaccgctaaaatggagagctcaaccggccggctccgtggcacagctcaagtttctctcggaaggcagttctggtaa

SEQ ID NO: 28257 - protein, 575 aa, Muscodor strobelii
  misc_feature: SGI Peptide ID NO. 569694
  misc_feature (247)..(543): Pfam Id: PF00733 Pfam Desc: Asparagine synthase
  misc_feature (1)..(569): NCBI GI: 256734485 Blast Desc: NECHADRAFT_90078 [Nectria haematococca mpVI 77-13-4]
  misc_feature (1)..(569): NCBI GI: 46107442 Blast Desc: FG00604.1 [Gibberella zeae PH-1]
  misc_feature (1)..(569): NCBI GI: 85068277 Blast Desc: NCU07300 [Neurospora crassa OR74A] gi|28923751|gb|EAA32918.1| conserved [Neurospora crassa OR74A]
  misc_feature (1)..(569): NCBI GI: 170940163 Blast Desc: protein product [Podospora anserina]
  misc_feature (1)..(569): NCBI GI: 116195690 Blast Desc: CHGG_04443 [Chaetomium globosum CBS 148.51] gi|88180356|gb|EAQ87824.1| CHGG_04443 [Chaetomium globosum CBS 148.51]
  misc_feature (1)..(569): NCBI GI: 169764893 Blast Desc: [Aspergillus oryzae RIB40] gi|83764772|dbj|BAE54916.1| protein product [Aspergillus oryzae]
  misc_feature (1)..(569): NCBI GI: 119500064 Blast Desc: asparagine synthase related protein [Neosartorya fischeri NRRL 181] gi|119414954|gb|EAW24892.1| asparagine synthase related protein [Neosartorya fischeri NRRL 181]
  misc_feature (1)..(565): NCBI GI: 239611869 Blast Desc: asparagine synthase [Ajellomyces dermatitidis ER-3]
  misc_feature (1)..(546): NCBI GI: 145615079 Blast Desc: MGG_05371 [Magnaporthe grisea 70-15] gi|145022001|gb|EDK06021.1| MGG_05371 [Magnaporthe grisea 70-15]
  misc_feature (1)..(569): NCBI GI: 70993472 Blast Desc: asparagine synthase related protein [Aspergillus fumigatus Af293] gi|66849217|gb|EAL89545.1| asparagine synthase related protein [Aspergillus fumigatus Af293]
MCGIHAIVSGSIPARLSPELERSLVNRGPDHLGQTEHNVTGADPNHNVHLRLTSTVLALRGDHVTKQPLEEALGTGSALCWNGEAWKISGQVPGGNDGEAVLSLLQPPPSSTLQTREAHIVNGIRSIDGPFAFVYFDSPANRLYFGRDRLGRRSLLVKYSPETSSFAISSIADTPSAGWEEVNATGFHSVDLSTCGNADQVDWQSLVTAHTWLETTSAEMMSSIGIFNNEAPPSSHQLDSDSPSIRILRHWLVESLKARVLDIPEPPSPGIEADVDTRVAILFSGGLDSTVLARLAHDLLPKNQGIDLINVAFENPRQVALEARQPHLRASDTYEGCPDRATGRKAFAELQSTCPGRYWRFIAANVPFEEAMTHKSKVISLMYPHDTEMDLSIGFALYFAARGIGLSYDDSANWQSSAPLACTPARVLLSGLGADELFGGYSRHEVAFKRGGYALLIDELKLDVGRIGQRNLGRDDRIMAHWGKEVRFPYLDEEFVRFAIGLPVWEKCDFQNAFHPAVIDPAKRLLRLLADQLGLPITARQKKKAIQFGSRTAKMESSTGRLRGTAQVSLGRQFW

SEQ ID NO: 28258 - DNA, 3990 bp, Muscodor strobelii
  misc_feature: SGI EST ID NO. CUFF.66697.0
  misc_feature: Variant of the nucleotide sequence at SEQ ID NO 28256
tcgcctttctatctcatctagtgcctggcgtacattttgcacccttgtaacatactacttctatattgaagcccactctccttttaccggcgtatgcatcaagttccgactacttttatttgcttctattgaaagcattcgattgattgtgcaaaatgcattgcaaattcagcaacttgatccacttgaatgactgttcagccaatcaaaagtcagcaacatattatactacactctaacaacctgcctgcctattcctagtcattctgtccctcattgtataccctgtctcaaattgcgttcgtttgtcacaaacagaaatgtgtggcattcatgccatcgtgtctggatctatcccagctcggctctcgcctgagctagaacgatctcttgtcaaccgaggtccagatcacctgggacagactgagcacaatgtcactggtgctgacccaaatcataatgtgcatttgcgtctcacttcgactgtcctagcactacgaggagatcatgtcacgaaacagcctctcgaggaagctttagggacaggctcggctctgtgctggaacggcgaggcgtggaaaatcagtggccaggtcccgggcgggaatgacggagaagcagtattgtctttgctgcagcccccgccatcttccactttacaaacacgtgaagctcatatcgtcaacggaatacgaagtatcgatggcccgttcgcatttgtatatttcgattcgcctgcaaatcgtctatacttcggccgtgaccgcctcgggaggcgatctcttctcgtgaaatactcacctgagacgagttccttcgctatatcaagcattgctgacacgccaagcgccggctgggaagaggtcaacgctactggttttcattccgtagacctgtctacttgtggcaatgcggatcaagttgactggcagagccttgttacggcacatacttggcttgaaactacgagcgcggaaatgatgtcaagtatcggtattttcaataacgaggctccaccttctagccatcagttggactctgattctccatcaattcgaatactcagacactggctggtggaatcgctaaaagcaagagttttagacattccggagccaccatcaccaggtattgaagcggacgttgacacccgtgttgccattcttttctcgggaggcttagattccactgtccttgcaaggctcgcgcacgatttattaccaaagaaccagggtatcgatttgataaatgttgccttcgaaaacccgcgtcaggtggccctagaagcccgacaaccacatttacgtgcttcggatacatatgaagggtgtccagatagagccactggacggaaggctttcgctgaacttcagtccacctgtcctggacgatattggcgcttcatcgccgcaaatgttccgttcgaagaagctatgactcacaaatctaaagtcatatcgttgatgtatccacacgacacagaaatggacttgtccattggtttcgctctatactttgctgccagaggtataggactctcttacgatgatagcgccaactggcagtcttctgccccactggcctgtactcccgcacgggtcctcttgtctggcttaggtgcggacgaactgtttggaggctactcccgtcatgaagtagctttcaaaagaggtggttatgcgctcctaatcgatgagttgaagctcgatgtcggtcgcatcggccagcgcaatcttggccgagacgatcgaattatggcccactgggggaaagaagttcgctttccatacctagatgaggaatttgtgcggtttgcgattggtctaccggtttgggaaaagtgtgatttccagaatgcttttcaccctgcggtcattgatccagctaaacgattgctgagactactggcggaccagctaggtcttccgatcaccgcacgtcaaaagaaaaaggcgattcaattcggctcgagaaccgctaaaatggagagctcaaccggccggctccgtggcacagctcaagtttctctcggaaggcagttctgagtagtatctttgccacgaaagaattaggctttctctcaaccatctagccgctatacctacaggtttgtcatgcttctcgatgttttgagtcactagtgaatggtcaaagcagtagcatgcacatctaatgatattgtcgcttcgcttggatggtatgttatcaacaagttcagtacgcacaatctcttccgagattctattcgtcccaatcggaacaggcaatgatatcgagctgaggatttcggcattaagttatttcgttggcgggcaactcaattccagcaaacacaatcatgctatggttcccgatcacttgcatcattcgcaagaggaaacatacatacccctgaaataaggcattgcaccgaagcgctatgacggacaagaagagcaaggtatgccgactaccttaagggcagctgcgcttatttgcccatctgctccacatatcgttgctctctctgtgtgctatacgtgatagaaaggctgtgattattgccgccatcttcagtcttatttatcgaccggcccatcataccgcacttggggcttcgatgcacgctgcttacagcgtaagcaagctagcgatagacaaacggttcagccccattcgcttgacctgatcaccaatgtcttggctctcatagcagatcgtcagcacttgtccacagatgaggatatgactgcattcagtgatttctatgcgaacggccgcattgttgcttacttgccaagccgccgtcgaattgtgtctcttgttccacggtctcatcaaggaaagactattaaaaataatcccggttgtgcttctcgaagaatgggagaatttctgagatggctgactcattcaacgtctgtgaaagactgccttaagagtagtcaggatatagaagctcaccaatgccacaagagggcctcggccgctagattgtaatatgcgtcggtgcctaggagcgttaaagcgttggagttatgtatgtagatttggagaaggctgccgaggtgcgacactgcaacaagacatctgcggggaagcctccaattctggggggatcgccagggtttctgaccgccatgaagtactcaataatccttgcaaggtaatactgcatatcgcggggggtatgctgtttggtacaagctcaacgcctctaaccgtgcaattcccttgaagctgagagatacaaattcgtacggaggatgcggagttcgccagaacataagctcatctcacctagctctagaatcaaaaccatcagttcaatcttaaacttagcatctgtttaattgcgacttttctttcctatctctcttcctgttgttcaacgtccgtaatcatggctacaacggttgagaaacaggccaacggccaatttctctataagccagcgagggtagcggaagttcccaatatcgatttgatgaccatgttgtttgagtcggagccgtgtcgagttcccgacgacacgatcatccatgctgatgccgatgagccctcaaataatctcaacaaggcggaatgtctcaagcaatcgaaaaaagctgctcatgtgctgaggagtgtgtatggaattggagcaaacgggcctaataaggatgtggttttcaacatctcaacgggttacttcatgcttcctgttttgttctacggaacagtcgccgctggtggcattttctcgtcaaccagtcccgctgcaacacccgatgaggtcgcataccagctaagacagacggaggcaaagatcatagtatgtcgacccgagacgaaagaaacggcattggctgcggctcgaaaagtaggcgtggcaccaaggaacgtacttgtgttcggtgggactaatgaactggaattatggtatgcgtcgcaaagaacaaatcgcttctattttactaaaatggtcttgttctagtgagcgcttcactctatatcttaggaacgggtgag

SEQ ID NO: 28259 - DNA, 1554 bp, Muscodor strobelii
  misc_feature: SGI cDNA ID NO. 569695
  misc_feature: Encodes the peptide sequence at SEQ ID NO 28260
atggctacaacggttgagaaacaggccaacggccaatttctctataagccagcgagggtagcggaagttcccaatatcgatttgatgaccatgttgtttgagtcggagccgtgtcgagttcccgacgacacgatcatccatgctgatgccgatgagccctcaaataatctcaacaaggcggaatgtctcaagcaatcgaaaaaagctgctcatgtgctgaggagtgtgtatggaattggagcaaacgggcctaataaggatgtggttttcaacatctcaacgggttacttcatgcttcctgttttgttctacggaacagtcgccgctggtggcattttctcgtcaaccagtcccgctgcaacacccgatgaggtcgcataccagctaagacagacggaggcaaagatcatagtatgtcgacccgagacgaaagaaacggcattggctgcggctcgaaaagtaggcgtggcaccaaggaacgtacttgtgttcggtgggactaatgaactggaattatgtgagcgcttcactctatatcttaggaacggggctaacgctctggcccatcttcctgccgcccacattgctggagtacagagctattttgttaaccacgtctatatgggcggaacgtgccattggatgccgcggtttgatttccccaagttctgcgaatatgcgaaaaagtacgcaattacgtccatgtttactgtgccaccgatatttctacttattgccaaatctcccacggtgacggaccactttgatacatgggaagatgcagttgccggagctgctccgatgggacaagaactccaggtggcggcgggcaagaagctcggtaagggaaagacagcgctacgacagacttggggcttatcagaaacgatgctgacttcgggtatgaaaaatctagactggaagtatcaccattacaccaccaggtttaatgcggctccatatgacagtgtcgatgacaatgagaacgacgtcaaacccggcgaggaaggcgagatctgggtgcgaggccccgtggtaaccaaaggctgtactcgatatacattgctagagaacatggcatttggaacacgatctaatacagtgtactccctgctagattggaagaatgacaaggcgaacgaagactctttccacgatggctggttccgcactggcgatatctgtacttttaaagacggtgtcttcttcattgtggatcgcaaaaaagaacttatcaaatacaagggaatccaagtcgcaccggctgagctcgaagccatgcttctgtctcatccccaaatcctcgatgcggctgtcattggtgtcccaggggagggtacagaggttcctcgcgcgtatgtagtcgcagatcagaaaaagatatctgcaaacgatatcatcgaatggtttgccaagcaggggctttctagctctaagaagctgagaggaggcgtcgtgtttctcgatgtgattccgaagagccctagtggtaagatattgcgcagagaactacgagaaatggccaagaaagaattccagacggcgaagatctag

SEQ ID NO: 28260 - protein, 517 aa, Muscodor strobelii
  misc_feature: SGI Peptide ID NO. 569695
  misc_feature (58)..(439): Pfam Id: PF00501 Pfam Desc: AMP-binding enzyme
  misc_feature (374)..(439): Pfam Id: PF00501 Pfam Desc: AMP-binding enzyme
  misc_feature (187)..(349): Pfam Id: PF00501 Pfam Desc: AMP-binding enzyme
  misc_feature (99)..(147): Pfam Id: PF00501 Pfam Desc: AMP-binding enzyme
  misc_feature (187)..(517): NCBI GI: 85094239 Blast Desc: NCU05851 [Neurospora crassa OR74A] gi|28921298|gb|EAA30606.1| conserved [Neurospora crassa OR74A]
  misc_feature (15)..(510): NCBI GI: 169766884 Blast Desc: [Aspergillus oryzae RIB40] gi|83765768|dbj|BAE55911.1| protein product [Aspergillus oryzae]
  misc_feature (1)..(510): NCBI GI: 145605585 Blast Desc: MGG_07019 [Magnaporthe grisea 70-15] gi|145013398|gb|EDJ98039.1| MGG_07019 [Magnaporthe grisea 70-15]
  misc_feature (15)..(510): NCBI GI: 238483667 Blast Desc: AMP dependent ligase/synthetase, [Aspergillus flavus NRRL3357] gi|220701122|gb|EED57460.1| AMP dependent ligase/synthetase, [Aspergillus flavus NRRL3357]
  misc_feature (1)..(484): NCBI GI: 169624714 Blast Desc: SNOG_15618 [Phaeosphaeria nodorum SN15] gi|160705223|gb|EAT76993.2| SNOG_15618 [Phaeosphaeria nodorum SN15]
  misc_feature (182)..(517): NCBI GI: 115399346 Blast Desc: ATEG_06084 [Aspergillus terreus NIH2624] gi|114192145|gb|EAU33845.1| ATEG_06084 [Aspergillus terreus NIH2624]
  misc_feature (187)..(511): NCBI GI: 171691450 Blast Desc: protein product [Podospora anserina] gi|170945673|emb|CAP71786.1| protein product [Podospora anserina]
  misc_feature (187)..(517): NCBI GI: 67904188 Blast Desc: AN9081.2 [Aspergillus nidulans FGSC A4] gi|40742724|gb|EAA61914.1| AN9081.2 [Aspergillus nidulans FGSC A4] gi|259485508|tpe|CBF82589.1| TPA: conserved [Aspergillus FGSC
  misc_feature (183)..(512): NCBI GI: 226279376 Blast Desc: 4-coumarate-CoA ligase [Paracoccidioides brasiliensis Pb01]
  misc_feature (187)..(511): NCBI GI: 261356241 Blast Desc: 4-coumarate-CoA ligase [Verticillium albo-atrum VaMs.102]
  misc_feature (181)..(507): SWISSPROT Homolog: EC 6.2.1.12 4-coumarate--CoA ligase
MATTVEKQANGQFLYKPARVAEVPNIDLMTMLFESEPCRVPDDTIIHADADEPSNNLNKAECLKQSKKAAHVLRSVYGIGANGPNKDVVFNISTGYFMLPVLFYGTVAAGGIFSSTSPAATPDEVAYQLRQTEAKIIVCRPETKETALAAARKVGVAPRNVLVFGGTNELELCERFTLYLRNGANALAHLPAAHIAGVQSYFVNHVYMGGTCHWMPRFDFPKFCEYAKKYAITSMFTVPPIFLLIAKSPTVTDHFDTWEDAVAGAAPMGQELQVAAGKKLGKGKTALRQTWGLSETMLTSGMKNLDWKYHHYTTRFNAAPYDSVDDNENDVKPGEEGEIWVRGPVVTKGCTRYTLLENMAFGTRSNTVYSLLDWKNDKANEDSFHDGWFRTGDICTFKDGVFFIVDRKKELIKYKGIQVAPAELEAMLLSHPQILDAAVIGVPGEGTEVPRAYVVADQKKISANDIIEWFAKQGLSSSKKLRGGVVFLDVIPKSPSGKILRRELREMAKKEFQTAKI

SEQ ID NO: 28261 - DNA, 809 bp, Muscodor strobelii
  misc_feature: SGI EST ID NO. CUFF.66709.0
  misc_feature: Variant of the nucleotide sequence at SEQ ID NO 28259
gacagtgtcgatgacaatgagaacgacgtcaaacccggcgaggaaggcgagatctgggtgcgaggccccgtggtaaccaaaggctggtcagtaaccccatagtttgtttacgtagaacatacctatgctaacttttcttcagtgagtactcgatatacattgctagagaacatggcatttggaacacgatctaatacagtgtactccctgctagattggaagaatgacaaggcgaacgaagactctttccacgatggctggttccgcactggcgatatctgtacttttaaagacggtgtcttcttcattgtggatcgcaaaaaagaacttatcaaatacaagggaatccaagtcgcaccggctgagctcgaagccatgcttctgtctcatccccaaatcctcgatgcggctgtcattggtgtcccaggggagggtacagaggttcctcgcgcgtatgtagtcgcagatcagaaaaagatatctgcaaacgatatcatcgaatggtttgccaagcaggggctttctagctctaagaagctgagaggaggcgtcgtgtttctcgatgtgattccgaagagccctagtggtaagatattgcgcagagaactacgagaaatggccaagaaagaattccagacggcgaagatctagttcgtcgatctgcagattttgactctacttcgctgtctgaaagtgattattctagagttatcatagatgtcttttaaatatttgtatcgggaactattgtggctcagatgtatgttcaatatagtacaggtagagatgatagcatcatcatattacga

SEQ ID NO: 28262 - DNA, 2049 bp, Muscodor strobelii
  misc_feature: SGI cDNA ID NO. 569696
  misc_feature: Elevated expression when VOC is produced
  misc_feature: Encodes the peptide sequence at SEQ ID NO 28263
atggatagcttcacacggaggatagagaatgacgttgacgcttttagggaggagttgcggaccgatcccaattttgagagagcatcccactatgctcatgtcgtccccaagaaactcccatcggcgacgaagcagtactttcttgataaacttcctattgttcaatggctaccacgatattctccgtcatggttagcccaagatttcatgggtggactgactatcggtgtcatgctcatccctcaaggtttatcatacgcgaaaattgcgacaattcctattgaacatggcttatattcatcctggctacctgctgccatcgctgtctttctaggaacgtccaaggatctctctactgggccaacgtccttgatgggattattgacatcggagattgtagcggacctgaaggatgaatatgcacccgctgatattgcttctgctgtggctttcatgtgcggtgtctatggtctcgtcgttggtcttctcggcctcggtttcctcctcgatttcgtctcaattcctgtccttacaggtttcatctcggcaaccgctcttacaatcggcacacagcagctgggttcgctcgttggattatccaatacaccaagccaaagtttttctatcattggcgatgtgctcaggcggttaccgcattgggatgggccgacagctggtgttggcttcggtgggatcttcatcctcttcttgcttgaacgaatgagtaggaaatggggcaaaaagcacttcatcattcgatatatcggaagcagccgagccatcattgttctcatcctcttcactctcatctcgtatctggtaaatcgaaaccgtggcgacgacctgctttgggccgtgagcatggtcgacacggacggaatcccagcccccaaagctcaacccagctccttgattagcaaagttgctgcacgtgctcttgctccttggattgctgcttcgctcgagcatcaggcagtgggtagagcattcggccgaaagaaccattactccgtcgacgagactcaagagttcaactatcttggagttacaaacctcgtcaacagtttcttcggctccatgcctgtcggaggagctatgtctcgtactgcagtcaattcagagtgtggcgttcgtagccccctgaacggtatcgtcacctctgctttcattattctgacactcttcgtcttctcgcctgctctttactggcttccaaaggctacactagcggccatcattatcatggccgtgattcatctgtttggcccattcactctgatctggagatattacagaatctccttggccgattacattgcctttaatgtagcattcttcgtcaccacgttcacttcttcgccatacggcattggctcggctgtgggctggtcaatcctttacactctccttcgagcagcctttgtcagacccgaagtctcaagcaacgagggctcctcaaaccagaccaccaatcgtcaatctcttgcccgcgtgccaacacatgatggcgctggtaccgagaacaccggagtcctaattccagaggacactgttgtagtcaccttcaaagacgccttattcttccccaatgctcagcgtaacaagcggcacgcactcgaatccatccaactcgtttatccttcaatatcaaaccctaactatcgggctgacaatgaacgatcatggagtgtagctgcggaaagacggctggaacgtcttcgcaaggaacgcagcatcgttatgaaggacatgccactatctatcgtcgtcttcgatttgacattagttcctttcattgatgtcacgggtatcacggcgcttgctgagctgaaagatgacatccgccgacaactgggaaatatcgttgagatccgcttggtcggcttgaacaagggcgtccgagaccgcttcaagcgaacgaagtggccactgtccgaggcagatggtatccagaacgaaggcagcgacgtagtctacccctcgatagaaagagcggttgcagatgatcgtgaatctttgaagggcgttgtcagcgagaaggacaattag

SEQ ID NO: 28263 - protein, 682 aa, Muscodor strobelii
  misc_feature: SGI Peptide ID NO. 569696
  misc_feature (508)..(665): Pfam Id: PF01740 Pfam Desc: STAS domain
  misc_feature (160)..(472): Pfam Id: PF00916 Pfam Desc: Sulfate transporter family
  misc_feature (508)..(641): Pfam Id: PF01740 Pfam Desc: STAS domain
  misc_feature (12)..(682): NCBI GI: 261358994 Blast Desc: sulfate transporter 4.1 [Verticillium albo-atrum VaMs.102]
  misc_feature (12)..(671): NCBI GI: 171689850 Blast Desc: protein product [Podospora anserina] gi|170944887|emb|CAP70998.1| protein product [Podospora anserina]
  misc_feature (13)..(671): NCBI GI: 225678557 Blast Desc: sulfate permease [Paracoccidioides brasiliensis Pb03]
  misc_feature (13)..(671): NCBI GI: 226294733 Blast Desc: solute carrier [Paracoccidioides brasiliensis Pb18]
  misc_feature (12)..(681): NCBI GI: 145603882 Blast Desc: MGG_10251 [Magnaporthe grisea 70-15] gi|145012018|gb|EDJ96674.1| MGG_10251 [Magnaporthe grisea 70-15]
  misc_feature (13)..(671): NCBI GI: 226285738 Blast Desc: sulfate transporter 4.1 [Paracoccidioides brasiliensis Pb01]
  misc_feature (16)..(666): NCBI GI: 189205717 Blast Desc: sulfate permease [Pyrenophora tritici-repentis Pt-1C-BFP] gi|187975286|gb|EDU41912.1| sulfate permease [Pyrenophora tritici-repentis Pt-1C-BFP]
  misc_feature (10)..(649): NCBI GI: 46139201 Blast Desc: FG11115.1 [Gibberella zeae PH-1]
  misc_feature (16)..(642): NCBI GI: 116179726 Blast Desc: CHGG_00491 [Chaetomium globosum CBS 148.51] gi|88184788|gb|EAQ92256.1| CHGG_00491 [Chaetomium globosum CBS 148.51]
  misc_feature (111)..(666): NCBI GI: 169611416 Blast Desc: SNOG_08820 [Phaeosphaeria nodorum SN15] gi|160702283|gb|EAT83988.2| SNOG_08820 [Phaeosphaeria nodorum SN15]
  misc_feature: Useful for introducing or modulating the production of volatile compounds
MDSFTRRIENDVDAFREELRTDPNFERASHYAHVVPKKLPSATKQYFLDKLPIVQWLPRYSPSWLAQDFMGGLTIGVMLIPQGLSYAKIATIPIEHGLYSSWLPAAIAVFLGTSKDLSTGPTSLMGLLTSEIVADLKDEYAPADIASAVAFMCGVYGLVVGLLGLGFLLDFVSIPVLTGFISATALTIGTQQLGSLVGLSNTPSQSFSIIGDVLRRLPHWDGPTAGVGFGGIFILFLLERMSRKWGKKHFIIRYIGSSRAIIVLILFTLISYLVNRNRGDDLLWAVSMVDTDGIPAPKAQPSSLISKVAARALAPWIAASLEHQAVGRAFGRKNHYSVDETQEFNYLGVTNLVNSFFGSMPVGGAMSRTAVNSECGVRSPLNGIVTSAFIILTLFVFSPALYWLPKATLAAIIIMAVIHLFGPFTLIWRYYRISLADYIAFNVAFFVTTFTSSPYGIGSAVGWSILYTLLRAAFVRPEVSSNEGSSNQTTNRQSLARVPTHDGAGTENTGVLIPEDTVVVTFKDALFFPNAQRNKRHALESIQLVYPSISNPNYRADNERSWSVAAERRLERLRKERSIVMKDMPLSIVVFDLTLVPFIDVTGITALAELKDDIRRQLGNIVEIRLVGLNKGVRDRFKRTKWPLSEADGIQNEGSDVVYPSIERAVADDRESLKGVVSEKDN

SEQ ID NO: 28264 - DNA, 2376 bp, Muscodor strobelii
  misc_feature: SGI EST ID NO. CUFF.66716.0
  misc_feature: Variant of the nucleotide sequence at SEQ ID NO 28262
tctacacagggtttcctccagcaccatcctgtatcatctctccaaactgaagaatatctgtgcatttcatcaacatggatagcttcacacggaggatagagaatgacgttgacgcttttagggaggagttgcggaccgatcccaattttgagagagcatcccactatgctcatgtcgtccccaagaaactcccatcggcgacgaagcagtactttcttgataaacttcctattgttcaatggctaccacgatattctccgtcatggttagcccaagatttcatgggtggactgactatcggtgtcatgctcatccctcaaggtttatcatacgcgaaaattgcgacaattcctattgaacatggcttatattcatcctggctacctgctgccatcgctgtctttctaggaacgtccaaggatctctctactgggccaacgtccttgatgggattattgacatcggagattgtagcggacctgaaggatgaatatgcacccgctgatattgcttctgctgtggctttcatgtgcggtgtctatggtctcgtcgttggtcttctcggcctcggtttcctcctcgatttcgtctcaattcctgtccttacaggtttcatctcggcaaccgctcttacaatcggcacacagcagctgggttcgctcgttggattatccaatacaccaagccaaagtttttctatcattggcgatgtgctcaggcggttaccgcattgggatgggccgacagctggtgttggcttcggtgggatcttcatcctcttcttgcttgaacgaatgagtaggaaatggggcaaaaagcacttcatcattcgatatatcggaagcagccgagccatcattgttctcatcctcttcactctcatctcgtatctggtaaatcgaaaccgtggcgacgacctgctttgggccgtgagcatggtcgacacggacggaatcccagcccccaaagctcaacccagctccttgattagcaaagttgctgcacgtgctcttgctccttggattgctgcttcgctcgagcatcaggcagtgggtagagcattcggccgaaagaaccattactccgtcgacgagactcaagagttcaactatcttggagttacaaacctcgtcaacagtttcttcggctccatgcctgtcggaggagctatgtctcgtactgcagtcaattcagagtgtggcgttcgtagccccctgaacggtatcgtcacctctgctttcattattctgacactcttcgtcttctcgcctgctctttactggcttccaaaggctacactagcggccatcattatcatggccgtgattcatctgtttggcccattcactctgatctggagatattacagaatctccttggccgattacattgcctttaatgtagcattcttcgtcaccacgttcacttcttcgccatacggcattggctcggctgtgggctggtcaatcctttacactctccttcgagcagcctttgtcagacccgaagtctcaagcaacgagggctcctcaaaccagaccaccaatcgtcaatctcttgcccgcgtgccaacacatgatggcgctggtaccgagaacaccggagtcctaattccagaggacactgttgtagtcaccttcaaagacgccttattcttccccaatgctcagcgtaacaagcggcacgcactcgaatccatccaactcgtttatccttcaatatcaaaccctaactatcgggctgacaatgaacgatcatggagtgtagctgcggaaagacggctggaacgtcttcgcaaggaacgcagcatcgttatgaaggacatgccactatctatcgtcgtcttcgatttgacattagttcctttcattgatgtcacgggtatcacggcgcttgctgagctgaaagatgacatccgccgacaactgggaaatatcgttgagatccgcttggtcggcttgaacaagggcgtccgagaccgcttcaagcgaacgaagtggccactgtccgaggcagatggtatccagaacgaaggcagcgacgtagtctacccctcgatagaaagagcggttgcagatgatcgtgaatctttgaagggcgttgtcagcgagaaggacaattagaaatgtcaagtggttggtgtatggctgtaaatggaggacttcgactacgctgggatttcggttgcaaataacctcattattattacccgctggaagttgcagctatcaaattagtagttttcttgctacctagtataatgatacgacacaatcccgcacggctacttcaattcagcttgtgaccgcccctccgcgagtgctgtctcttcccggacatcatcggcgggtgcatttagccgtccttttacagaat

SEQ ID NO: 28265 - DNA, 1419 bp, Muscodor strobelii
  misc_feature: SGI cDNA ID NO. 569697
  misc_feature: Reduced expression when VOC is produced
  misc_feature: Encodes the peptide sequence at SEQ ID NO 28266
atggagctcccaagctctcgtcgtgcctcctcttggaaattgttcgtcgccgggctagctctgttcaacccgggactcgcagtacccgtccaagacagccctcgacagtatctcctcgctggtctcgaattacccgcaaagtacagtaagaaagccaaatcaccatacaatcccgggcacagagatcctctcgatcatgccgtagatgcggttggggatgagttagaccctctaccttatcgcaatggcctaggcgcttcagtcctgggcccttggaattgggaacgctcgcgccagagccctgatctggtccggcccccgagcaccgaccacggtaatatgggcaatatgcgctggagttttgcagattcccatgtccgcattgaggagggaggttggacccgccagaccaccgtacgagaactgggcactagtgttgacctcgcaagcgtaaacatgcgccttgataaaggagtcattcgagagctacattggcacaaagaagcagaatgggcttacgtactagacggtgaggtacggattaccgcaattgactatgaaggaggtaacttcatggacgatctcaagaaaggtgatctatggtactttccaagcggtgttccccattcccttcagggcttgggcgaaaacggtaccgagttccttcttattttcgatgatgggaacttctcggaggaatcgaccttcattctgtctgactggctggctcatacgccgaaatccgtgatctcaaaaaacttcaacttggcacccgaagtcttcaaacatcttcctaagggcgagaaatacatcttccaaggctcgtatccaggctcgcttgatgatgaacaaccaacaggcaaaggcgtgaaaaagtccaagtacaactttagtcacaggatgctcgagcaagagcctaaaatcacaagtggaggtgaagtgcgcatcactgactctaataacttccccatttcgaagaccgtggccgctgcccatgttacaatccagcctggcgcattacgagagatgcattggcaccccaacgccgatgagtggagcttcttcatcaagggccgagctcgtgtcacaatcttcggtgcagaaggcactgcgaggacgtttgactacgttcccggtgatgtgggcatcgtgccccggaatatgggtcacttcgtagagaatatcggggatgagcccatcgagatgctagaagttttccgcgccgatgaattccgagatttttctctcttccagtggatgggcgaaaccccaaagaagctggtcgtcgaccacctgtttcaagatgaccccgagaacggtgagattttctggaacaaggtgaagagcgcaaataaagacgaggtcaccttgcctgactcggaagatgaaagaatgtcagagattgacaacgagctgtaa

SEQ ID NO: 28266 - protein, 472 aa, Muscodor strobelii
  misc_feature: SGI Peptide ID NO. 569697
  misc_feature (299)..(425): Pfam Id: PF00190 Pfam Desc: Cupin
  misc_feature (119)..(262): Pfam Id: PF00190 Pfam Desc: Cupin
  misc_feature (331)..(406): Pfam Id: PF07883 Pfam Desc: Cupin domain
  misc_feature (151)..(225): Pfam Id: PF07883 Pfam Desc: Cupin domain
  misc_feature (299)..(406): Pfam Id: PF00190 Pfam Desc: Cupin
  misc_feature (130)..(262): Pfam Id: PF00190 Pfam Desc: Cupin
  misc_feature (16)..(459): NCBI GI: 256722942 Blast Desc: NECHADRAFT_86955 [Nectria haematococca mpVI 77-13-4]
  misc_feature (27)..(466): NCBI GI: 256720359 Blast Desc: [Nectria haematococca mpVI 77-13-4]
  misc_feature (14)..(459): NCBI GI: 261358992 Blast Desc: oxalate decarboxylase oxdC [Verticillium albo-atrum VaMs.102]
  misc_feature (14)..(456): NCBI GI: 85114948 Blast Desc: oxalate decarboxylase oxdC [Neurospora crassa OR74A] gi|28926575|gb|EAA35545.1| oxalate decarboxylase oxdC [Neurospora crassa OR74A]
  misc_feature (13)..(459): NCBI GI: 39969283 Blast Desc: conserved [Magnaporthe grisea 70-15] gi|149211107|ref|XP_001522928.1| MGCH7_ch7g1016 [Magnaporthe grisea 70-15] gi|86196971|gb|EAQ71609.1| MGCH7_ch7g1016 grisea
  misc_feature (13)..(459): NCBI GI: 59803071 Blast Desc: oxalate decarboxylase-like protein [Magnaporthe grisea]
  misc_feature (20)..(468): NCBI GI: 46139197 Blast Desc: FG11113.1 [Gibberella zeae PH-1]
  misc_feature (8)..(463): NCBI GI: 171684195 Blast Desc: protein product [Podospora anserina] gi|170942058|emb|CAP67710.1| protein product [Podospora anserina]
  misc_feature (27)..(458): NCBI GI: 116192719 Blast Desc: CHGG_06077 [Chaetomium globosum CBS 148.51] gi|88181990|gb|EAQ89458.1| CHGG_06077 [Chaetomium globosum CBS 148.51]
  misc_feature (15)..(455): NCBI GI: 255930871 Blast Desc: Pc12g00920 [Penicillium chrysogenum Wisconsin 54-1255] gi|211581611|emb|CAP79719.1| Pc12g00920 [Penicillium chrysogenum Wisconsin 54-1255]
  misc_feature (77)..(432): SWISSPROT Homolog: EC 4.1.1.2 Oxalate decarboxylase
  misc_feature: Useful for introducing or modulating the production of volatile compounds
MELPSSRRASSWKLFVAGLALFNPGLAVPVQDSPRQYLLAGLELPAKYSKKAKSPYNPGHRDPLDHAVDAVGDELDPLPYRNGLGASVLGPWNWERSRQSPDLVRPPSTDHGNMGNMRWSFADSHVRIEEGGWTRQTTVRELGTSVDLASVNMRLDKGVIRELHWHKEAEWAYVLDGEVRITAIDYEGGNFMDDLKKGDLWYFPSGVPHSLQGLGENGTEFLLIFDDGNFSEESTFILSDWLAHTPKSVISKNFNLAPEVFKHLPKGEKYIFQGSYPGSLDDEQPTGKGVKKSKYNFSHRMLEQEPKITSGGEVRITDSNNFPISKTVAAAHVTIQPGALREMHWHPNADEWSFFIKGRARVTIFGAEGTARTFDYVPGDVGIVPRNMGHFVENIGDEPIEMLEVFRADEFRDFSLFQWMGETPKKLVVDHLFQDDPENGEIFWNKVKSANKDEVTLPDSEDERMSEIDNEL

SEQ ID NO: 28267 - DNA, 2256 bp, Muscodor strobelii
  misc_feature: SGI EST ID NO. CUFF.66782.1
  misc_feature: Variant of the nucleotide sequence at SEQ ID NO 28265
atttctgtgacagaataataatgggactttccggacaggacaccgctcgacgctcgtcgagagctacaagatcgatctccaataggatgatcagtctctctcctagtgctgagcgtgcctcggagttgattcggaattcgacccttgctatgcccagccgctactatgcctgtgactctgtgaagcctttcgctgattcctagagcatcacgccaagttctaactcaaactttccctgctaacctgctgggccgacctcgatagagcaaacgtagctaacctcaaggattgacctagctcaagtggatcataactcgctcgtacggattgatacaacataaataagttgcttgaatggttcgcggttactctttcgcattcgccaagctgtagaagtcgtttgcgacatcatcttgccatcattcttataaaatactggttctccgaccgtcccttcgtctcacggatttccggaggacaatcaattcttccaaaattcatcaattggatcaattttgtgtccctacttctgcataatacggataagctgcctggtcagcaatctgcatccttctccgcccgtaatggagctcccaagctctcgtcgtgcctcctcttggaaattgttcgtcgccgggctagctctgttcaacccgggactcgcagtacccgtccaagacagccctcgacagtatctcctcgctggtctcgaattacccgcaaagtacagtaagaaagccaaatcaccatacaatcccgggcacagagatcctctcgatcatgccgtagatgcggttggggatgagttagaccctctaccttatcgcaatggcctaggcgcttcagtcctgggcccttggaattgggaacgctcgcgccagagccctgatctggtccggcccccgagcaccgaccacggtaatatgggcaatatgcgctggagttttgcagattcccatgtccgcattgaggagggaggttggacccgccagaccaccgtacgagaactgggcactagtgttgacctcgcaagcgtaaacatgcgccttgataaaggagtcattcgagagctacattggcacaaagaagcagaatgggcttacgtactagacggtgaggtacggattaccgcaattgactatgaaggaggtaacttcatggacgatctcaagaaaggtgatctatggtactttccaagcggtgttccccattcccttcagggcttgggcgaaaacggtaccgagttccttcttattttcgatgatgggaacttctcggaggaatcgaccttcattctgtctgactggctggctcatacgccgaaatccgtgatctcaaaaaacttcaacttggcacccgaagtcttcaaacatcttcctaagggcgagaaatacatcttccaaggctcgtatccaggctcgcttgatgatgaacaaccaacaggcaaaggcgtgaaaaagtccaagtacaactttagtcacaggatgctcgagcaagagcctaaaatcacaagtggaggtgaagtgcgcatcactgactctaataacttccccatttcgaagaccgtggccgctgcccatgttacaatccagcctggcgcattacgagagatgcattggcaccccaacgccgatgagtggagcttcttcatcaagggccgagctcgtgtcacaatcttcggtgcagaaggcactgcgaggacgtttgactacgttcccggtgatgtgggcatcgtgccccggaatatgggtcacttcgtagagaatatcggggatgagcccatcgagatgctagaagttttccgcgccgatgaattccgagatttttctctcttccagtggatgggcgaaaccccaaagaagctggtcgtcgaccacctgtttcaagatgaccccgagaacggtgagattttctggaacaaggtgaagagcgcaaataaagacgaggtcaccttgcctgactcggaagatgaaagaatgtcagagattgacaacgagctgtaatgtgcgacgcaggcatttgtctgaatggcttgctcccagtctcgtctgtgaagaatacgggatactatatggggaaatcactaaaagtactacacgtaatatgcgaaggggaggttatattgctatggacagaaagtgtacactattgaagcgcagattaccagctgagaccacgaattgcacaaatatcactggtcttgcgtttttcgatccaaaaaacgtgtgactacttctttccgacaagctatgtatt

SEQ ID NO: 28268 - DNA, 819 bp, Muscodor strobelii
  misc_feature: SGI cDNA ID NO. 569698
  misc_feature: Reduced expression when VOC is produced
  misc_feature: Encodes the peptide sequence at SEQ ID NO 28269
atggcttcaactaccaactacggcgccgtcaatggaggcgatcgacgcgctacagaaagcagagatgaagagcagccgttgctagacaggagtgcgtctcataagcgaagcctacgagactacctggtgatcgatgtttgccgggattgggccgacttagtcttgctcttatgctacatcgttactggcatgcttgatagcgcctccatatctacatggggttcttttgtttcaatgcagacgggaaatacggtatatttcggtcttgggattgctgcaccgcacgagtctactcgatggatcaagtcaggaacttcgctcggcttcttctgtattggatcagtattcttcagctacttccaccgcttcttctccccgaaaagacgatgggtgttatgcgcgtcattcatgatgcaaacgtctttgatcatcgccgctgccgcgattctcagcttcgggcccatatccgagaatcccaaggaagcgattggttggccagagcttgttcccattgcactaattgccttccaaagctgtgggcaagcagtaacaagcagggcgctgaaattcaacgctcttacaagcgtcgtcttgacaagcatatattgcgatctattttctgatgccaaccttctggccatacacaatgtagagaggaaccgtcgagtagccgccccagttttgctgttccttggagctgttttaggcggcatattagcccgtagctcggtaggcactgcgggcgttctgtggatcactgcagcattgaaactgtctgtggttgtggcatggtttctctggccaagcgagaaggaatag

SEQ ID NO: 28269 - protein, 272 aa, Muscodor strobelii
  misc_feature: SGI Peptide ID NO. 569698
  misc_feature (51)..(264): Pfam Id: PF06912 Pfam Desc: Domain of function (DUF1275)
  misc_feature (5)..(271): NCBI GI: 39969285 Blast Desc: MGG_10253 [Magnaporthe grisea 70-15] gi|149211109|ref|XP_001522929.1| MGCH7_ch7g1017 [Magnaporthe grisea 70-15] gi|86196972|gb|EAQ71610.1| MGCH7_ch7g1017 grisea
  misc_feature (7)..(271): NCBI GI: 256720349 Blast Desc: NECHADRAFT_18644 [Nectria haematococca mpVI 77-13-4]
  misc_feature (21)..(272): NCBI GI: 46107810 Blast Desc: FG00788.1 [Gibberella zeae PH-1]
  misc_feature (22)..(270): NCBI GI: 171684193 Blast Desc: protein product [Podospora anserina] gi|170942057|emb|CAP67709.1| protein product [Podospora anserina]
  misc_feature (22)..(271): NCBI GI: 116192717 Blast Desc: CHGG_06076 [Chaetomium globosum CBS 148.51] gi|88181989|gb|EAQ89457.1| CHGG_06076 [Chaetomium globosum CBS 148.51]
  misc_feature (7)..(271): NCBI GI: 46139199 Blast Desc: FG11114.1 [Gibberella zeae PH-1]
  misc_feature (15)..(270): NCBI GI: 189195254 Blast Desc: PTRG_03632 [Pyrenophora tritici-repentis Pt-1C-BFP] gi|187979844|gb|EDU46470.1| PTRG_03632 [Pyrenophora tritici-repentis Pt-1C-BFP]
  misc_feature (23)..(270): NCBI GI: 261358020 Blast Desc: conserved [Verticillium albo-atrum VaMs.102]
  misc_feature (10)..(272): NCBI GI: 85114953 Blast Desc: NCU00866 [Neurospora crassa OR74A] gi|28926576|gb|EAA35546.1| conserved [Neurospora crassa OR74A]
  misc_feature (23)..(272): NCBI GI: 256723007 Blast Desc: NECHADRAFT_52624 [Nectria haematococca mpVI 77-13-4]
  misc_feature: Useful for introducing or modulating the production of volatile compounds
MASTTNYGAVNGGDRRATESRDEEQPLLDRSASHKRSLRDYLVIDVCRDWADLVLLLCYIVTGMLDSASISTWGSFVSMQTGNTVYFGLGIAAPHESTRWIKSGTSLGFFCIGSVFFSYFHRFFSPKRRWVLCASFMMQTSLIIAAAAILSFGPISENPKEAIGWPELVPIALIAFQSCGQAVTSRALKFNALTSVVLTSIYCDLFSDANLLAIHNVERNRRVAAPVLLFLGAVLGGILARSSVGTAGVLWITAALKLSVVVAWFLWPSEKE

SEQ ID NO: 28270 - DNA, 1505 bp, Muscodor strobelii
  misc_feature: SGI EST ID NO. CUFF.66737.0
  misc_feature: Variant of the nucleotide sequence at SEQ ID NO 28268
ggagtgagtgcctttgcagagtttacgtcgccgagagacttgggaaatcaaggtatcatacaagttggatacaggtacctttaggggcagagcagagaacgaataggaactgattcgttaagactggatcaaccctgtctcgcgattgttgattttcggagcgggcctataactttaagtcttggtggcaccgggtacataatttactcgtacagcaccaaattctcgtcgaactgaatcacatcaagtccaatagaaacggaatgcgccttggtcagaaattaaatatctcgttgtctctttagtttcttatccttgctgaagcagttaagtcgactttgaaatcgcctctcagaattcttacgccattgccccattgcgccctactctccttcgtgatcagatggcttcaactaccaactacggcgccgtcaatggaggcgatcgacgcgctacagaaagcagagatgaagagcagccgttgctagacaggagtgcgtctcataagcgaagcctacgagactacctggtgatcgatgtttgccgggattgggccgacttagtcttgctcttatgctacatcgttactggcatgcttgatagcgcctccatatctacatggggttcttttgtttcaatgcagacgggaaatacggtatatttcggtcttgggattgctgcaccgcacgagtctactcgatggatcaagtcaggaacttcgctcggcttcttctgtattggatcagtattcttcagctacttccaccgcttcttctccccgaaaagacgatgggtgttatgcgcgtcattcatgatgcaaacgtctttgatcatcgccgctgccgcgattctcagcttcgggcccatatccgagaatcccaaggaagcgattggttggccagagcttgttcccattgcactaattgccttccaaagctgtgggcaagcagtaacaagcagggcgctgaaattcaacgctcttacaagcgtcgtcttgacaagcatatattgcgatctattttctgatgccaaccttctggccatacacaatgtagagaggaaccgtcgagtagccgccccagttttgctgttccttggagctgttttaggcggcatattagcccgtagctcggtaggcactgcgggcgttctgtggatcactgcagcattgaaactgtctgtggttgtggcatggtttctctggccaagcgagaaggaatagaatacaagagagagaaaccatagatgaaaagcttaccgcaaaagatcgaacgccagatacgacaatcgatcaatatctcctgtatcattcaaaaccgtccaacttcatactcagcacaatactttagacatcatgcttagagataaccacgtatatagaggcaaatttacatatatttaactcgtcttttcctctttcagttttccaacccgcagtgacgctgaaactataacatatgccgtcgcctagcctgacggcacaaatcatttccatgtgcacccca

SEQ ID NO: 28271 - DNA, 537 bp, Muscodor strobelii
  misc_feature: SGI cDNA ID NO. 569699
  misc_feature: Encodes the peptide sequence at SEQ ID NO 28272
atgccagcttcaacttccaaagagtatacagaccctagagctaggaccacgccggagaccatagataatgaccctattccgggcccagaactcggcggcgagccgaaacccgaaaccggcgaccatgcccaccaagaacccggcctgccgttctccaaggcgcgatgtatcgcattgccgagttcaatggatagtctcttcttactcacttacgtttgcaacttttctgctcttatgggctcgaatggtcaagccgatatctacgggaagcgggatatattcatttggggaagtggattcgtcgcggcgacacttatcgtgaatcctttcttaactgatgaaagagcatttgatctttttagaggtcttcaaggtttgggcgccgccgctaatgtaccaacggcgattggtatcttaggtgttactttccctccgggtaaggcgaagaattatgcgttcaggtatacgcgcctctgcccctttattcagagcgcaccgctcgacccgttgtggagagactgcggattcatgagctga

SEQ ID NO: 28272 - protein, 178 aa, Muscodor strobelii
  misc_feature: SGI Peptide ID NO. 569699
  misc_feature (45)..(153): NCBI GI: 85085378 Blast Desc: NCU04418 [Neurospora crassa OR74A] gi|28918587|gb|EAA28259.1| conserved [Neurospora crassa OR74A] gi|40882202|emb|CAF06028.1| related to aminotriazole resistance
  misc_feature (42)..(153): NCBI GI: 171690950 Blast Desc: protein product [Podospora anserina] gi|170945423|emb|CAP71535.1| protein product [Podospora anserina]
  misc_feature (12)..(153): NCBI GI: 256735206 Blast Desc: [Nectria haematococca mpVI 77-13-4]
  misc_feature (33)..(153): NCBI GI: 46107420 Blast Desc: FG00593.1 [Gibberella zeae PH-1]
  misc_feature (44)..(153): NCBI GI: 145605914 Blast Desc: MGG_06794 [Magnaporthe grisea 70-15] gi|145013666|gb|EDJ98307.1| MGG_06794 [Magnaporthe grisea 70-15]
  misc_feature (11)..(153): NCBI GI: 261357773 Blast Desc: drug resistance protein [Verticillium albo-atrum VaMs.102]
  misc_feature (49)..(153): NCBI GI: 156050741 Blast Desc: SS1G_07958 [Sclerotinia sclerotiorum 1980] gi|154692358|gb|EDN92096.1| SS1G_07958 [Sclerotinia sclerotiorum 1980]
  misc_feature (49)..(153): NCBI GI: 169622304 Blast Desc: SNOG_14372 [Phaeosphaeria nodorum SN15] gi|160704742|gb|EAT78243.2| SNOG_14372 [Phaeosphaeria nodorum SN15]
  misc_feature (74)..(155): NCBI GI: 156057139 Blast Desc: SS1G_04300 [Sclerotinia sclerotiorum 1980] gi|154702086|gb|EDO01825.1| SS1G_04300 [Sclerotinia sclerotiorum 1980]
  misc_feature (85)..(153): NCBI GI: 169860246 Blast Desc: CC1G_04071 [Coprinopsis cinerea okayama7#130] gi|116502080|gb|EAU84975.1| CC1G_04071 [Coprinopsis cinerea okayama7#130]
MPASTSKEYTDPRARTTPETIDNDPIPGPELGGEPKPETGDHAHQEPGLPFSKARCIALPSSMDSLFLLTYVCNFSALMGSNGQADIYGKRDIFIWGSGFVAATLIVNPFLTDERAFDLFRGLQGLGAAANVPTAIGILGVTFPPGKAKNYAFRYTRLCPFIQSAPLDPLWRDCGFMS

SEQ ID NO: 28273 - DNA, 1272 bp, Muscodor strobelii
  misc_feature: SGI cDNA ID NO. 569700
  misc_feature: Encodes the peptide sequence at SEQ ID NO 28274
atggtgctcataatacccgtggcattggccgtaatctcagttggtgtagctgttgcgacgagaaccagcaacaaccccagggcagagataccagcgcaagcgcaattcatcgaccagcgtgcatttaacgtgctacctaatgtcgcacccccaagtgtctttaatggaacaactccttttactcctcccggttacgaactgtcggctctcctggagaagccgtttctcgtttacgacgaagaattctatgatgtgattgggcctaatccgtctttgacgctaatcgcccatagcgatacggacccaatcttccacgaagctgtggtatggtatcctcctacaaatgaagtgtttttcgtgcagaacgccggtgcaaaagccgcaggaactggtctcaacaagtcttctatcatacaaaagatcagtcttcaggaggccgaaagtgtcacagctctgcgcaatgcaactggaaaagttcaagtccaagtggtcgaatccaaccctatggtcataaacccaaatggaggggtcaattataaaggtcaaattctctttgctgctgaaggccaaggcgtcaataaaccctcagagctcgtagtgatgaatccgctcgagccatataatacaacagtgctgttaaataactatttcggccgccaattcaactctctaaacgatatctcgatcaatcctcgcaacaaggatatttacttcggtatgtctaagtggcgcaccagcgagaaagaaacggttctgtgcttcaagatcgacgacccagacttcagacccgcgccagcgctcccaactcaagtgtaccgatacaacgacaagacaggcgctgtaactgtggctgcggacggcttcagtctcccggtatgtatcgttttttcgcccgatggttgttatgtgtatattgccgatagcggcgctaatcacgggttctggggctacaatggttctttcccagcttctatttaccgctacgatgtcgctgaggatggaacattcgagaacagaaaagtcttcgcttacgttgactctggaatacccgacggtgtccatgttgacacgaaaggccggctgtatgcaggatgcagtgatggtatccatgtctggaatacagcggggactctcattggcaagatatttattggagaagtatccgcaaatttcaactttgctggcgacggtggtatggtgatatgtgccgaaaccgatctattctacgccaaattacaagtcacaggggggcaatatatgggagatgagtga

SEQ ID NO: 28274 - protein, 423 aa, Muscodor strobelii
  misc_feature: SGI Peptide ID NO. 569700
  misc_feature (97)..(405): Pfam Id: PF08450 Pfam Desc: SMP-30/Gluconolaconase/LRE-like region
  misc_feature (257)..(382): Pfam Id: PF08450 Pfam Desc: SMP-30/Gluconolaconase/LRE-like region
  misc_feature (5)..(416): NCBI GI: 183238971 Blast Desc: levo-lactonase [Fusarium proliferatum]
  misc_feature (28)..(416): NCBI GI: 3810873 Blast Desc: lactonohydrolase [Fusarium oxysporum] gi|6448475|dbj|BAA34218.2| lactonohydrolase [Fusarium oxysporum] gi|54013444|dbj|BAD54840.1| lactonase [Fusarium oxysporum]
  misc_feature (28)..(416): NCBI GI: 77024788 Blast Desc: evolved D-lactonohydrolase [synthetic construct]
  misc_feature (28)..(416): NCBI GI: 84683019 Blast Desc: evolved D-pantonohydrolase [synthetic construct]
  misc_feature (28)..(416): NCBI GI: 255941470 Blast Desc: Pc16g12050 [Penicillium chrysogenum Wisconsin 54-1255] gi|211586127|emb|CAP93875.1| Pc16g12050 [Penicillium chrysogenum Wisconsin 54-1255]
  misc_feature (28)..(416): NCBI GI: 52430041 Blast Desc: D-lactonohydrolase [Gibberella moniliformis]
  misc_feature (5)..(416): NCBI GI: 46115948 Blast Desc: FG03816.1 [Gibberella zeae PH-1]
  misc_feature (1)..(418): NCBI GI: 256722755 Blast Desc: NECHADRAFT_97553 [Nectria haematococca mpVI 77-13-4]
  misc_feature (30)..(416): NCBI GI: 145603528 Blast Desc: MGG_05984 [Magnaporthe grisea 70-15] gi|145011742|gb|EDJ96398.1| MGG_05984 [Magnaporthe grisea 70-15]
  misc_feature (29)..(416): NCBI GI: 38636429 Blast Desc: lactonohydrolase [Neurospora crassa]
MVLIIPVALAVISVGVAVATRTSNNPRAEIPAQAQFIDQRAFNVLPNVAPPSVFNGTTPFTPPGYELSALLEKPFLVYDEEFYDVIGPNPSLTLIAHSDTDPIFHEAVVWYPPTNEVFFVQNAGAKAAGTGLNKSSIIQKISLQEAESVTALRNATGKVQVQVVESNPMVINPNGGVNYKGQILFAAEGQGVNKPSELVVMNPLEPYNTTVLLNNYFGRQFNSLNDISINPRNKDIYFGMSKWRTSEKETVLCFKIDDPDFRPAPALPTQVYRYNDKTGAVTVAADGFSLPVCIVFSPDGCYVYIADSGANHGFWGYNGSFPASIYRYDVAEDGTFENRKVFAYVDSGIPDGVHVDTKGRLYAGCSDGIHVWNTAGTLIGKIFIGEVSANFNFAGDGGMVICAETDLFYAKLQVTGGQYMGDE

SEQ ID NO: 28275 - DNA, 1640 bp, Muscodor strobelii
  misc_feature: SGI EST ID NO. CUFF.66772.1
  misc_feature: Variant of the nucleotide sequence at SEQ ID NO 28273
cgaatattggctgcgtgatagaacacattgttacaacagatcggccccatgtttggttcgtggtggatacagacatcgttctataacttgttttctctctctctctctccaccatccttcctttccactctcgcttcgtctccccgctcgttattatccaaccatcgcacactacatcagtgttgtgaaagcgcttgcaacagtaatctttgctatctgcctcgccacacccaaatcaaacagccgactgatctatatggatacaaattggtgggcgattgagaataataggaggaaagtggatgttactcacctaatattcacgatatttcttgaccaatcgaacatggacgcccaagctaagatggacgatgacccgggaatattcttccggctactgataacccggtatttccgtgaattcatgaattaattctcttagtatcgcatgagagaccataataggtattacagcgaagaacttggcttgtcagatttaacccagaactgctcgacctcgtctcgaggtttccagtgcattggcaccatctaaatcttaccccagttccacacccgaaggaagctaaatcatcaaatgtcgtgcggctcgctccacctcggccattcaaggtaccaaatactggagtattgtagcgacttcgcagaatatagatgtcgatgtgccttgagcccaggctcgacccagaaccaatttccccaccttcggcagtttggagcttctccaaatatccttgggctatgcaaccgcacgggcatgatatcatcgaagatcgcaatacacgaaggctgggtatacttcaagccgcagaaatagcatatatatatccaatcgcccttcagaggacttagagatgcaggcggcaccgccacttacacgggtttacaaagtagtcccgccggaaaagcagcgtagagatctcaaaatggtgctcataatacccgtggcattggccgtaatctcagttggtgtagctgttgcgacgagaaccagcaacaaccccagggcagagataccagcgcaagcgcaattcatcgaccagcgtgcatttaacgtgctacctaatgtcgcacccccaagtgtctttaatggaacaactccttttactcctcccggttacgaactgtcggctctcctggagaagccgtttctcgtttacgacgaagaattctatgatgtgattgggcctaatccgtctttgacgctaatcgcccatagcgatacggacccaatcttccacgaagctgtggtatggtatcctcctacaaatgaagtgtttttcgtgcagaacgccggtgcaaaagccgcaggaactggtctcaacaagtcttctatcatacaaaagatcagtcttcaggaggccgaaagtgtcacagctctgcgcaatgcaactggaaaagttcaagtccaagtggtcgaatccaaccctatggtcataaacccaaatggaggggtcaattataaaggtcaaattctctttgctgctgaaggccaaggcgtcaataaaccctcagagctcgtagtgatgaatccgctcgagccatataatacaacagtgctgttaaataactatttcggccgccaattcaactctctaaacgatatctcgatcaatcctcgc

SEQ ID NO: 28276 - DNA, 4140 bp, Muscodor strobelii
  misc_feature: SGI cDNA ID NO. 569701
  misc_feature: Encodes the peptide sequence at SEQ ID NO 28277
atggcgtcagcggccaaagggatcgaaacccagcaagattcgtcgaattttcggaagcagtggaccagtatccgagcaagcgttcatgatcgtaccaccacattgtatcgaaaaatcatccttgaaacgattctacgtcagaaaccactgagcccgtcgaaagatggccgccatattccgcttcgaattagccacgacgagaacttgattgacgaaagacggggccatccttacatatcaaacacgattcgcacttctcgttatactatctacgactttctgccgaaacagttgttctttcagttcacacgtctcgcaaatgcctacttcctggcgattggaataccccagaccattccaggcttgagcacaactggaagttacactacaattgtgcctttgtttgtgttcgtctcgctcaccatagcgaaagaaggctacgatgattataagagacatcgtttggataatcttgaaaacgcgaataccgccacagttctgaagagctgtgcttgggctgcagcgacggctgccgtgccacggaggagatggtttggcaaagattcagctgttgtagacacaagctcaatcgaaagcgatgatagcgacggagactatggctgggcgcgaattcagtggcgacacatcaaagtcggtgatattatcaggctcgaacgagacgaagcggtccctgctgatatcgtgctgcttcatgcaactggagaaaatggcatcgcatatgttgacacgatggacctagacggggagactaatctaaaatcaaaggaatcactgactgaatttgcagactgcaagacaatagctggtcttcggaatagtgtggctgaattcgtcttagaggatcccaatcccgatctctatcgttttgatgggcgagtaacggtgaatgagaaaacaatgccgctcacatcgaacgaggttatatatcgtggtagtacgctcaggaacacaaattacgccattggtctggtcatcaacacgggagaagagtgcaagattcgcatgaacgcaaaccaacatccgaccgcgaagaaacctgcccttgaagcaattgcgaaccgaatcgtattgacgctagtattctacgtcataatcctcactgctggctgtactggaggctatctcatgtggcgatggtcaacagagcgaatatcgtggtacatttcggatgcaacggttggcctcaaggaaattattatcggctatgcgatccaatacaacaacatcatccctttgtcactttacgtgacactggagattactagaatcgggcaaatgctgtcattgaatggtgatgtcgagatgtatgacgaagtgaccgatacaccggcacggtgcaacacgaatacgatcctcgaaaatcttggacagatcagttacatattttcagacaagactggtacattgaccgataacattatgaaatttcgaaaattgagtatcgcgggaacttcttggttacaccagatggatcttgaatctggcgaggaggatagcacacagcaacgcaagttatcagttccaactacaacgctgtccaaaataaaatcccatgagacagccaagtctgttattcatgaggacatcgaactctttcctctcgcctctcctattacaatcggtcgacctacgctgctcaggaggtctacctcacaatggagatcaacaggccgacctgataatgtgcagccagaattcaatacattcgatctactggagtacatgaaacagcggccaatgtcccatttcacaaagcgtgtcaaagattatatcctatgcatggcgctctgccacacttgtctcccagaaatgaccgatggacaacttgaatatcaggcttcgtcgcctgacgaactagctcttgttcaagcagctcgtgaactcggctgcgtagtgacccatcgaaccgcaaaatccattacgctgcaaatcatattagacgatggaattgagaagacagaaacttatgaaattctagacgtcatcgaattcagtagtaaacgaaagcgcatgtcagtcattgtgcgttatcccgatggtcgaatctgcatcatttgcaagggagcagactctatgatcatgcccaggctgaagttggctcaattagccaaggataaggctgcagaagtaaggaaaagtgccgatctcgagcaggagatgctccgccggagcgaacaactagaggttcgaaatagctttggtggacgaccaagcttcacgatgcggcccagtttcgcaggaaatcgagatagccttgatttaagtcaaatgcccagcaacactctaagaccaaatctcgtgcgaagtcagtcactagagccttcaagttctcgaccgtctcaagataagtcccgcccaacacttgcggttcgtaccacgtctttggatattatgaaaccaatgctcaaaacgagtcccctcccgtctccgtcgcctttgatcaacgacaaattcagccatctcgaagagccatcaatcatggatgagactgccatattcgggcgatgtttcaaacacttggacgagtttgcaaccgaaggtcttcgcacacttctatatgcgcgcaaattcatccccacggctgattatacgatatggaaaggacagtatgacaaagcaactacgagtcttattgatcgtcaggacatgattgaggatgcaggggagattatcgagcagacactggacctagtcggagccacggcaatagaggataagctgcaaatcggtgtacctgagaccattgacaaactacgacgtgctaacatcaagatttggatgctaacgggcgacaagcgagaaacagctattaatattgctcactctgcgcggatatgccggcccacgtccgacatctttattctcgattcatcgaaaggaggcctggatagtcaaattcgcgataccatggaggagatacaaactggcacgacacattcggtcgtcgttatagatgggcaaaccctggctgcagtcgaacaattgcctgatctttgcgatctgttctacacgcttatccccatggttgattcggtcatatgctgccgcgcatcgccagcccaaaagtcgagtattgtcaaagcaattcggcatcgtgttcccaacgccttaacactagccattggtgatggggctaatgacttagctatgatatcagccgctcacgtgggcgtaggaatatcaggcaaagagggtttacaagctgcccgtgtcgcagactacgccattgctcagtttcgcttcttgcaacgacttcttcttgttcatggtcgttggaactacgtcagaacaggcaaattcatcctggcgacgttctggaaggaaatgttcttctacttgccaacggccatgtatcaacgatataacggctacacaggcaccagtctttatgaaagctacagtttgacagtactcaatatcttgttcacgagcttatgcgtcctcgctatgggtatttttgaacaagatctcagtgcggacacgctccttgccgttcctgagctgtatgttcacggtcaacgaaatcgcgagctcaactttccccgcttcgtaagctggatcgccgccgcggtcctgcatggaaccttggtatggttgacagtgtgggcgggttacattgtgtttggacttccccgagacgacaacctatatgctttcggccaattggcattttctgctggtattttgtggaccaattggaagctctttatcatggagacgcattataaaacggctattgttatgggtgcatttggcatcactgtttctgggtggtttgcttggcaagcattcctttcggcgatatatacccagcaaccaagtccatacgatggtcgtggtgctttcgaaaatttcggcgcagagtggtggttcacactgattctgattttcctactacttgtctctattgagactacatttaaatccacgaagcgccagctcattctttggggttattggcagtggccgccttggcgcaagaacgatatagacgaaaatcccgaaaactggcatcgtgagctatggcaggagttggagcagaacccaataatgcaagcacgtctgcaaaaaattttattagacgaaaggcaggatcgtccaaacacatcttcaggttaa

SEQ ID NO: 28277 - protein, 1379 aa, Muscodor strobelii
  misc_feature: SGI Peptide ID NO. 569701
  misc_feature (44)..(1318): NCBI GI: 255716708 Blast Desc: KLTH0F09922p [Lachancea thermotolerans] gi|238936018|emb|CAR24198.1| KLTH0F09922p [Lachancea thermotolerans]
  misc_feature (48)..(1299): NCBI GI: 260948176 Blast Desc: CLUG_01844 [Clavispora lusitaniae ATCC 42720] gi|238848257|gb|EEQ37721.1| CLUG_01844 [Clavispora lusitaniae ATCC 42720]
  misc_feature (40)..(1306): NCBI GI: 238881537 Blast Desc: conserved [Candida albicans WO-1]
  misc_feature (40)..(1363): NCBI GI: 6323814 Blast Desc: Aminophospholipid translocase (flippase) that maintains membrane lipid asymmetry in post-Golgi secretory vesicles; localizes to the trans-Golgi network; likely involved 4
  misc_feature (40)..(1363): NCBI GI: 151945863 Blast Desc: drs2 neo1 family protein [Saccharomyces cerevisiae YJM789]
  misc_feature (40)..(1363): NCBI GI: 259148743 Blast Desc: Dnf3p [Saccharomyces cerevisiae EC1118]
  misc_feature (40)..(1363): NCBI GI: 256270473 Blast Desc: Dnf3p [Saccharomyces cerevisiae JAY291]
  misc_feature (28)..(1373): NCBI GI: 256734491 Blast Desc: [Nectria haematococca mpVI 77-13-4]
  misc_feature (35)..(1369): NCBI GI: 46107424 Blast Desc: FG00595.1 [Gibberella zeae PH-1]
  misc_feature (22)..(1365): NCBI GI: 164425189 Blast Desc: NCU06281 [Neurospora crassa OR74A] gi|157070825|gb|EAA32498.2| NCU06281 [Neurospora crassa OR74A]
  misc_feature (40)..(1295): SWISSPROT Homolog: EC 3.6.3.1 Phospholipid-translocating ATPase
MASAAKGIETQQDSSNFRKQWTSIRASVHDRTTTLYRKIILETILRQKPLSPSKDGRHIPLRISHDENLIDERRGHPYISNTIRTSRYTIYDFLPKQLFFQFTRLANAYFLAIGIPQTIPGLSTTGSYTTIVPLFVFVSLTIAKEGYDDYKRHRLDNLENANTATVLKSCAWAAATAAVPRRRWFGKDSAVVDTSSIESDDSDGDYGWARIQWRHIKVGDIIRLERDEAVPADIVLLHATGENGIAYVDTMDLDGETNLKSKESLTEFADCKTIAGLRNSVAEFVLEDPNPDLYRFDGRVTVNEKTMPLTSNEVIYRGSTLRNTNYAIGLVINTGEECKIRMNANQHPTAKKPALEAIANRIVLTLVFYVIILTAGCTGGYLMWRWSTERISWYISDATVGLKEIIIGYAIQYNNIIPLSLYVTLEITRIGQMLSLNGDVEMYDEVTDTPARCNTNTILENLGQISYIFSDKTGTLTDNIMKFRKLSIAGTSWLHQMDLESGEEDSTQQRKLSVPTTTLSKIKSHETAKSVIHEDIELFPLASPITIGRPTLLRRSTSQWRSTGRPDNVQPEFNTFDLLEYMKQRPMSHFTKRVKDYILCMALCHTCLPEMTDGQLEYQASSPDELALVQAARELGCVVTHRTAKSITLQIILDDGIEKTETYEILDVIEFSSKRKRMSVIVRYPDGRICIICKGADSMIMPRLKLAQLAKDKAAEVRKSADLEQEMLRRSEQLEVRNSFGGRPSFTMRPSFAGNRDSLDLSQMPSNTLRPNLVRSQSLEPSSSRPSQDKSRPTLAVRTTSLDIMKPMLKTSPLPSPSPLINDKFSHLEEPSIMDETAIFGRCFKHLDEFATEGLRTLLYARKFIPTADYTIWKGQYDKATTSLIDRQDMIEDAGEIIEQTLDLVGATAIEDKLQIGVPETIDKLRRANIKIWMLTGDKRETAINIAHSARICRPTSDIFILDSSKGGLDSQIRDTMEEIQTGTTHSVVVIDGQTLAAVEQLPDLCDLFYTLIPMVDSVICCRASPAQKSSIVKAIRHRVPNALTLAIGDGANDLAMISAAHVGVGISGKEGLQAARVADYAIAQFRFLQRLLLVHGRWNYVRTGKFILATFWKEMFFYLPTAMYQRYNGYTGTSLYESYSLTVLNILFTSLCVLAMGIFEQDLSADTLLAVPELYVHGQRNRELNFPRFVSWIAAAVLHGTLVWLTVWAGYIVFGLPRDDNLYAFGQLAFSAGILWTNWKLFIMETHYKTAIVMGAFGITVSGWFAWQAFLSAIYTQQPSPYDGRGAFENFGAEWWFTLILIFLLLVSIETTFKSTKRQLILWGYWQWPPWRKNDIDENPENWHRELWQELEQNPIMQARLQKILLDERQDRPNTSSG

SEQ ID NO: 28278 - DNA, 4851 bp, Muscodor strobelii
  misc_feature: SGI EST ID NO. CUFF.66800.0
  misc_feature: Variant of the nucleotide sequence at SEQ ID NO 28276
cccgcggttttccggatggcccgagacgtcgaccacttggcgcgcattgctggtgcaagaatttcgtagcaatgcgcgacctttcaattgcccacctatttctcaactttgccaactcttaaaactgatgccaaaagtttgacgagctgattcgcatcgaccccctttgatcggaagcggaaccgtcattgatatcgataatttgcactgctgacggtgcgcgacaacatcgcaacgaaacggtcaacgtttaaaccatccgctaggatacccctttggcagcaagtgctattgcgttcgcggtcaactgcaaaagacactcgacctcttttgtcctcccgttcggtgcgggacacgtactcacactctttctcccttgaagagttttgctctttcggatcaatcatgttatcgcggcattacggtgaggctgtgatatagccaagtgtcaacccacgtcatggcgtcagcggccaaagggatcgaaacccagcaagattcgtcgaattttcggaagcagtggaccagtatccgagcaagcgttcatgatcgtaccaccacattgtatcgaaaaatcatccttgaaacgattctacgtcagaaaccactgagcccgtcgaaagatggccgccatattccgcttcgaattagccacgacgagaacttgattgacgaaagacggggccatccttacatatcaaacacgattcgcacttctcgttatactatctacgactttctgccgaaacagttgttctttcagttcacacgtctcgcaaatgcctacttcctggcgattggaataccccagaccattccaggcttgagcacaactggaagttacactacaattgtgcctttgtttgtgttcgtctcgctcaccatagcgaaagaaggctacgatgattataagagacatcgtttggataatcttgaaaacgcgaataccgccacagttctgaagagctgtgcttgggctgcagcgacggctgccgtgccacggaggagatggtttggcaaagattcagctgttgtagacacaagctcaatcgaaagcgatgatagcgacggagactatggctgggcgcgaattcagtggcgacacatcaaagtcggtgatattatcaggctcgaacgagacgaagcggtccctgctgatatcgtgctgcttcatgcaactggagaaaatggcatcgcatatgttgacacgatggacctagacggggagactaatctaaaatcaaaggaatcactgactgaatttgcagactgcaagacaatagctggtcttcggaatagtgtggctgaattcgtcttagaggatcccaatcccgatctctatcgttttgatgggcgagtaacggtgaatgagaaaacaatgccgctcacatcgaacgaggttatatatcgtggtagtacgctcaggaacacaaattacgccattggtctggtcatcaacacgggagaagagtgcaagattcgcatgaacgcaaaccaacatccgaccgcgaagaaacctgcccttgaagcaattgcgaaccgaatcgtattgacgctagtattctacgtcataatcctcactgctggctgtactggaggctatctcatgtggcgatggtcaacagagcgaatatcgtggtacatttcggatgcaacggttggcctcaaggaaattattatcggctatgcgatccaatacaacaacatcatccctttgtcactttacgtgacactggagattactagaatcgggcaaatgctgtcattgaatggtgatgtcgagatgtatgacgaagtgaccgatacaccggcacggtgcaacacgaatacgatcctcgaaaatcttggacagatcagttacatattttcagacaagactggtacattgaccgataacattatgaaatttcgaaaattgagtatcgcgggaacttcttggttacaccagatggatcttgaatctggcgaggaggatagcacacagcaacgcaagttatcagttccaactacaacgctgtccaaaataaaatcccatgagacagccaagtctgttattcatgaggacatcgaactctttcctctcgcctctcctattacaatcggtcgacctacgctgctcaggaggtctacctcacaatggagatcaacaggccgacctgataatgtgcagccagaattcaatacattcgatctactggagtacatgaaacagcggccaatgtcccatttcacaaagcgtgtcaaagattatatcctatgcatggcgctctgccacacttgtctcccagaaatgaccgatggacaacttgaatatcaggcttcgtcgcctgacgaactagctcttgttcaagcagctcgtgaactcggctgcgtagtgacccatcgaaccgcaaaatccattacgctgcaaatcatattagacgatggaattgagaagacagaaacttatgaaattctagacgtcatcgaattcagtagtaaacgaaagcgcatgtcagtcattgtgcgttatcccgatggtcgaatctgcatcatttgcaagggagcagactctatgatcatgcccaggctgaagttggctcaattagccaaggataaggctgcagaagtaaggaaaagtgccgatctcgagcaggagatgctccgccggagcgaacaactagaggttcgaaatagctttggtggacgaccaagcttcacgatgcggcccagtttcgcaggaaatcgagatagccttgatttaagtcaaatgcccagcaacactctaagaccaaatctcgtgcgaagtcagtcactagagccttcaagttctcgaccgtctcaagataagtcccgcccaacacttgcggttcgtaccacgtctttggatattatgaaaccaatgctcaaaacgagtcccctcccgtctccgtcgcctttgatcaacgacaaattcagccatctcgaagagccatcaatcatggatgagactgccatattcgggcgatgtttcaaacacttggacgagtttgcaaccgaaggtcttcgcacacttctatatgcgcgcaaattcatccccacggctgattatacgatatggaaaggacagtatgacaaagcaactacgagtcttattgatcgtcaggacatgattgaggatgcaggggagattatcgagcagacactggacctagtcggagccacggcaatagaggataagctgcaaatcggtgtacctgagaccattgacaaactacgacgtgctaacatcaagatttggatgctaacgggcgacaagcgagaaacagctattaatattgctcactctgcgcggatatgccggcccacgtccgacatctttattctcgattcatcgaaaggaggcctggatagtcaaattcgcgataccatggaggagatacaaactggcacgacacattcggtcgtcgttatagatgggcaaaccctggctgcagtcgaacaattgcctgatctttgcgatctgttctacacgcttatccccatggttgattcggtcatatgctgccgcgcatcgccagcccaaaagtcgagtattgtcaaagcaattcggcatcgtgttcccaacgccttaacactagccattggtgatggggctaatgacttagctatgatatcagccgctcacgtgggcgtaggaatatcaggcaaagagggtttacaagctgcccgtgtcgcagactacgccattgctcagtttcgcttcttgcaacgacttcttcttgttcatggtcgttggaactacgtcagaacaggcaaattcatcctggcgacgttctggaaggaaatgttcttctacttgccaacggccatgtatcaacgatataacggctacacaggcaccagtctttatgaaagctacagtttgacagtactcaatatcttgttcacgagcttatgcgtcctcgctatgggtatttttgaacaagatctcagtgcggacacgctccttgccgttcctgagctgtatgttcacggtcaacgaaatcgcgagctcaactttccccgcttcgtaagctggatcgccgccgcggtcctgcatggaaccttggtatggttgacagtgtgggcgggttacattgtgtttggacttccccgagacgacaacctatatgctttcggccaattggcattttctgctggtattttgtggaccaattggaagctctttatcatggagacgcattataaaacggctattgttatgggtgcatttggcatcactgtttctgggtggtttgcttggcaagcattcctttcggcgatatatacccagcaaccaagtccatacgatggtcgtggtgctttcgaaaatttcggcgcagagtggtggttcacactgattctgattttcctactacttgtctctattgagactacatttaaatccacgaagcgccagctcattctttggggttattggcagtggccgccttggcgcaagaacgatatagacgaaaatcccgaaaactggcatcgtgagctatggcaggagttggagcagaacccaataatgcaagcacgtctgcaaaaaattttattagacgaaaggcaggatcgtccaaacacatcttcaggttaaagtgatgggagccgtggattttgcatttcgtggcgtttggacctgggctgcatgtgaaggatcggagcatttttcaaggtattggaatttcattcgagccattctgcacgacagcaacggcatgtttctatgtctatcagcaatgatacccgattctatacactttagtcattgtaaataattatagggcattataatgtcgtttctgaacataattagacttgcttgtaaatagataattcttaccgagg

SEQ ID NO: 28279 - DNA, 2772 bp, Muscodor strobelii
  misc_feature: SGI cDNA ID NO. 569702
  misc_feature: Encodes the peptide sequence at SEQ ID NO 28280
atgacagaaaagcctcctcccctccctacacagacatcgaccccgagtcagacggccgccctaagccccaaatccgcacctctccccttcagccatgtgcccagcaagattcaggcgcccgccgaggaagagccctacacaatcaagtgtatctgcgacttcatcgacgatgacgggaacacgatatactgcgatgtctgcgatacgtggcaacatatcgagtgctactatccattcaacatggccgaggtcactcgcgacgacttcagtcattcctgcgtcgactgcaagccgcgctcgttggaccggcaacgcgcaaacgagcgccagttcctgcgacaaaacaagctcgcactggcttccgccgaacgcaaacccaccaagcgtcctcctcccaagggccagagaaagaaggccaaaccctccgatgtagcggcaaatggccacagcggttctgaaaacaacgccaaagctcctcaagacgccactcatacacaccagcacaagaaatccaagagcactcaccgtcccagccagtccatctcgtcgcaggtagccaagcgcagtccctcgtacggccaaaggacggcaaacccgcacggtcatcctccttcgcccgcgaccacaccacctgatatccctgccgagttcgagatccatacctattctgacgagttcatgaatctatacaaggatgatcgagatgtcgctatcgtccaaacaaattcgttcgcgagcttgataatatcaaacctcctttcgacctggttaagggacggcgagaagctgcgccaagaaaccggttgtgactatggcgatgttttccgatcactgccatccgacattgaatcgcgcagagctagcccccaagtccggaccaaggacctaccgctcggacctgatgccatcgtacactggcagtatcttgtcactcctgagccagttgataaagacatcccgttgatagagctcaatggccaaattggtattcaaaaagactattgtcaagacccgtccaatcgatgggctgatctctcttcgcctcttccctttgtatttttccatcccgaactcccactatacattgacacccgcaaagaaggctctctagcccgctatgtgcgacggagctgcaagccaaatgccacatttgacacgtttttatccgagggttctgtgtatcatttctggctcgtcagcgatcgccctttgaaagcggacgagcagattacgattccgtgggtcttcaatctccagaaggacgttgcaaggcggtggttacaattactcggcctcagcgacgacggagataagcaacccgaattcaacgacaacgagatcgagacatatcagagcattgctacttgggtgcacaccatactgtctgagtatggaggatgtgcatgcgacctcgggcctgattgcgccttttctcggtttcaccggacttacatatttcgcccacagtctaaagaaaggggaccgaagaagaaatctcgaaagtccaaaagcaacatctcgccaaccagtactggccaagcgacaaacagtcgtgcacctagtgagggtcatctggatgacggggcagataacgactctggatcatcgcggagtaagccgacaagtcgcgatcccactcccgcacctcgacaaggttctttcgatactctgggtgtattgacggagctcacggaccgagataagcggaaggtgcaaatggtggaagattcatttcgtcgaatggaacaacaacagcctccgcgaaagaagaaaagggtgtccgatggtaccaacgccagcaacagcagtacaactaaaaccaaggcaaaaggtgcctcaataaaagatgggcccaacgggtcatcagaacgtcgatatgttgatgctgccacatcgggcagcattggcgaatctcctactagtgcgatctctccctcgaccggaaatccgttccgtctaccagctcagcgccgatccgcatcggcttcgcgtagattatctgcagactcacgccctgagtattgcgacgcggctgttcaaaccgacttcgtagatggcgcatggttcagcaacgataaacaagtttccaagcccaaaaagcgagttgtctcgttatcgaagcgcttgcttgcgagtcgtcatcggttccggaatgatgaaatcgaacgacgcaaaagtgaggtcggttctccgaactcagtaacgtcggctctagtgaagatggatctcgaatcacccacagcaatacaatccccagccggcgttcgttcgcccgatgtagaaagtgccgagatatctcgaccgaccccgacagaaatagatacgaccagtgatatcctgatgatagatcatccatcacaactagagagtaatgaccagcatatggtcgtatcgccgtcggtaccaaatgccaaagtcaagtcgccggagcttcgcgttcagctaccgccagtccctgtgttcggcgactcgccgaccgttgcttccgtcacaacacccctttccgctaacggcactattgcgcaatcgcccttctcggccagcaatagtctttctagtccttttgtgccgccttctgtgaacggggccacggtacagccaagccctatcaagaagaaactcagtctaagcgattacacaaagagcaggatgaataaagtggctgctgcgaagtcattggcttcgcctttgaagtcgtcaacggctatagtcgaagaggccaaatcgcccatcaacacagacgttgtcatgacagattcggctgattcctag

SEQ ID NO: 28280 - protein, 923 aa, Muscodor strobelii
  misc_feature: SGI Peptide ID NO. 569702
  misc_feature (49)..(99): Pfam Id: PF00628 Pfam Desc: PHD-finger
  misc_feature (283)..(422): Pfam Id: PF00856 Pfam Desc: SET domain
  misc_feature (309)..(422): Pfam Id: PF00856 Pfam Desc: SET domain
  misc_feature (1)..(914): NCBI GI: 46136139 Blast Desc: FG09585.1 [Gibberella zeae PH-1]
  misc_feature (29)..(909): NCBI GI: 256727594 Blast Desc: NECHADRAFT_123294 [Nectria haematococca mpVI 77-13-4]
  misc_feature (1)..(916): NCBI GI: 39951831 Blast Desc: MGG_01558 [Magnaporthe grisea 70-15] gi|145020599|gb|EDK04728.1| MGG_01558 [Magnaporthe grisea 70-15]
  misc_feature (1)..(914): NCBI GI: 116196560 Blast Desc: CHGG_04878 [Chaetomium globosum CBS 148.51] gi|88180791|gb|EAQ88259.1| CHGG_04878 [Chaetomium globosum CBS 148.51]
  misc_feature (1)..(909): NCBI GI: 171688454 Blast Desc: protein product [Podospora anserina] gi|170944189|emb|CAP70299.1| protein product [Podospora anserina]
  misc_feature (1)..(908): NCBI GI: 40882234 Blast Desc: conserved [Neurospora crassa]
  misc_feature (1)..(908): NCBI GI: 85085259 Blast Desc: NCU04389 [Neurospora crassa OR74A] gi|28918558|gb|EAA28230.1| [Neurospora crassa OR74A]
  misc_feature (253)..(923): NCBI GI: 261352412 Blast Desc: conserved [Verticillium albo-atrum VaMs.102]
  misc_feature (1)..(909): NCBI GI: 156050289 Blast Desc: SS1G_07731 [Sclerotinia sclerotiorum 1980] gi|154692132|gb|EDN91870.1| SS1G_07731 [Sclerotinia sclerotiorum 1980]
  misc_feature (1)..(888): NCBI GI: 154289882 Blast Desc: BC1G_15895 [Botryotinia fuckeliana B05.10] gi|150848554|gb|EDN23747.1| BC1G_15895 [Botryotinia fuckeliana B05.10]
MTEKPPPLPTQTSTPSQTAALSPKSAPLPFSHVPSKIQAPAEEEPYTIKCICDFIDDDGNTIYCDVCDTWQHIECYYPFNMAEVTRDDFSHSCVDCKPRSLDRQRANERQFLRQNKLALASAERKPTKRPPPKGQRKKAKPSDVAANGHSGSENNAKAPQDATHTHQHKKSKSTHRPSQSISSQVAKRSPSYGQRTANPHGHPPSPATTPPDIPAEFEIHTYSDEFMNLYKDDRDVAIVQTNSFASLIISNLLSTWLRDGEKLRQETGCDYGDVFRSLPSDIESRRASPQVRTKDLPLGPDAIVHWQYLVTPEPVDKDIPLIELNGQIGIQKDYCQDPSNRWADLSSPLPFVFFHPELPLYIDTRKEGSLARYVRRSCKPNATFDTFLSEGSVYHFWLVSDRPLKADEQITIPWVFNLQKDVARRWLQLLGLSDDGDKQPEFNDNEIETYQSIATWVHTILSEYGGCACDLGPDCAFSRFHRTYIFRPQSKERGPKKKSRKSKSNISPTSTGQATNSRAPSEGHLDDGADNDSGSSRSKPTSRDPTPAPRQGSFDTLGVLTELTDRDKRKVQMVEDSFRRMEQQQPPRKKKRVSDGTNASNSSTTKTKAKGASIKDGPNGSSERRYVDAATSGSIGESPTSAISPSTGNPFRLPAQRRSASASRRLSADSRPEYCDAAVQTDFVDGAWFSNDKQVSKPKKRVVSLSKRLLASRHRFRNDEIERRKSEVGSPNSVTSALVKMDLESPTAIQSPAGVRSPDVESAEISRPTPTEIDTTSDILMIDHPSQLESNDQHMVVSPSVPNAKVKSPELRVQLPPVPVFGDSPTVASVTTPLSANGTIAQSPFSASNSLSSPFVPPSVNGATVQPSPIKKKLSLSDYTKSRMNKVAAAKSLASPLKSSTAIVEEAKSPINTDVVMTDSADS

SEQ ID NO: 28281 - DNA, 6275 bp, Muscodor strobelii
  misc_feature: SGI EST ID NO. CUFF.66868.0
  misc_feature: Variant of the nucleotide sequence at SEQ ID NO 28279
caacagcgcacatatttattggcctcattggcctctcggctgcctggcctgggaatgaaggacatggatcggtttgatgatcccgttcgcaccttatctgtctgaatgcctctcatatctctctattaaatcattctgttttatgatacttcctcgcctcgatgcactcggtgctttgggtatcatgctactatatgcgacttcactgcagtcccgtcctttatctgacgtcttctctcacatttcaagaattactcccaacgtggcgtatgttgaattgatctgagaataagaggcatcagtttcctctatcccaaacgttggttaagtactatccgtctctcagatggaaaccattataatttcgttctactgtctctccccccattttcgttcccccctccttcatttccttgtcgttgccgactctgtgtatttctgttggcgggcgggctgtgggttagaagtcggtcgggggcacgcggtttccgtccagtgaactagcagcctaaggcagccaccagcgagccaggcaacccctgccgacaaaaaatgttggctgctgcactcgcagctgcacgctgcacaacctggtagggagcgggcttgcggcgcctctcgaccggccacggctcgtgctcctgctgccactgctttgccgggcacctgaggcgtggttctgcatggtggtcacagattggacgcatttgatccgagcagccgaccagctaacaataaggttcagaggctttcgtatgatagatatcatcaaggtcaggtcaggtaggtatggtgcctaaggtaggtacggatagcttcttacacagtgctcggctgtcatggggcaatcgcaatcgcaatcgcccgtctctccatacatgtaagtcgtctctcaacctcgcatgtattccctccattctctggggggcgactgcccatgtccctctctgccgcgatgcccaggtgcaggaccagtcgggtacgtacccttccctgtggtataacgcgggcaggcctactagcagcccagtcgaacccggacaggcgacaggcagcgggtggggagccactcttcctagtacctgcccacggtccaccctcgctcgctggtctgtcctgtcctgctcggtttccccttccaatgcacacagtcgagacagtacagacagtatgcctggtactgtattgtacagcagtacattgggtggacagacagtggcagactggcgttctctcgcgctcacccacgcactggacacacacacactggacgcacacactggactgcccagactccaagcagcgcaagcaccgcacacagcgcagacctaagcagactgagactctgaggcacacgctcttctcatcctcgccctcgtctgtctgtccctcgcattccctccctctctccccgtcctcctccttttccgactcgaatgcacaatccccattccgctccaagacctgcttgcctcgacatttcccccctcgaacacctcgacaacaatcactctacagatcctgttgccgccaactctccgtcgccgccgtccgccacccgccgtccgcctcctcaatctcgctcttcctcgaggcgcatcccccccaaatcctctccgttctcttgcctccattttcatttcgcgacacattgcaaccgcccatcctcgtttctgtgacgactactagtctcatcgcgacatagttctgcctcgaacatcattcccacctttcttttcacacttgtctctggcctgagactcgcccgatcgaaatctcttttgtcacctgcgtctcctttgtgtcgctgcacccatccacgccacctcgagtctcgacggctacttgagcctacctctcgagcctgtacggcgctcggcgacgccttaatctaccattcgtctagttatcagcaactcttcggcaccacgtcggcgcgtcgcacctctaatcgtcgtcatgccacccagatccccaagataaacctccctgacgacgacaacatccacccgacatctcacttcgtgaggtgtgcgtcagactatgacagaaaagcctcctcccctccctacacagacatcgaccccgagtcagacggccgccctaagccccaaatccgcacctctccccttcagccatgtgcccagcaagattcaggcgcccgccgaggaagagccctacacaatcaagtgtatctgcgacttcatcgacgatgacgggaacacgatatactgcgatgtctgcgatacgtggcaacatatcgagtgctactatccattcaacatggccgaggtcactcgcgacgacttcagtcattcctgcgtcgactgcaagccgcgctcgttggaccggcaacgcgcaaacgagcgccagttcctgcgacaaaacaagctcgcactggcttccgccgaacgcaaacccaccaagcgtcctcctcccaagggccagagaaagaaggccaaaccctccgatgtagcggcaaatggccacagcggttctgaaaacaacgccaaagctcctcaagacgccactcatacacaccagcacaagaaatccaagagcactcaccgtcccagccagtccatctcgtcgcaggtagccaagcgcagtccctcgtacggccaaaggacggcaaacccgcacggtcatcctccttcgcccgcgaccacaccacctgatatccctgccgagttcgagatccatacctattctgacgagttcatgaatctatacaaggatgatcgagatgtcgctatcgtccaaacaaattcgttcgcgagcttgataatatcaaacctcctttcgacctggttaagggacggcgagaagctgcgccaagaaaccggttgtgactatggcgatgttttccgatcactgccatccgacattgaatcgcgcagagctagcccccaagtccggaccaaggacctaccgctcggacctgatgccatcgtacactggcagtatcttgtcactcctgagccagttgataaagacatcccgttgatagagctcaatggccaaattggtattcaaaaagactattgtcaagacccgtccaatcgatgggctgatctctcttcgcctcttccctttgtatttttccatcccgaactcccactatacattgacacccgcaaagaaggctctctagcccgctatgtgcgacggagctgcaagccaaatgccacatttgacacgtttttatccgagggttctgtgtatcatttctggctcgtcagcgatcgccctttgaaagcggacgagcagattacgattccgtgggtcttcaatctccagaaggacgttgcaaggcggtggttacaattactcggcctcagcgacgacggagataagcaacccgaattcaacgacaacgagatcgagacatatcagagcattgctacttgggtgcacaccatactgtctgagtatggaggatgtgcatgcgacctcgggcctgattgcgccttttctcggtttcaccggacttacatatttcgcccacagtctaaagaaaggggaccgaagaagaaatctcgaaagtccaaaagcaacatctcgccaaccagtactggccaagcgacaaacagtcgtgcacctagtgagggtcatctggatgacggggcagataacgactctggatcatcgcggagtaagccgacaagtcgcgatcccactcccgcacctcgacaaggttctttcgatactctgggtgtattgacggagctcacggaccgagataagcggaaggtgcaaatggtggaagattcatttcgtcgaatggaacaacaacagcctccgcgaaagaagaaaagggtgtccgatggtaccaacgccagcaacagcagtacaactaaaaccaaggcaaaaggtgcctcaataaaagatgggcccaacgggtcatcagaacgtcgatatgttgatgctgccacatcgggcagcattggcgaatctcctactagtgcgatctctccctcgaccggaaatccgttccgtctaccagctcagcgccgatccgcatcggcttcgcgtagattatctgcagactcacgccctgagtattgcgacgcggctgttcaaaccgacttcgtagatggcgcatggttcagcaacgataaacaagtttccaagcccaaaaagcgagttgtctcgttatcgaagcgcttgcttgcgagtcgtcatcggttccggaatgatgaaatcgaacgacgcaaaagtgaggtcggttctccgaactcagtaacgtcggctctagtgaagatggatctcgaatcacccacagcaatacaatccccagccggcgttcgttcgcccgatgtagaaagtgccgagatatctcgaccgaccccgacagaaatagatacgaccagtgatatcctgatgatagatcatccatcacaactagagagtaatgaccagcatatggtcgtatcgccgtcggtaccaaatgccaaagtcaagtcgccggagcttcgcgttcagctaccgccagtccctgtgttcggcgactcgccgaccgttgcttccgtcacaacacccctttccgctaacggcactattgcgcaatcgcccttctcggccagcaatagtctttctagtccttttgtgccgccttctgtgaacggggccacggtacagccaagccctatcaagaagaaactcagtctaagcgattacacaaagagcaggatgaataaagtggctgctgcgaagtcattggcttcgcctttgaagtcgtcaacggctatagtcgaagaggccaaatcgcccatcaacacagacgttgtcatgacagattcggctgattcctagatgacggtgcttatcgccgaggcaccagaatttttctgtgttgtatagagagcgatactgcgagatgggcagcagctgacgcacatgttcgagagatcttcctttcgtcgggttttttttccaggagttccagaaatgagcgataccaatctggtgggttacggcgatagtggtagttgggcgttttccatgcctggcgttggggcaaggacttttaattttatggcacatgacggggaaaaatcatcggcgcgagtgttttgggaacagcattacaaccgttggtcaggatcgtggttagctcattgcagtatcggcacgttatctttcatctctaatcatcgctaccttgagagtgtccaataaggacccggtactggtcaaaccggccattaccgaactgatgaaagagttgaagtcaaagtacgtcgaatatcctgactggctcacagccgaccagtatactacatacatgtatcaataaacagctggaatacacagaacagggttgtaagctttcacggtaacgactaatggtgaagtaaaatgggaagtgagactctgggatgcgattagtcttagatgagacagtatcatgtacacaataagcagctatagcccatcgtgccgaaatgatgaggctggctagtggctggtggctattgtggaatatgagaaaaaggcatctttcaagccttatgaaccggaaagctggatgtgaaagacaaaagcgtaatgcaaaagattagctagcgattgtttcgatcagtggacctccgggttatgagcctgagtcagctagcttttgctagttgatgtacagcgagatgtcgtttcggtgtgggttgaaacctagcgagattaggcatgtatgtaactgcgttgggtaatggtgaaaggggaaagaggaaatgggagatatgtcagtccatttacttgaccaccgtagtctgtgaaaagctggtgaaatgacccctctcgtggttgaagagacgggaacaaaatcaagaatgtgaagagggaattttttgagtattatttgacaggagccctcgcatgttattggatttggcgggtgggataggtgacgttaagcatggttggagttcggatgatcgacttggagaaggcgactaataaagaaggtcggcggtagataatattcgcttcttgttggttgagtggcgttgagtggggagttgtcaggcgggtgaaaaatagcgggaggcctggttaattgtgggtggggaccaccaacgcatcatgtggatgtgagagtatggggctttagggtcacttacttgattactgggtttttaggtcgttgggaatgagtggtacatatgattggagattgataatgtagtatggattatttgcgagctgcctgtctgcgttgaaggcgaggtgttgagcgaagaggtcgatagctggataggttctatctagtatgtattagg

SEQ ID NO: 28282 - DNA, 1419 bp, Muscodor strobelii
  misc_feature: SGI cDNA ID NO. 569703
  misc_feature: Reduced expression when VOC is produced
  misc_feature: Encodes the peptide sequence at SEQ ID NO 28283
atgtctgctaaccaagttgcctcaacggccctctcgcgcaccgagacgctcagcctgagtgctctgtctcttgcatgcggtgctgtcttgttccgcactcttgagggcgatggcgagccgttgattgcatcgctggcactcagcggttgcggcttcgctgctagctacgccatgatccgctggctgggaaacacgttcattaaggctggcttgaagggccgtgatatgtccaaggtcaacaacacccacttcctgcccgagtgcatgggtgccatctgcgccattgtctacctgattatcatcatcgtcttcatcccgttccccttctacaaggacatcgttgtcgctactagtggtggtggaaaccgcgatgtcgtcatgaacaccgagtttgtccacaaggggcgcctgcttcacaagtttccccacagcaagctcgcctcgttcctctcggccatcatctcgctccagtccatcactctgctgggtattggcgacgacctcttcgacatccgctggaggcacaagttctttatcccggcctttgcctcgatcccgctgctcgtcatctactttgtcgacttcggtgtcacttccatcgtcctgcccaccttcatccagccctatgtcggccgcgaactcttcgacctcggcttcctctactacggttacatggccgccttctgcatcttcagccccaacagcatcaacatcctggctggaatcaacggcatcgaggtctcccagagcatcgtcattgcagctctacttgccttcaacgatgctctctacctcttcaccccctatcctcacccggccaccgactcgcacttgttctccctctacttcctcctgcctttcctgggcgtgagcttggccttgttgtgccacaactggtacccggcccgtgtcttcgttggcgacacgtactgctactttgctggcatggtcttcgtcgtcgttagcattctcggccacttctccaagacgctgatactcctcttgatacctcaagtcttcaacttcatctacagcgtcccccagctcttccacatcatcccctgcccacgacaccgcctgccccatttcaacgctagaagcggtctcttggagccgagcaccaccaagtgggagaaggagagacagccccatcccctcatcgcccaaggtttacgtctccttgcccagcttaagctcctgtcactaaaagaagacaaagagggccacatcaccgagacgagcaacttcacgatcctcaacctttggctggtctggcgagggcccatgagagaagatcaattggcttttgagatcactagcatgcaagttgtggttggtctgtttggtctttttgtcaggcaccgcctcgcgctgctgattttcagagaagataatctgagcattagcagcatggtttaa

SEQ ID NO: 28283 - protein, 472 aa, Muscodor strobelii
  misc_feature: SGI Peptide ID NO. 569703
  misc_feature (149)..(331): Pfam Id: PF00953 Pfam Desc: Glycosyl transferase family 4
  misc_feature (14)..(470): NCBI GI: 171688372 Blast Desc: protein product [Podospora anserina] gi|170944148|emb|CAP70258.1| protein product [Podospora anserina]
  misc_feature (7)..(468): NCBI GI: 164429464 Blast Desc: NCU10762 [Neurospora crassa OR74A] gi|40882248|emb|CAF06073.1| UDP-N-acetylglucosamine:dolichyl phosphate N-acetylglucosamine-1-phosphate transferase [Neurospora
  misc_feature (7)..(465): NCBI GI: 46136137 Blast Desc: FG09584.1 [Gibberella zeae PH-1]
  misc_feature (9)..(468): NCBI GI: 39951833 Blast Desc: MGG_01559 [Magnaporthe grisea 70-15] gi|145020598|gb|EDK04727.1| MGG_01559 [Magnaporthe grisea 70-15]
  misc_feature (7)..(465): NCBI GI: 256727020 Blast Desc: [Nectria haematococca mpVI 77-13-4]
  misc_feature (8)..(472): NCBI GI: 145231987 Blast Desc: An02g03240 [Aspergillus niger] gi|18677129|gb|AAL78196.1|AF126048_1 UDP-N-acetylglucosamine:dolichyl phosphate transferase niger]
  misc_feature (8)..(465): NCBI GI: 225679876 Blast Desc: UDP-N-acetylglucosamine-1-P transferase [Paracoccidioides brasiliensis Pb03]
  misc_feature (8)..(465): NCBI GI: 226291640 Blast Desc: UDP-N-acetyl-glucosamine-1-P transferase Alg7 [Paracoccidioides brasiliensis Pb18]
  misc_feature (10)..(465): NCBI GI: 226286166 Blast Desc: UDP-N-acetylglucosamine-1-P transferase [Paracoccidioides brasiliensis Pb01]
  misc_feature (25)..(466): NCBI GI: 189210323 Blast Desc: UDP-GlcNAc-1-phosphate transferase [Pyrenophora tritici-repentis Pt-1C-BFP] gi|187977586|gb|EDU44212.1| UDP-GlcNAc-1-phosphate transferase [Pyrenophora tritici-repentis
  misc_feature (41)..(466): SWISSPROT Homolog: EC 2.7.8.15 UDP-N-acetylglucosamine--dolichyl-phosphateN-acetylglucosaminephosphotransferase
  misc_feature: Useful for introducing or modulating the production of volatile compounds
MSANQVASTALSRTETLSLSALSLACGAVLFRTLEGDGEPLIASLALSGCGFAASYAMIRWLGNTFIKAGLKGRDMSKVNNTHFLPECMGAICAIVYLIIIIVFIPFPFYKDIVVATSGGGNRDVVMNTEFVHKGRLLHKFPHSKLASFLSAIISLQSITLLGIGDDLFDIRWRHKFFIPAFASIPLLVIYFVDFGVTSIVLPTFIQPYVGRELFDLGFLYYGYMAAFCIFSPNSINILAGINGIEVSQSIVIAALLAFNDALYLFTPYPHPATDSHLFSLYFLLPFLGVSLALLCHNWYPARVFVGDTYCYFAGMVFVVVSILGHFSKTLILLLIPQVFNFIYSVPQLFHIIPCPRHRLPHFNARSGLLEPSTTKWEKERQPHPLIAQGLRLLAQLKLLSLKEDKEGHITETSNFTILNLWLVWRGPMREDQLAFEITSMQVVVGLFGLFVRHRLALLIFREDNLSISSMV

SEQ ID NO: 28284 - DNA, 1886 bp, Muscodor strobelii
  misc_feature: SGI EST ID NO. CUFF.66923.0
  misc_feature: Variant of the nucleotide sequence at SEQ ID NO 28282
ccacgacaccttttttatcgccgactctgttaccagagcacaacacatggtggaaagcccattgttgctcggaacggtatcaattatgttcggcgacttcccctttttctcttctaccgccaactttccttcactcatttctggttgtgctgcgctgtgccgtgcgcctgaaagcgaacgcgacaagctcgagcgttgacagttgaccattaacgaccatgtctgctaaccaagttgcctcaacggccctctcgcgcaccgagacgctcagcctgagtgctctgtctcttgcatgcggtgctgtcttgttccgcactcttgagggcgatggcgagccgttgattgcatcgctggcactcagcggttgcggcttcgctgctagctacgccatgatccgctggctgggaaacacgttcattaaggctggcttgaagggccgtgatatgtccaaggtcaacaacacccacttcctgcccgagtgcatgggtgccatctgcgccattgtctacctgattatcatcatcgtcttcatcccgttccccttctacaaggacatcgttgtcgctactagtggtggtggaaaccgcgatgtcgtcatgaacaccgagtttgtccacaaggggcgcctgcttcacaagtttccccacagcaagctcgcctcgttcctctcggccatcatctcgctccagtccatcactctgctgggtattggcgacgacctcttcgacatccgctggaggcacaagttctttatcccggcctttgcctcgatcccgctgctcgtcatctactttgtcgacttcggtgtcacttccatcgtcctgcccaccttcatccagccctatgtcggccgcgaactcttcgacctcggcttcctctactacggttacatggccgccttctgcatcttcagccccaacagcatcaacatcctggctggaatcaacggcatcgaggtctcccagagcatcgtcattgcagctctacttgccttcaacgatgctctctacctcttcaccccctatcctcacccggccaccgactcgcacttgttctccctctacttcctcctgcctttcctgggcgtgagcttggccttgttgtgccacaactggtacccggcccgtgtcttcgttggcgacacgtactgctactttgctggcatggtcttcgtcgtcgttagcattctcggccacttctccaagacgctgatactcctcttgatacctcaagtcttcaacttcatctacagcgtcccccagctcttccacatcatcccctgcccacgacaccgcctgccccatttcaacgctagaagcggtctcttggagccgagcaccaccaagtgggagaaggagagacagccccatcccctcatcgcccaaggtttacgtctccttgcccagcttaagctcctgtcactaaaagaagacaaagagggccacatcaccgagacgagcaacttcacgatcctcaacctttggctggtctggcgagggcccatgagagaagatcaattggcttttgagatcactagcatgcaagttgtggttggtctgtttggtctttttgtcaggcaccgcctcgcgctgctgattttcagagaagataatctgagcattagcagcatggtttaaggttgaacgcctttaaccctccttggggcaacacttttctcgagatacccattttgctcacttttgcgttgatgtatgtagcatagcgataacgtatgctgcgcggagatgctacgtcgctgccatcccgacctagcaaattcaatccgatgattttgaaatgaactatcatgcgttttaataagttgctgtgaaactaagagctgtgtggtcgagttggtatgggtatgacaggggccgacatattca

SEQ ID NO: 28285 - DNA, 2682 bp, Muscodor strobelii
  misc_feature: SGI cDNA ID NO. 569704
  misc_feature: Encodes the peptide sequence at SEQ ID NO 28286
atggagatcaacctcgagagcgacgtaaaagacaaagcgcgttcgatatccgacgaggagcatggtatcgcgcagcaagtcgacgatgcggaatcatataggtgtgaagatgagatacacaaagtcgaaacaacagccagccgagcgagcaagacaagtaaactgtcgcggatcattcctcaactaagtcgtaaggaggaggttgcccccatcatccatccccttagtgatctcgatcgtggaatcgtgggatgggaaagccaggatgatcctgatatgcccatgaatttcggtgcgggacgaaaatggttttgtatcgcctgcttgtctctgatcaccctgatatcgccgttgtcgtcgacaattctgtctcctgcgatcactgacgtgagcgccaccttccacaataccgacccgatattaggcgctttcccggtgagcatcttcctgcttggatatgcagtcggcccccttctcctgtcgcccctgtcggaaatttacgggcgagctttggtcctttccagcgcgaacgctttcttctgcgtctggcatataggatgcgcactggctccgagtctgaactcattgattttctttcggttcatgtgcggtgttggtggcgcaggatgtatgactctcgggccagccgtggtaggagatgtcttccaaatcgtggagcgaggtaaaggcttggcagctttgacgctgggtcccctcgtaggtccaacatttgggccattgatcggagcttttattgttgcgtcactcggatggcgatggtgtctatggattgtcttcattcctgcgacccttgtgactgtggccttgattttcgtcttgcccgagacatgtcataaagtccttatagatcgaaaggtgaagcggctacagaaagaattaagcaggaacgacctctcgaactgttacgacacgccgggagcccccagacagtcgcagctgcagtatatcttgataggtctggcacgtccgttgaaaatgcttgtgctagcacctatcattcttctcatgtcaatatacgtggcgttcatgtacggcacaatgtacctcatgtacaacaaaattcccgtgacattcgaagaccagtacggcttcccaacgagcctcacgggtcttgtctacttatcccaaggctttggctttctagttgggctttggtcattttcgctggtttccgatcgtctagtcatctacttgaccaagagaaacaatggggtttacaaacctgagatgcgactgaatctcatcatatattatgcggccataataccaataacgttctttgtattcggatggactgcttactatcatgtccactggattgtaccggtgctcagctttataccctttggtattggcgttattggtgtctatctgccaactcaggcctacatcatagacgcttacccgacgtacgcagcttcaggtctcgcggcattcattgtgctgcgcagcgtcattgcagccttcttgccgctagcggcaacaacgacaaccgccactgcgatagtaccggggaccaccaacttccccgacacgccgctgatccttggttttgactctgatattggtccgaatcagaatactcggagacgcaaacgactatctcaaccactatctcgattacgctcatcgggattcctaggctcacgcgtcaatccagcccccgacaactgcacagcagcaaattacttcagtctcattgaaggcgagctcatagatattagcagcggccgcgctatcagcgcttcgcgatcacagaacctaatactactagcagcccaaacacaacctggagccggcagtataacaaagacgttctcggttggggatggtatattacactggttcaactctacttttgacgacggtgaagcgcggttctgccttgatgtaacgaatcaaacggtgaatgcggcgctcaaaaatgatcaaaagcttgaggaaatatgcgtggatgttgaaattagagtttataaagaaacccaatgtcagaacggcgttattgtcccggacggacaggctcccacgagcaccagttcctctgtggcttttggggtcactccatcgccgaggctccaagagcccgactacagccctttcctcctcctccgtctcgtcgacctcattggtctcatcggcttcgtcttcatcatcatcatcatcatcgtcgtcgtcgtcgtcgtcgtcgtcgtcgtcgtcgtcttcctcctcttcatcctcctcaaatttgacttaggaaccctcggttctacctacgacggcatgaaagtagatggctcgaacaataatccggtgttccacgtagtgtccttggataggccggtaacgcccgattatgacctgacgccggagggctacatcgaccttgtcacctacttccaaataagacaacagattcccgccgcaggggaaagtggcgaactcttctggccagacccaactcagcagggccagggcatttggcagcagatcacgtgcacgcctgtgctgttgcagcctgtgactgactgcgaatacaagctcgtgtgcacaggcgtcgacccgagctacactatcctgcagatctgcgatccggactcggatgtatcagatccgtactggcggatggggagcagtcttataagtggatgtactgaagcatcttggaagatgttgacgtag

SEQ ID NO: 28286 - protein, 893 aa, Muscodor strobelii
  misc_feature: SGI Peptide ID NO. 569704
  misc_feature (109)..(498): Pfam Id: PF07690 Pfam Desc: Major Facilitator Superfamily
  misc_feature (65)..(501): NCBI GI: 256727593 Blast Desc: NECHADRAFT_91140 [Nectria haematococca mpVI 77-13-4]
  misc_feature (7)..(498): NCBI GI: 116208666 Blast Desc: CHGG_03626 [Chaetomium globosum CBS 148.51] gi|88184223|gb|EAQ91691.1| CHGG_03626 [Chaetomium globosum CBS 148.51]
  misc_feature (76)..(501): NCBI GI: 261352410 Blast Desc: fluconazole resistance protein [Verticillium albo-atrum VaMs.102]
  misc_feature (9)..(501): NCBI GI: 242772234 Blast Desc: bicyclomycin resistance protein, [Talaromyces stipitatus ATCC 10500] gi|218721618|gb|EED21036.1| bicyclomycin resistance protein, [Talaromyces stipitatus ATCC 10500]
  misc_feature (28)..(501): NCBI GI: 115388733 Blast Desc: conserved [Aspergillus terreus NIH2624] gi|114195956|gb|EAU37656.1| conserved [Aspergillus terreus NIH2624]
  misc_feature (31)..(501): NCBI GI: 169782560 Blast Desc: [Aspergillus oryzae RIB40] gi|83774486|dbj|BAE64609.1| protein product [Aspergillus oryzae]
  misc_feature (71)..(501): NCBI GI: 212545412 Blast Desc: MFS multidrug transporter, [Penicillium marneffei ATCC 18224] gi|210065829|gb|EEA19923.1| MFS multidrug transporter, [Penicillium marneffei ATCC 18224]
  misc_feature (51)..(501): NCBI GI: 145258814 Blast Desc: An04g08250 [Aspergillus niger] gi|134074796|emb|CAK44791.1| protein product [Aspergillus niger]
  misc_feature (6)..(506): NCBI GI: 154294592 Blast Desc: BC1G_13766 [Botryotinia fuckeliana B05.10] gi|150844645|gb|EDN19838.1| BC1G_13766 [Botryotinia fuckeliana B05.10]
  misc_feature (37)..(503): NCBI GI: 67540614 Blast Desc: AN6477.2 [Aspergillus nidulans FGSC A4] gi|40739309|gb|EAA58499.1| AN6477.2 [Aspergillus nidulans FGSC A4] gi|259479284|tpe|CBF69379.1| TPA: MFS multidrug transporter,
MEINLESDVKDKARSISDEEHGIAQQVDDAESYRCEDEIHKVETTASRASKTSKLSRIIPQLSRKEEVAPIIHPLSDLDRGIVGWESQDDPDMPMNFGAGRKWFCIACLSLITLISPLSSTILSPAITDVSATFHNTDPILGAFPVSIFLLGYAVGPLLLSPLSEIYGRALVLSSANAFFCVWHIGCALAPSLNSLIFFRFMCGVGGAGCMTLGPAVVGDVFQIVERGKGLAALTLGPLVGPTFGPLIGAFIVASLGWRWCLWIVFIPATLVTVALIFVLPETCHKVLIDRKVKRLQKELSRNDLSNCYDTPGAPRQSQLQYILIGLARPLKMLVLAPIILLMSIYVAFMYGTMYLMYNKIPVTFEDQYGFPTSLTGLVYLSQGFGFLVGLWSFSLVSDRLVIYLTKRNNGVYKPEMRLNLIIYYAAIIPITFFVFGWTAYYHVHWIVPVLSFIPFGIGVIGVYLPTQAYIIDAYPTYAASGLAAFIVLRSVIAAFLPLAATTTTATAIVPGTTNFPDTPLILGFDSDIGPNQNTRRRKRLSQPLSRLRSSGFLGSRVNPAPDNCTAANYFSLIEGELIDISSGRAISASRSQNLILLAAQTQPGAGSITKTFSVGDGILHWFNSTFDDGEARFCLDVTNQTVNAALKNDQKLEEICVDVEIRVYKETQCQNGVIVPDGQAPTSTSSSVAFGVTPSPRLQEPDYSPFLLLRLVDLIGLIGFVFIIIIIIVVVVVVVVVVVVFLLFILLKFDLGTLGSTYDGMKVDGSNNNPVFHVVSLDRPVTPDYDLTPEGYIDLVTYFQIRQQIPAAGESGELFWPDPTQQGQGIWQQITCTPVLLQPVTDCEYKLVCTGVDPSYTILQICDPDSDVSDPYWRMGSSLISGCTEASWKMLT

SEQ ID NO: 28287 - DNA, 2400 bp, Muscodor strobelii
  misc_feature: SGI EST ID NO. CUFF.66805.0
  misc_feature: Variant of the nucleotide sequence at SEQ ID NO 28285
cacaacttggcaatcaagcaaatggcaaaccgtcgcaatctccaattcggaccctggtgtcaaagtggacacaagccataccgagctgagacttgttggggctctatggctgtccgcttaattcctcaagtagaaaggtcaccagcgtgggtcttaacttcgcatcacctggaaatagaaaatagaaataagaacccagggccgacttgacgtctaagtacaagtacagcagacgagctgtctccgtagaaacgagtcctgacccttgaagtctctcctttattcctttatcgtcacccaactctgagtcaccacttagatgaacatgacctgcttcagcgacctgatcctttgacgtctccgtgctcctaggctacgagaagtgtgattgtttctctcgttagcactaggccgaaatatagtgaacatggagatcaacctcgagagcgacgtaaaagacaaagcgcgttcgatatccgacgaggagcatggtatcgcgcagcaagtcgacgatgcggaatcatataggtgtgaagatgagatacacaaagtcgaaacaacagccagccgagcgagcaagacaagtaaactgtcgcggatcattcctcaactaagtcgtaaggaggaggttgcccccatcatccatccccttagtgatctcgatcgtggaatcgtgggatgggaaagccaggatgatcctgatatgcccatgaatttcggtgcgggacgaaaatggttttgtatcgcctgcttgtctctgatcaccctgatatcgccgttgtcgtcgacaattctgtctcctgcgatcactgacgtgagcgccaccttccacaataccgacccgatattaggcgctttcccggtgagcatcttcctgcttggatatgcagtcggcccccttctcctgtcgcccctgtcggaaatttacgggcgagctttggtcctttccagcgcgaacgctttcttctgcgtctggcatataggatgcgcactggctccgagtctgaactcattgattttctttcggttcatgtgcggtgttggtggcgcaggatgtatgactctcgggccagccgtggtaggagatgtcttccaaatcgtggagcgaggtaaaggcttggcagctttgacgctgggtcccctcgtaggtccaacatttgggccattgatcggagcttttattgttgcgtcactcggatggcgatggtgtctatggattgtcttcattcctgcgacccttgtgactgtggccttgattttcgtcttgcccgagacatgtcataaagtccttatagatcgaaaggtgaagcggctacagaaagaattaagcaggaacgacctctcgaactgttacgacacgccgggagcccccagacagtcgcagctgcagtatatcttgataggtctggcacgtccgttgaaaatgcttgtgctagcacctatcattcttctcatgtcaatatacgtggcgttcatgtacggcacaatgtacctcatgtacaacaaaattcccgtgacattcgaagaccagtacggcttcccaacgagcctcacgggtcttgtctacttatcccaaggctttggctttctagttgggctttggtcattttcgctggtttccgatcgtctagtcatctacttgaccaagagaaacaatggggtttacaaacctgagatgcgactgaatctcatcatatattatgcggccataataccaataacgttctttgtattcggatggactgcttactatcatgtccactggattgtaccggtgctcagctttataccctttggtattggcgttattggtgtctatctgccaactcaggcctacatcatagacgcttacccgacgtacgcagcttcaggtctcgcggcattcattgtgctgcgcagcgtcattgcagccttcttgccgctagcgggtcctgcgttatttgcatccctaggccttggctggggagcgtcgctgctcgggttcatctgcgttgcgttcataccaataccagtttttgtctatgcctgtggaacgtatttgagaacgaggtttcctgtgaaattatagattccacggcattataactagcattctggccaataactcatgcatacatcaccaaacgagggcagtgtcaaaagcttagaccaatacacaataaacaagattcaaatgttcaactacgacggattatagttgatattccattccgatcgttggtcaggtagcttaatcccgtgctgcagtcccggggcgggggttggtctttatatggcaggatagctgtcaggttttcaacagcaaatggccttgcgatcaatcgtctagattctgttctagaggtagtgggttcgattcccactacggttgcgtctttgacaattggtcctggttaccta

SEQ ID NO: 28288 - DNA, 525 bp, Muscodor strobelii
  misc_feature: SGI cDNA ID NO. 569705
  misc_feature: Encodes the peptide sequence at SEQ ID NO 28289
atggacatagactgtgatggcgtgcaaggctcacccgccgacgacggccgctgtgggaattcgggagatacgcagtccatcacctcctttgccgacaccgtagcctcttacggccagggaatcgatgatctggacgctaatatccacccatacgtcgtctttggtaatgaagggactagggaaggctatgtgaatttcgacccccgggagtacggtattgagccgttgagcgttatgggcgttgtttgtggggatcaattgatttacggaatatggggagatacaaatggcgatgatggtcccgcggccatggttggtgaagcctccatctcgctagcaacagcgtgtttcggcactggtatcacaggagacaacggacacactgatcttgatgtcttgtatatcgcgttccctggttcatcagccgttccaggtgccgatggcgcggattgggcagctggtaatttcgatgatttcgaagcgagcatcgagagtcttggtgatcagcttattagtgagctttga

SEQ ID NO: 28289 - protein, 174 aa, Muscodor strobelii
  misc_feature: SGI Peptide ID NO. 569705
  misc_feature (1)..(174): Pfam Id: PF07335 Pfam Desc: Fungal chitosanase
  misc_feature (1)..(174): NCBI GI: 1345373 Blast Desc: chitosanase precursor [Fusarium phaseoli]
  misc_feature (1)..(174): NCBI GI: 161137598 Blast Desc: chitosanase [Fusarium solani] gi|256725979|gb|EEU39341.1| glycoside hydrolase family 75 [Nectria haematococca mpVI 77-13-4]
  misc_feature (1)..(174): NCBI GI: 46116776 Blast Desc: FG04230.1 [Gibberella zeae PH-1]
  misc_feature (1)..(169): NCBI GI: 22474525 Blast Desc: chitosanase [Fusarium solani f. robiniae]
  misc_feature (1)..(174): NCBI GI: 161075381 Blast Desc: chitosanase [Fusarium solani]
  misc_feature (1)..(174): NCBI GI: 171694592 Blast Desc: protein product [Podospora anserina] gi|170947538|emb|CAP59699.1| protein product [Podospora anserina]
  misc_feature (1)..(174): NCBI GI: 164427627 Blast Desc: NCU02909 [Neurospora crassa OR74A] gi|157071820|gb|EAA36355.2| NCU02909 [Neurospora crassa OR74A]
  misc_feature (1)..(174): NCBI GI: 261354599 Blast Desc: chitosanase [Verticillium albo-atrum VaMs.102]
  misc_feature (1)..(174): NCBI GI: 256732275 Blast Desc: NECHADRAFT_106145 [Nectria haematococca mpVI 77-13-4]
  misc_feature (1)..(174): NCBI GI: 121704286 Blast Desc: chitosanase, [Aspergillus clavatus NRRL 1] gi|119398551|gb|EAW08981.1| chitosanase, [Aspergillus clavatus NRRL 1]
MDIDCDGVQGSPADDGRCGNSGDTQSITSFADTVASYGQGIDDLDANIHPYVVFGNEGTREGYVNFDPREYGIEPLSVMGVVCGDQLIYGIWGDTNGDDGPAAMVGEASISLATACFGTGITGDNGHTDLDVLYIAFPGSSAVPGADGADWAAGNFDDFEASIESLGDQLISEL

SEQ ID NO: 28290 - DNA, 398 bp, Muscodor strobelii
  misc_feature: SGI EST ID NO. CUFF.66821.0
  misc_feature: Variant of the nucleotide sequence at SEQ ID NO 28288
cagtccatcacctcctttgccgacaccgtagcctcttacggccagggaatcgatgatctggacgctaatatccacccatacgtcgtctttggtaatgaagggactagggaaggctatgtgaatttcgacccccgggagtacggtattgagccgttgagcgttatgggcgttgtttgtggggatcaattgatttacggaatatggggagatacaaatggcgatgatggtcccgcggccatggttggtgaagcctccatctcgctagcaacagcgtgtttcggcactggtatcacaggagacaacggacacactgatcttgatgtcttgtatatcgcgttccctggttcatcagccgttccaggtgccgatggcgcggattgggcagctggtaatttcga

SEQ ID NO: 28291 - DNA, 1275 bp, Muscodor strobelii
  misc_feature: SGI cDNA ID NO. 569706
  misc_feature: Encodes the peptide sequence at SEQ ID NO 28292
atggcagctgcgcctttgactgagtcgatggcagcagacggcaatgcggcgttcgacatcgtccaacacggccacaaggacctcgtccaggccatcgcgttcaatgcatacggcgatcgctgtgctactgggggcgtcgatggaaagatccgcgtcttcaatcgccatcgcgacggcgtctggaggctatgcgacaactgggcggcgcacggcggcgaggtgctagagcttcaatggctgccgccgactatctatcccaacctcctggcgtcgctcggcatcgagggccgcttcaagctctgggccgaagacccctcagcagcccccgggaagcgcttcagctcacgtgccggcaacggcaaggccatctctgagatacgctccccgcgactgccctatcgatctttctccgtcaagcacgaccccgtcacccgctccacctactttgccctcctcaccaccgacggccatctctacgtctacgagagcgaggagcccgagaccctgaccgactatgccaagatcgacgacttccaagcttgccccaaacccaaccgaggcgaagagacgtgcttcaaggtccgtttcgacccgaacccggagccctgctacaccgcactgcgcgccggcgtaccacaggacgccctgagtctggtagtctccggcatgcagactgtcaggatatttcgcacacgcgacaccgttactagttctttcggtgccgatacgagggcccgcgagttctacctcgccgcagagatcacggcgcacaaacacttggtacgagacgtcgcttgggcgccggccaattacaggggctacgacatgatcgccaccgcctgccaggacggtttcgtcagagtattcaaaatcgacactcccttttccgaggacgacggccggagttgggcagtcgagagcatgatggggtccgccaaggcacacgacagcgcagcagtatctaagagtacgcatggtcgtcggccgtcccacgccgcgtccggcatcaaagcagagcttgacaagtcgggaacacacggggagcgggtctcggctacgggaccaggtcacattgaacacacggtcaaagagatatcaaagttggaagcccaccaatcgccagtttggagagtcgactttgatgacgatggtcagatcttgggcagtgtcggagatgaaggaaagcttatatgctatcgacaacttccaagcggtgcgtgggcgaaaagttctgagcttggcatgatgaaaacgaggctatcggtgcctgtttga

SEQ ID NO: 28292 - protein, 424 aa, Muscodor strobelii
  misc_feature: SGI Peptide ID NO. 569706
  misc_feature (248)..(290): Pfam Id: PF00400 Pfam Desc: WD domain, G-beta repeat
  misc_feature (16)..(54): Pfam Id: PF00400 Pfam Desc: WD domain, G-beta repeat
  misc_feature (362)..(400): Pfam Id: PF00400 Pfam Desc: WD domain, G-beta repeat
  misc_feature (17)..(423): NCBI GI: 46123615 Blast Desc: FG06185.1 [Gibberella zeae PH-1]
  misc_feature (6)..(423): NCBI GI: 40882249 Blast Desc: related to nuclear pore protein [Neurospora crassa]
  misc_feature (5)..(423): NCBI GI: 39952069 Blast Desc: MGG_01677 [Magnaporthe grisea 70-15] gi|145020483|gb|EDK04612.1| MGG_01677 [Magnaporthe grisea 70-15]
  misc_feature (11)..(404): NCBI GI: 164429466 Blast Desc: NCU04375 [Neurospora crassa OR74A] gi|157073489|gb|EDO65451.1| conserved [Neurospora crassa OR74A]
  misc_feature (3)..(421): NCBI GI: 171688372 Blast Desc: protein product [Podospora anserina] gi|170944148|emb|CAP70258.1| protein product [Podospora anserina]
  misc_feature (18)..(417): NCBI GI: 156050285 Blast Desc: SS1G_07729 [Sclerotinia sclerotiorum 1980] gi|154692130|gb|EDN91868.1| SS1G_07729 [Sclerotinia sclerotiorum 1980]
  misc_feature (18)..(417): NCBI GI: 154289886 Blast Desc: BC1G_15897 [Botryotinia fuckeliana B05.10] gi|150848556|gb|EDN23749.1| BC1G_15897 [Botryotinia fuckeliana B05.10]
  misc_feature (13)..(415): NCBI GI: 119481129 Blast Desc: nuclear pore protein (SEH1), [Neosartorya fischeri NRRL 181] gi|119408747|gb|EAW18696.1| nuclear pore protein (SEH1), [Neosartorya fischeri NRRL 181]
  misc_feature (2)..(182): NCBI GI: 116196594 Blast Desc: CHGG_04895 [Chaetomium globosum CBS 148.51] gi|88180808|gb|EAQ88276.1| CHGG_04895 [Chaetomium globosum CBS 148.51]
  misc_feature (14)..(415): NCBI GI: 121715610 Blast Desc: nuclear pore protein (SEH1), [Aspergillus clavatus NRRL 1] gi|119403571|gb|EAW13988.1| nuclear pore protein (SEH1), [Aspergillus clavatus NRRL 1]
MAAAPLTESMAADGNAAFDIVQHGHKDLVQAIAFNAYGDRCATGGVDGKIRVFNRHRDGVWRLCDNWAAHGGEVLELQWLPPTIYPNLLASLGIEGRFKLWAEDPSAAPGKRFSSRAGNGKAISEIRSPRLPYRSFSVKHDPVTRSTYFALLTTDGHLYVYESEEPETLTDYAKIDDFQACPKPNRGEETCFKVRFDPNPEPCYTALRAGVPQDALSLVVSGMQTVRIFRTRDTVTSSFGADTRAREFYLAAEITAHKHLVRDVAWAPANYRGYDMIATACQDGFVRVFKIDTPFSEDDGRSWAVESMMGSAKAHDSAAVSKSTHGRRPSHAASGIKAELDKSGTHGERVSATGPGHIEHTVKEISKLEAHQSPVWRVDFDDDGQILGSVGDEGKLICYRQLPSGAWAKSSELGMMKTRLSVPV

SEQ ID NO: 28293 - DNA, 4741 bp, Muscodor strobelii
  misc_feature: SGI EST ID NO. CUFF.66826.0
  misc_feature: Variant of the nucleotide sequence at SEQ ID NO 28291
ctacggtctccacagagtatatgtacgccatggatcccctaagtctttattgtcagaccttagagttgttttattctagctaacaattccaagggttaacagatcgtgttcctcgaaacatcgatatgggttccacaactgattgtacaaggtcattaaaccagttgagacgatggttagagcactgtgaggaatttcatacagattgcgcgacacaaaataagcacgatggcggtgccaatcgactaccaagtcgcttagtagatgttggaaccgatagtaaccttcgcatcaaattatgcattaccaccgagtctcctgtgccaggcccatatttgacacttagccactgctgggggaacactcctaccatcaagcttttgaccgagaatctggccgatatgaaaaaagagatcaagtttgaggctttgaccaagaccttccaagacgctgtggtggtgaccagaagcctcggtctacgctatatctggatcgactctttgtgcatcatacaggacctggccgaagactggcagaacgaaggcatgaaaatggcagatgtatattcaaactcatatctgaacattgccgcggcacacgctaccaacgggcatgggggacttttcgtagcgcgagacccagtaaagatacagccaatctatgtcgacacaaattgggatggtatcggtcatcatagacttttcgtgcgtgatgaagagttctggacacgaggagtcgacaatgcacccttacataggcgcggatgggttcttcaagaacgcgcccttgccactcggaatactcatttcggtagggaccagatcttctgggagtgttgtcgcaacacctgctccgagaactttccactgggccccgtgtatggaagcgttttcgggcttggtgatcgaattgttctgccgcagcagaaggagagcacgcagactagcgatggaacagcggattcgacgtggaggacggcagtgagtgcgtactctaagtgtgcaatcaccgaagcaggggacaagcttatcgccatggccggtttagcccagcgggtgcaggctgccaccgggtgcgagtacgtcgcgggcctgtggcgcgagagcatgccgaataatctttcgtggtacgtcgtaacacctaagcatgccaagagaccggacttataccgggcgccgtcgtggtcgtgggccgcactcgacgccgagatcgtaccacaactggagatcatccaacgaccagaaacgtccgtaaaggactggcacgtgagcaacgtattaaagaatccattctcccaagtgaaagacgcctacctacgcctgaactgggctcacctatttccagcaacgctggaatgggaccgattgggcaaaacgtgttccacgacgttccattccgatattgaactacagacaacatcctactctgaaccggaggcaatagcagacgatctgagcagcttgagattattcccagatacctcgcctgcaccgggaacctccgaggtgttcttcttgcccttgggccaggactattacagcacgttcatgatctcgctggtactcacttcggtggccgtaggggagaaggaccgtggagtctaccgacgatacggtgtacacaaggcgaagtcagtgtcagtaattgggatgctaagttatgataatcagaacaaacagcccgaatggtatgaagatgccgaggatttgactgtcaagttgatttaaagctcgagacatttgacggctcaatgtggacggagtttacatcatgaacaaactgtggttcccagcttctcagttcgtcctagtagtcatcgacttagacaacgctgtccttgtggaactctcctacgccgagactggtaaaaataagtggcaaaaaatttaaggttcagcccgcttaatttcatcaaaaggcaaccactttttgccatctttttttggagctgtgtctcggcacctggatcgcatgtcttgtccaatgctcgccggctcgccagtccctgaggtacaagtctcattaacccgtgacatgggttcccgcatgactcccagctccaattccacactgaaccccaccaacctacatggaataggtacctactcagagtacccagaacttgaagggcttaatctcccgaaataacgtccacaagttccatgtcttgacaccaccgtcattacgcaatgaatgcttgatcgcaatgacagcatagtcgagagagaatccgcgacaatggcagctgcgcctttgactgagtcgatggcagcagacggcaatgcggcgttcgacatcgtccaacacggccacaaggacctcgtccaggccatcgcgttcaatgcatacggcgatcgctgtgctactgggggcgtcgatggaaagatccgcgtcttcaatcgccatcgcgacggcgtctggaggctatgcgacaactgggcggcgcacggcggcgaggtgctagagcttcaatggctgccgccgactatctatcccaacctcctggcgtcgctcggcatcgagggccgcttcaagctctgggccgaagacccctcagcagcccccgggaagcgcttcagctcacgtgccggcaacggcaaggccatctctgagatacgctccccgcgactgccctatcgatctttctccgtcaagcacgaccccgtcacccgctccacctactttgccctcctcaccaccgacggccatctctacgtctacgagagcgaggagcccgagaccctgaccgactatgccaagatcgacgacttccaagcttgccccaaacccaaccgaggcgaagagacgtgcttcaaggtccgtttcgacccgaacccggagccctgctacaccgcactgcgcgccggcgtaccacaggacgccctgagtctggtagtctccggcatgcagactgtcaggatatttcgcacacgcgacaccgttactagttctttcggtgccgatacgagggcccgcgagttctacctcgccgcagagatcacggcgcacaaacacttggtacgagacgtcgcttgggcgccggccaattacaggggctacgacatgatcgccaccgcctgccaggacggtttcgtcagagtattcaaaatcgacactcccttttccgaggacgacggccggagttgggcagtcgagagcatgatggggtccgccaaggcacacgacagcgcagcagtatctaagagtacgcatggtcgtcggccgtcccacgccgcgtccggcatcaaagcagagcttgacaagtcgggaacacacggggagcgggtctcggctacgggaccaggtcacattgaacacacggtcaaagagatatcaaagttggaagcccaccaatcgccagtttggagagtcgactttgatgacgatggtcagatcttgggcagtgtcggagatgaaggaaagcttatatgctatcgacaacttccaagcggtgcgtgggcgaaaagttctgagcttggcatgatgaaaacgaggctatcggtgcctgtttgagtacatccagctcatactgacaaaggttaactgatgatctaattgcataatggtccaagaccgcagccagaggggctccctcgagctgttagggtatcgctaatcatcatggccaatattgctaaatcatcgtgtctagaaattggcgaccccagtgccagatatgaaaacatgcactgccaatttggacctagttatcgtcgaatggcggctactgatcgtgaaaagcgggcagtagctgttgatattcattcctaggttcagattgagtcatgatagcacgcgaggcaaaacctctcgcttacaaccctaatatgtacgacacaagcatccctcaactctcgattgcagagtgcccgcattattcgaagcgacgtcactatcaatcggatcgagctcccatactcgggcgctaattcaggaaacatttatctgatacctgcggcattgtcacagtcgtgaagtacgttccgaagttcgtcctgccgtgcaaactacagacaggtatcggaagaggctacttgatcgcactgtttggtgtaagggggagaatatgcacacgacgagaacgttgatcaattcgtgttctctggaggaggaggataaatatcgagattttggagcaatgatacaagcaaagtctttttagccttgttcaagcagttgtagaaatggcttgacgctggcatggaccacataacgatctacctgaagtagaaagttctaaagtcaagagaagagacgaccctatgcgtttgcaatggcatcttccataatcaacatttgatacaatatctgttgccatccgcagaaaatgcacctatccatacgagctcgcactggcaactaacggaaagcaaagtcttgtttcaaatgcgagaaggttttgacaaatggaaaagcgcctatcctagtgtttcagcgccgcatgcggcaggtgtggtggccgtgcaactcagcacgatgtgatccatgtagggaactttcagttctcttggtaattgcatcgctgtgtcggaagttcgccttttttttatgccacgacagataaaatcattcaagaggtaacgttttttaaagatgccaacgtcatattaggagatgcgtcttaatgtccaacattacagtcctcgaatctggctgcgagattgaggctgtgagactaataagtaccacatccaaactctcttaaataaaacacaaaacacaagaagcccattgccatcgc

SEQ ID NO: 28294 - DNA, 1326 bp, Muscodor strobelii
  misc_feature: SGI cDNA ID NO. 569707
  misc_feature: Reduced expression when VOC is produced
  misc_feature: Encodes the peptide sequence at SEQ ID NO 28295
atgaaaaaagagatcaagtttgaggctttgaccaagaccttccaagacgctgtggtggtgaccagaagcctcggtctacgctatatctggatcgactctttgtgcatcatacaggacctggccgaagactggcagaacgaaggcatgaaaatggcagatgtatattcaaactcatatctgaacattgccgcggcacacgctaccaacgggcatgggggacttttcgtagcgcgagacccagtaaagatacagccaatctatgtcgacacaaattgggatggtatcggtcatcatagacttttcgtgcgtgatgaagagttctggacacgaggagtcgacaatgcacccttacataggcgcggatgggttcttcaagaacgcgcccttgccactcggaatactcatttcggtagggaccagatcttctgggagtgttgtcgcaacacctgctccgagaactttccactgggccccgtgtatggaagcgttttcgggcttggtgatcgaattgttctgccgcagcagaaggagagcacgcagactagcgatggaacagcggattcgacgtggaggacggcagtgagtgcgtactctaagtgtgcaatcaccgaagcaggggacaagcttatcgccatggccggtttagcccagcgggtgcaggctgccaccgggtgcgagtacgtcgcgggcctgtggcgcgagagcatgccgaataatctttcgtggtacgtcgtaacacctaagcatgccaagagaccggacttataccgggcgccgtcgtggtcgtgggccgcactcgacgccgagatcgtaccacaactggagatcatccaacgaccagaaacgtccgtaaaggactggcacgtgagcaacgtattaaagaatccattctcccaagtgaaagacgcctacctacgcctgaactgggctcacctatttccagcaacgctggaatgggaccgattgggcaaaacgtgttccacgacgttccattccgatattgaactacagacaacatcctactctgaaccggaggcaatagcagacgatctgagcagcttgagattattcccagatacctcgcctgcaccgggaacctccgaggtgttcttcttgcccttgggccaggactattacagcacgttcatgatctcgctggtactcacttcggtggccgtaggggagaaggaccgtggagtctaccgacgatacggtgtacacaaggcgaagtcagtgtcagtaattgggatgctaagttatgataatcagaacaaacagcccgaatggtatgaagatgccgaggatttgactgtcaagttgatttaa

SEQ ID NO: 28295 - protein, 441 aa, Muscodor strobelii
  misc_feature: SGI Peptide ID NO. 569707
  misc_feature (5)..(126): Pfam Id: PF06985 Pfam Desc: Heterokaryon incompatibility protein (HET)
  misc_feature (2)..(126): Pfam Id: PF06985 Pfam Desc: Heterokaryon incompatibility protein (HET)
  misc_feature (1)..(405): NCBI GI: 256724492 Blast Desc: NECHADRAFT_88127 [Nectria haematococca mpVI 77-13-4]
  misc_feature (1)..(286): NCBI GI: 189203321 Blast Desc: tol protein [Pyrenophora tritici-repentis Pt-1C-BFP] gi|187985095|gb|EDU50583.1| tol protein [Pyrenophora tritici-repentis Pt-1C-BFP]
  misc_feature (1)..(270): NCBI GI: 256731921 Blast Desc: NECHADRAFT_3490 [Nectria haematococca mpVI 77-13-4]
  misc_feature (2)..(291): NCBI GI: 261358551 Blast Desc: conserved [Verticillium albo-atrum VaMs.102]
  misc_feature (1)..(279): NCBI GI: 145251023 Blast Desc: An15g04930 [Aspergillus niger] gi|134082553|emb|CAK42468.1| protein product [Aspergillus niger]
  misc_feature (3)..(323): NCBI GI: 256732304 Blast Desc: NECHADRAFT_80764 [Nectria haematococca mpVI 77-13-4]
  misc_feature (1)..(441): NCBI GI: 145242594 Blast Desc: An09g05610 [Aspergillus niger] gi|134078422|emb|CAL00837.1| protein product [Aspergillus niger]
  misc_feature (1)..(302): NCBI GI: 154291024 Blast Desc: BC1G_15400 [Botryotinia fuckeliana B05.10] gi|150847129|gb|EDN22322.1| BC1G_15400 [Botryotinia fuckeliana B05.10]
  misc_feature (2)..(405): NCBI GI: 256723752 Blast Desc: NECHADRAFT_52118 [Nectria haematococca mpVI 77-13-4]
  misc_feature (1)..(271): NCBI GI: 169622944 Blast Desc: SNOG_14697 [Phaeosphaeria nodorum SN15] gi|111056769|gb|EAT77889.1| SNOG_14697 [Phaeosphaeria nodorum SN15]
  misc_feature: Useful for introducing or modulating the production of volatile compounds
MKKEIKFEALTKTFQDAVVVTRSLGLRYIWIDSLCIIQDLAEDWQNEGMKMADVYSNSYLNIAAAHATNGHGGLFVARDPVKIQPIYVDTNWDGIGHHRLFVRDEEFWTRGVDNAPLHRRGWVLQERALATRNTHFGRDQIFWECCRNTCSENFPLGPVYGSVFGLGDRIVLPQQKESTQTSDGTADSTWRTAVSAYSKCAITEAGDKLIAMAGLAQRVQAATGCEYVAGLWRESMPNNLSWYVVTPKHAKRPDLYRAPSWSWAALDAEIVPQLEIIQRPETSVKDWHVSNVLKNPFSQVKDAYLRLNWAHLFPATLEWDRLGKTCSTTFHSDIELQTTSYSEPEAIADDLSSLRLFPDTSPAPGTSEVFFLPLGQDYYSTFMISLVLTSVAVGEKDRGVYRRYGVHKAKSVSVIGMLSYDNQNKQPEWYEDAEDLTVKLI

SEQ ID NO: 28296 - DNA, 4741 bp, Muscodor strobelii; identical to SEQ ID NO: 28293
  misc_feature: SGI EST ID NO. CUFF.66826.0
  misc_feature: Variant of the nucleotide sequence at SEQ ID NO 28294

SEQ ID NO: 28297 - DNA, 582 bp, Muscodor strobelii
  misc_feature: SGI cDNA ID NO. 569708
  misc_feature: Encodes the peptide sequence at SEQ ID NO 28298
atgtcaaccaaaacaccattgaaaatcgacaggcctaacggcggcaagccacagattctctatgagcattatgaagactggatcaaaaatatttttgacttttatttcaatgttaggtggtctcgccaaatgcccgagaacaccaaggccattggtttcttagtcgagccagagcatggaggcatacttctcattttcgaagagacaaatggggaacttgaccccacgattgtgcgctcgattatatgggatttagccaatgaatcctctaaggcagccaatgccaaactgctctatgacgatggtgctagtgcacgcttcattgacgactttccacaaaccctcgagaactcagcattgttggtcatccccaacgcggattacatcaaagagaaacagaaattctcgaacaaggataaaggggacaaatgggtcaacgagcacagcgaaaagagcaaatggacaaatatcaagcgtatcgaacgctacaaggacggctccggacgtgtggtctatcaatacccgggagagaatatactccatagattgggttctatattcagaaagatatatcagtactaa

SEQ ID NO: 28298 - protein, 193 aa, Muscodor strobelii
  misc_feature: SGI Peptide ID NO. 569708
MSTKTPLKIDRPNGGKPQILYEHYEDWIKNIFDFYFNVRWSRQMPENTKAIGFLVEPEHGGILLIFEETNGELDPTIVRSIIWDLANESSKAANAKLLYDDGASARFIDDFPQTLENSALLVIPNADYIKEKQKFSNKDKGDKWVNEHSEKSKWTNIKRIERYKDGSGRVVYQYPGENILHRLGSIFRKIYQY

SEQ ID NO: 28299 - DNA, 1020 bp, Muscodor strobelii
  misc_feature: SGI cDNA ID NO. 569709
  misc_feature: Encodes the peptide sequence at SEQ ID NO 28300
atgggggctgtgttatcaactcgagctgagagctccgtcgctctcaacaaattcaaagattggatcagagctctcgaaaagccagatcagtattatcgtaggtttggagaagaaatccgcggagtcaaaattgtcacgttcctggttgagcctaaagtatctggttttattctcatttctcaaaaggacaatacgaatcttgaaagtgattcattgacccgtgctttgggcagcatagcaggtcgctttgacaacgacaacaggagccaagcaccggtcgaacttgatgcggtagagatgtcactcgagcacgatgatcacatcttcaaatacgtggaaccgacttttgtccgcgcctgccaggatgcggataggaaattaggcaccgataatgatcacgaccagcccatttctcaggcgaacaacccttacccgaaagtccagattctgagttggctgatattgatgacgatcccgctttttaatctgaagatgactctcaggcgaatgattcgctctcttcaattctggaaggaacctgaagacgaagatgataattcttctgaaataacaggatccaatgaactcagcctcttagaactcccaggcgagggatacctcatgcataaagttgccggacgtatgcctcaaggacacagagcccccctttataacagctggcttacttggcaacatcctgagtacaagggtctggtcggcatgtacaacagcacattggttgcgactcggatcctcaaacaagaatctgagaaaggctccaggtatatcttccaagagatttcgaaccaggaacgagtctcagatctcaacaagtcgtatgcggctacaatgaaggaacagagatgtctcaaaagagaagcccgaaaaattgcggttagtggaactggagatttggcggcaaacttgacttcaaatcaccaattgctttcttccaccgaaaaaccaacgtcaaagcaaagcgaagatggtctcgatgaaagaaagtcaaaagacgattag

SEQ ID NO: 28300 - protein, 339 aa, Muscodor strobelii
  misc_feature: SGI Peptide ID NO. 569709
MGAVLSTRAESSVALNKFKDWIRALEKPDQYYRRFGEEIRGVKIVTFLVEPKVSGFILISQKDNTNLESDSLTRALGSIAGRFDNDNRSQAPVELDAVEMSLEHDDHIFKYVEPTFVRACQDADRKLGTDNDHDQPISQANNPYPKVQILSWLILMTIPLFNLKMTLRRMIRSLQFWKEPEDEDDNSSEITGSNELSLLELPGEGYLMHKVAGRMPQGHRAPLYNSWLTWQHPEYKGLVGMYNSTLVATRILKQESEKGSRYIFQEISNQERVSDLNKSYAATMKEQRCLKREARKIAVSGTGDLAANLTSNHQLLSSTEKPTSKQSEDGLDERKSKDD

SEQ ID NO: 28301 - DNA, 867 bp, Muscodor strobelii
  misc_feature: SGI cDNA ID NO. 569710
  misc_feature: Encodes the peptide sequence at SEQ ID NO 28302
atgtctgcgaacactttcaccctagctactaaagtgaagctaccaaatggcaaactcatgccacaacttcaactcggcctgtatatgatgtccggtcgcgaggccagtcaagccgtgcgctgggccctcgcggcgggctatcggggctttgacagcgcccagatgtaccacaacgaacgggaggctgggcaggcgatctcgaagtttctggcgagcgaagagaacacgcagggcctgacgcgcgaagacatattttacacgtccaaactcgcaagtaatagcacgtcatacaataccgttcgcaggtctattaagcagtccgtcgacgcctgcggcttaggttacattgatctttttctcctccacagtccgtatggtggacctgatgctagattgactagctggaaggcgctcgaggatgcaattcttgaaggagaagttaaatcaggagggatcagcaattatggggttgatcatattgaagagttgatcgcgtcaaacccaagggttgctccggcagtcaatcaaatagaagtgcatccattcaacacaagggaggacatacggggagcttgtatcaagcacggcattgtcattgaggcctatgcacccttggcaagggcgatgaggatgaagaacaggactattctggaacttgcgaagcattattcctgctcgccagcgcagttgatggttcggtggtctcttcaacatggtcttgtcccatttcccaagagtgtcaagcgcgaacgtttgattgaaaatgtcgatgtcaactcgtttgagatatctggtgaggacatgaagaggatggatgggttggacgaggggctgatcactgactgggatccgactgatgcgccgtag

SEQ ID NO: 28302 - protein, 288 aa, Muscodor strobelii
  misc_feature: SGI Peptide ID NO. 569710
  misc_feature (14)..(276): Pfam Id: PF00248 Pfam Desc: Aldo/keto reductase family
  misc_feature (1)..(288): NCBI GI: 261354022 Blast Desc: aldo-keto reductase family 1 member E1 [Verticillium albo-atrum VaMs.102]
  misc_feature (1)..(288): NCBI GI: 46115826 Blast Desc: FG03755.1 [Gibberella zeae PH-1]
  misc_feature (8)..(288): NCBI GI: 256728107 Blast Desc: [Nectria haematococca mpVI 77-13-4]
  misc_feature (5)..(287): NCBI GI: 85103778 Blast Desc: NCU01233 [Neurospora crassa OR74A] gi|16415978|emb|CAB88548.2| related to 2, 5-diketo-D-gluconic acid reductase [Neurospora crassa] gi|28923146|gb|EAA32363.1|
  misc_feature (2)..(288): NCBI GI: 212528610 Blast Desc: aldo-keto reductase, [Penicillium marneffei ATCC 18224] gi|210073860|gb|EEA27947.1| aldo-keto reductase, [Penicillium marneffei ATCC 18224]
  misc_feature (1)..(282): NCBI GI: 145605830 Blast Desc: MGG_11818 [Magnaporthe grisea 70-15] gi|145013611|gb|EDJ98252.1| MGG_11818 [Magnaporthe grisea 70-15]
  misc_feature (2)..(288): NCBI GI: 242765953 Blast Desc: aldo-keto reductase, [Talaromyces stipitatus ATCC 10500] gi|218724274|gb|EED23691.1| aldo-keto reductase, [Talaromyces stipitatus ATCC 10500]
  misc_feature (20)..(288): NCBI GI: 212528612 Blast Desc: aldo-keto reductase, [Penicillium marneffei ATCC 18224] gi|210073861|gb|EEA27948.1| aldo-keto reductase, [Penicillium marneffei ATCC 18224]
  misc_feature (20)..(288): NCBI GI: 242765958 Blast Desc: aldo-keto reductase, [Talaromyces stipitatus ATCC 10500] gi|218724275|gb|EED23692.1| aldo-keto reductase, [Talaromyces stipitatus ATCC 10500]
  misc_feature (7)..(287): NCBI GI: 154294731 Blast Desc: BC1G_13492 [Botryotinia fuckeliana B05.10] gi|150844627|gb|EDN19820.1| BC1G_13492 [Botryotinia fuckeliana B05.10]
  misc_feature (7)..(276): SWISSPROT Homolog: EC 1.1.1.283 Methylglyoxal reductase (NADPH-dependent)
MSANTFTLATKVKLPNGKLMPQLQLGLYMMSGREASQAVRWALAAGYRGFDSAQMYHNEREAGQAISKFLASEENTQGLTREDIFYTSKLASNSTSYNTVRRSIKQSVDACGLGYIDLFLLHSPYGGPDARLTSWKALEDAILEGEVKSGGISNYGVDHIEELIASNPRVAPAVNQIEVHPFNTREDIRGACIKHGIVIEAYAPLARAMRMKNRTILELAKHYSCSPAQLMVRWSLQHGLVPFPKSVKRERLIENVDVNSFEISGEDMKRMDGLDEGLITDWDPTDAP

SEQ ID NO: 28303 - DNA, 1255 bp, Muscodor strobelii
  misc_feature: SGI EST ID NO. CUFF.66847.0
  misc_feature: Variant of the nucleotide sequence at SEQ ID NO 28301
ccctctacaatatcatgtctgctcgctcagaagatccatcacgcaatatcattacggctcctcccaattggatttctaccttaacacagttctttcctatttgcatgtagtacagctgtatttgaacgagaaaaggtcacgatgtctgcgaacactttcaccctagctactaaagtgaagctaccaaatggcaaactcatgccacaacttcaactcggcctgtatatgatgtccggtcgcgaggccagtcaagccgtgcgctgggccctcgcggcgggctatcggggctttgacagcgcccagatgtaccacaacgaacgggaggctgggcaggcgatctcgaagtttctggcgagcgaagagaacacgcagggcctgacgcgcgaagacatattttacacgtccaaactcgcaagtaatagcacgtcatacaataccgttcgcaggtctattaagcagtccgtcgacgcctgcggcttaggttacattgatctttttctcctccacagtccgtatggtggacctgatgctagattgactagctggaaggcgctcgaggatgcaattcttgaaggagaagttaaatcaggagggatcagcaattatggggttgatcatattgaagagttgatcgcgtcaaacccaagggttgctccggcagtcaatcaaatagaagtgcatccattcaacacaagggaggacatacggggagcttgtatcaagcacggcattgtcattgaggcctatgcacccttggcaagggcgatgaggatgaagaacaggactattctggaacttgcgaagcattattcctgctcgccagcgcagttgatggttcggtggtctcttcaacatggtcttgtcccatttcccaagagtgtcaagcgcgaacgtttgattgaaaatgtcgatgtcaactcgtttgagatatctggtgaggacatgaagaggatggatgggttggacgaggggctgatcactgactgggatccgactgatgcgccgtagactaactagataacttagctgatgtggacttgagaaaatcaatactcgataccttttctgcctagagactcacacttttccaccgtcaagaatgggatcagtttcgcgatacataatgatgccttctctcacattacctgcatacctcgctctctcgccctatgtgtccatacatcgacaaccccgtatttaatgtatcctaggagctgtaacacgaacccattcaacataagtacgaccttggcag

SEQ ID NO: 28304 - DNA, 792 bp, Muscodor strobelii
  misc_feature: SGI cDNA ID NO. 569711
  misc_feature: Encodes the peptide sequence at SEQ ID NO 28305
atggctctccctctctcgtcgggtctcataccgaccgaagttgcatttctatgcgaaatggaaatgatcacaatagtgcccagacaaagactcgagtcaataccgttgttaggtggcgcaaccccgactcttcgacctccgcatcgcgccgaactgcccctctggctcgctcttctccttaagaaacagcgtcgtgcaaatatcgtcgcaccaccctggcttctaccggcatccttacaacatatagtcgaccaagagacaaaccgcgatccggaggctttcagtccaccccctccaccgcctatgcgctccgacggttgcgggactgccagaccgtatggcgcgaacacgagctcggcagacgacgacgggggaagcagtggattaatattagcgcccccatttctaccctcatgcactcaagatgcgccctcctcgtatctgccgtatcactggctagaaatggccgaaacgctcctcgctcacgcagccgacgatataccgaatgcgcccgaggtccgcgccttgttacgagatatacaggaggtgcgagccgcaaaactacgcgcaagcgcacggcatctcgacggagggggtggagtcctgaatctcagaggtgtaggggccatggaactcgctgagagccggggttttgtattaggagttgtggatggagtgcggaaactaggcgcaagcgttgagactggcagacgggaagaggaagaggaggagagacgaagaggagagggtgaagatgaaagtgacgatgatatggagttcgacacacagtga

SEQ ID NO: 28305 - protein, 263 aa, Muscodor strobelii
  misc_feature: SGI Peptide ID NO. 569711
  misc_feature (17)..(216): Pfam Id: PF04128 Pfam Desc: Partner of SLD five, PSF2
  misc_feature (148)..(216): Pfam Id: PF04128 Pfam Desc: Partner of SLD five, PSF2
  misc_feature (17)..(100): Pfam Id: PF04128 Pfam Desc: Partner of SLD five, PSF2
  misc_feature (1)..(258): NCBI GI: 46121737 Blast Desc: FG05247.1 [Gibberella zeae PH-1] gi|126272717|sp|Q4IC11.1|PSF2_GIBZE RecName: Full=DNA replication complex GINS protein PSF2
  misc_feature (1)..(232): NCBI GI: 261352754 Blast Desc: DNA replication complex GINS protein PSF2 [Verticillium albo-atrum VaMs.102]
  misc_feature (1)..(232): NCBI GI: 39966641 Blast Desc: MGG_01917 [Magnaporthe grisea 70-15] gi|145009587|gb|EDJ94243.1| MGG_01917 [Magnaporthe grisea 70-15]
  misc_feature (1)..(260): NCBI GI: 154292449 Blast Desc: BC1G_14543 [Botryotinia fuckeliana B05.10] gi|150846129|gb|EDN21322.1| BC1G_14543 [Botryotinia fuckeliana B05.10]
  misc_feature (1)..(232): NCBI GI: 85108483 Blast Desc: NCU06322 [Neurospora crassa OR74A] gi|74617107|sp|Q7SAA9.1|PSF2_NEUCR RecName: Full=DNA replication complex GINS protein psf-2 gi|28924193|gb|EAA33348.1| conserved
  misc_feature (1)..(260): NCBI GI: 156032523 Blast Desc: SS1G_13959 [Sclerotinia sclerotiorum 1980] gi|154699361|gb|EDN99099.1| SS1G_13959 [Sclerotinia sclerotiorum 1980]
  misc_feature (39)..(243): NCBI GI: 170940250 Blast Desc: protein product [Podospora anserina]
  misc_feature (1)..(260): NCBI GI: 212543749 Blast Desc: DNA replication complex GINS protein (Psf2), [Penicillium marneffei ATCC 18224] gi|210066936|gb|EEA21029.1| DNA replication complex GINS protein (Psf2), [Penicillium ATCC
  misc_feature (1)..(260): NCBI GI: 242787611 Blast Desc: DNA replication complex GINS protein (Psf2), [Talaromyces stipitatus ATCC 10500] gi|218721195|gb|EED20614.1| DNA replication complex GINS protein (Psf2), [Talaromyces ATCC
  misc_feature (1)..(260): NCBI GI: 126253677 Blast Desc: DNA replication complex GINS protein (Psf2), [Talaromyces stipitatus ATCC 10500] gi|218721195|gb|EED20614.1| DNA replication complex GINS protein (Psf2), [Talaromyces ATCC
MALPLSSGLIPTEVAFLCEMEMITIVPRQRLESIPLLGGATPTLRPPHRAELPLWLALLLKKQRRANIVAPPWLLPASLQHIVDQETNRDPEAFSPPPPPPMRSDGCGTARPYGANTSSADDDGGSSGLILAPPFLPSCTQDAPSSYLPYHWLEMAETLLAHAADDIPNAPEVRALLRDIQEVRAAKLRASARHLDGGGGVLNLRGVGAMELAESRGFVLGVVDGVRKLGASVETGRREEEEEERRRGEGEDESDDDMEFDTQ

SEQ ID NO: 28306 - DNA, 1164 bp, Muscodor strobelii
  misc_feature: SGI EST ID NO. CUFF.66853.1
  misc_feature: Variant of the nucleotide sequence at SEQ ID NO 28304
tacagcttcaagtgctaaaatagcttcgacaaatccaattggccttctctcaacccgaaaatggctctccctctctcgtcgggtctcataccgaccgaagttgcatttctatgcgaaatggaaatgatcacaatagtgcccagacaaagactcgagtcaataccgttgttaggtggcgcaaccccgactcttcgacctccgcatcgcgccgaactgcccctctggctcgctcttctccttaagaaacagcgtcgtgcaaatatcgtcgcaccaccctggcttctaccggcatccttacaacatatagtcgaccaagagacaaaccgcgatccggaggctttcagtccaccccctccaccgcctatgcgctccgacggttgcgggactgccagaccgtatggcgcgaacacgagctcggcagacgacgacgggggaagcagtggattaatattagcgcccccatttctaccctcatgcactcaagatgcgccctcctcgtatctgccgtatcactggctagaaatggccgaaacgctcctcgctcacgcagccgacgatataccgaatgcgcccgaggtccgcgccttgttacgagatatacaggaggtgcgagccgcaaaactacgcgcaagcgcacggcatctcgacggagggggtggagtcctgaatctcagaggtgtaggggccatggaactcgctgagagccggggttttgtattaggagttgtggatggagtgcggaaactaggcgcaagcgttgagactggcagacgggaagaggaagaggaggagagacgaagaggagagggtgaagatgaaagtgacgatgatatggagttcgacacacagtgaaagaagacggttgtgagtcgatgatgataccttttaaagggggcactccattaaacattgtatataccgccggctatcgacacgcgatggtagacgaaaccgacgggctacgcattgagttggcgcattgcagagacaagtcaaaaacataacaagactaattggatcgcgctttagtcgtgccaatttacaacgtagtaccgggtttcagctagaatacctgatacggtacttcatgagtggctctggccaaaattcaaaagacaagcattttgaggaaatgcatgattctaattacaaagcttattccta

SEQ ID NO: 28307 - DNA, 2580 bp, Muscodor strobelii
  misc_feature: SGI cDNA ID NO. 569712
  misc_feature: Encodes the peptide sequence at SEQ ID NO 28308
atgtcgtcctctgaggtcgacacaacccactctaccccggacagtagtccgcccagttcacccgcaggcaaaccctcgaccaccgccaggacgagagtatcaaccttcaccgagcaacaactactcaatgaagaaaaaaaggccaaagatgaaaatacaagagcagaggtcaaaagattggcgggtcggaaacccaggaaagtgcaattgtcggcgttcgaaagagcaaaaaaagctaaggaacttgatgagctcttaaggaaatcgaagatcttcagtgaaatcctgacctcaaagaccaaggcgctcggccgagttgggcgtgatttcgataaccaggcactggcagatgcaggattggaattgaagaagcagcctaaaataatgagtggtggcaccatgcgagactatcaattagagggtctcacgtggatgtacgagatctgtctacaaggaatgagcggcatccttgccgatgagatgggtcttggcaaaactattcaagtcatctccttggtggctctcttgagagaacaggaacaatattttggaccgcacctcatcattgcaccgctaagtactctttcgaattggcaaaaagagtttcagaaatggaccccaaaaattcctttttgtttgtaccacggcaatatccagaaaagacaggagatatttagcaaggagatcatgaaatactattcaaagggccgtccaacgcaaggcttccctgtagtgtgcacaagctacgaaatggtcctgagagaccatgcctcactgtcaaagatagattgggccttcattgttgtcgatgagggacatcgtatgaagaacgcagatgcgaaattattccgtgaactgcagcaattcaagtcggcgacccgtctgctcatcacagggacacctttacagaacaatttaaaggagctttggtcacttcttcattttctcatgcccgagactttcctggattgggaagcattcgagacatggtttgacttcagtgatcttcaagacgaagataaagcagcagagtttatcgaaaatgaagaatcacaaacactagtctccaagatccacaaggtccttcaaccattgctgcttcgccgtatcaaggcagatgtagcatcgtacttgccgaagaagcgtgagtatgtactctttgcgccaatgaccaaagagcagacagacctatataatgtggtgcaagataagaagatcgatacgcgggcttaccttgagaacaaagtccttgaaagattggctgaaaccaagaacaccccaagcagttccagacgatcttctcggcagtcatcaagggctacaagcacacacgtcgcagaaaaggcttccccggctgcgaataatgccttttcagtgatgatgcaaaagggcaagaaggaagccgtgacttcgctaaaggcgaactcgaagacgcaatccttaccactgaggggttcaaaaaggaagacgtcaccatcttctgaaacttcggtctcgaaaagcgctaagtcgagtcggcaatcaacgccggccgcgtccatgcgaggtcgcgggcgtcctcggaaaacccgcgtctcatatcatgtcacagatgacgcagatgacgataaacttgatgatgcagcttttgaagaaatgctcgcgaaagagatggaaacccaagatgactcagaggaagatctcagagatgcagaagagatagagcgagctgggtcgctcgaactagccaagctacaaattgccgacaagagactcggcaatccgatgatgcagctacgattggtgtgcaattcaccgcacaacttctacaacccgtgggcgtatgataacgatgaccctgttgatgaaagcatcgttactgcgtcgggtaaaatgttgctgcttgaccgattgcttcccgaactctttgctagagggcacaaagtgctcatcttttcgcagttcaagatacaattggacatcttgcatgactattgttccgaactgcgaggctggaacgtctgccgcatagacggcggtgtatcgcaagacgatagggcccaacaaattgatgatttcaacgaagatcctgaattcaagatattcttgttgtccaccagagccggtggccaaggcataaacttggccagtgcagataccgtcatactatttgattccgactggaatccccagcaagatctacaagctcaggatcgttgccaccgcattggccagactaggcctgtggtcatatatcgtttcgcaactaaaggcacggtcgaagagtcacttttgatgtctgcggacgcgaagcgtcgattagaaaagcttgtcattaagaaaggcggctttaaaaacataaatcaaaaacttgactccaatgaggatgtggacaaggatgagctcaaagctctcctcttgaaggatggtgaagtatatagacacagtggtggagacaagattctcagtgatgaggatctcaaagttctctgcgataggagtgactcggcctttgagaaggcggctagtggccgtggtaatgctgttggcttccaggtcgttgaaaccggagccgatgggatcaaacaagtcacgaattaa

SEQ ID NO: 28308 - protein, 859 aa, Muscodor strobelii
  misc_feature: SGI Peptide ID NO. 569712
  misc_feature (659)..(737): Pfam Id: PF00271 Pfam Desc: Helicase conserved C-terminal domain
  misc_feature (137)..(602): Pfam Id: PF00176 Pfam Desc: SNF2 family N-terminal domain
  misc_feature (137)..(409): Pfam Id: PF00176 Pfam Desc: SNF2 family N-terminal domain
  misc_feature (38)..(855): NCBI GI: 164425176 Blast Desc: NCU06306 [Neurospora crassa OR74A] gi|157070819|gb|EAA33332.2| conserved [Neurospora crassa OR74A]
  misc_feature (8)..(855): NCBI GI: 46121269 Blast Desc: FG05013.1 [Gibberella zeae PH-1]
  misc_feature (74)..(855): NCBI GI: 256729604 Blast Desc: SNF2 family DNA-dependent ATPase [Nectria haematococca mpVI 77-13-4]
  misc_feature (38)..(857): NCBI GI: 170940256 Blast Desc: protein product [Podospora anserina]
  misc_feature (39)..(854): NCBI GI: 156062402 Blast Desc: SS1G_01317 [Sclerotinia sclerotiorum 1980] gi|154696653|gb|EDN96391.1| SS1G_01317 [Sclerotinia sclerotiorum 1980]
  misc_feature (71)..(854): NCBI GI: 154296983 Blast Desc: BC1G_12580 [Botryotinia fuckeliana B05.10] gi|150843107|gb|EDN18300.1| BC1G_12580 [Botryotinia fuckeliana B05.10]
  misc_feature (70)..(855): NCBI GI: 116195488 Blast Desc: CHGG_04342 [Chaetomium globosum CBS 148.51] gi|88180255|gb|EAQ87723.1| CHGG_04342 [Chaetomium globosum CBS 148.51]
  misc_feature (39)..(854): NCBI GI: 261352757 Blast Desc: ISWI chromatin-remodeling complex ATPase ISW2 [Verticillium albo-atrum VaMs.102]
  misc_feature (114)..(837): NCBI GI: 225557945 Blast Desc: lymphocyte-specific helicase [Ajellomyces capsulatus G186AR]
  misc_feature (119)..(852): NCBI GI: 242774780 Blast Desc: SNF2 family helicase/ATPase PasG, [Talaromyces stipitatus ATCC 10500] gi|218722129|gb|EED21547.1| SNF2 family helicase/ATPase PasG, [Talaromyces stipitatus ATCC 10500]
MSSSEVDTTHSTPDSSPPSSPAGKPSTTARTRVSTFTEQQLLNEEKKAKDENTRAEVKRLAGRKPRKVQLSAFERAKKAKELDELLRKSKIFSEILTSKTKALGRVGRDFDNQALADAGLELKKQPKIMSGGTMRDYQLEGLTWMYEICLQGMSGILADEMGLGKTIQVISLVALLREQEQYFGPHLIIAPLSTLSNWQKEFQKWTPKIPFCLYHGNIQKRQEIFSKEIMKYYSKGRPTQGFPVVCTSYEMVLRDHASLSKIDWAFIVVDEGHRMKNADAKLFRELQQFKSATRLLITGTPLQNNLKELWSLLHFLMPETFLDWEAFETWFDFSDLQDEDKAAEFIENEESQTLVSKIHKVLQPLLLRRIKADVASYLPKKREYVLFAPMTKEQTDLYNVVQDKKIDTRAYLENKVLERLAETKNTPSSSRRSSRQSSRATSTHVAEKASPAANNAFSVMMQKGKKEAVTSLKANSKTQSLPLRGSKRKTSPSSETSVSKSAKSSRQSTPAASMRGRGRPRKTRVSYHVTDDADDDKLDDAAFEEMLAKEMETQDDSEEDLRDAEEIERAGSLELAKLQIADKRLGNPMMQLRLVCNSPHNFYNPWAYDNDDPVDESIVTASGKMLLLDRLLPELFARGHKVLIFSQFKIQLDILHDYCSELRGWNVCRIDGGVSQDDRAQQIDDFNEDPEFKIFLLSTRAGGQGINLASADTVILFDSDWNPQQDLQAQDRCHRIGQTRPVVIYRFATKGTVEESLLMSADAKRRLEKLVIKKGGFKNINQKLDSNEDVDKDELKALLLKDGEVYRHSGGDKILSDEDLKVLCDRSDSAFEKAASGRGNAVGFQVVETGADGIKQVTN

SEQ ID NO: 28309 - DNA, 3316 bp, Muscodor strobelii
  misc_feature: SGI EST ID NO. CUFF.66860.0
  misc_feature: Variant of the nucleotide sequence at SEQ ID NO 28307
cctgaccaaagcagatcaattaacgcgtgacttcgcaggcaattcgcgtcaatgaccgtggagagccaggtaggggagacgcgctaatggccatcaaattgcctgtgagatcatgactttttgttcttcactttgaaagcaagccattgttcatttcactatcctttcttctctactccctaactacccaattgttattattaaccacttttgaattgctaatcgtcgctattttctgtcgcatttccaacagtttcattttgcagtgcctccgttttttcctagttttgcaagctcgccatgtcgtcctctgaggtcgacacaacccactctaccccggacagtagtccgcccagttcacccgcaggcaaaccctcgaccaccgccaggacgagagtatcaaccttcaccgagcaacaactactcaatgaagaaaaaaaggccaaagatgaaaatacaagagcagaggtcaaaagattggcgggtcggaaacccaggaaagtgcaattgtcggcgttcgaaagagcaaaaaaagctaaggaacttgatgagctcttaaggaaatcgaagatcttcagtgaaatcctgacctcaaagaccaaggcgctcggccgagttgggcgtgatttcgataaccaggcactggcagatgcaggattggaattgaagaagcagcctaaaataatgagtggtggcaccatgcgagactatcaattagagggtctcacgtggatgtacgagatctgtctacaaggaatgagcggcatccttgccgatgagatgggtcttggcaaaactattcaagtcatctccttggtggctctcttgagagaacaggaacaatattttggaccgcacctcatcattgcaccgctaagtactctttcgaattggcaaaaagagtttcagaaatggaccccaaaaattcctttttgtttgtaccacggcaatatccagaaaagacaggagatatttagcaaggagatcatgaaatactattcaaagggccgtccaacgcaaggcttccctgtagtgtgcacaagctacgaaatggtcctgagagaccatgcctcactgtcaaagatagattgggccttcattgttgtcgatgagggacatcgtatgaagaacgcagatgcgaaattattccgtgaactgcagcaattcaagtcggcgacccgtctgctcatcacagggacacctttacagaacaatttaaaggagctttggtcacttcttcattttctcatgcccgagactttcctggattgggaagcattcgagacatggtttgacttcagtgatcttcaagacgaagataaagcagcagagtttatcgaaaatgaagaatcacaaacactagtctccaagatccacaaggtccttcaaccattgctgcttcgccgtatcaaggcagatgtagcatcgtacttgccgaagaagcgtgagtatgtactctttgcgccaatgaccaaagagcagacagacctatataatgtggtgcaagataagaagatcgatacgcgggcttaccttgagaacaaagtccttgaaagattggctgaaaccaagaacaccccaagcagttccagacgatcttctcggcagtcatcaagggctacaagcacacacgtcgcagaaaaggcttccccggctgcgaataatgccttttcagtgatgatgcaaaagggcaagaaggaagccgtgacttcgctaaaggcgaactcgaagacgcaatccttaccactgaggggttcaaaaaggaagacgtcaccatcttctgaaacttcggtctcgaaaagcgctaagtcgagtcggcaatcaacgccggccgcgtccatgcgaggtcgcgggcgtcctcggaaaacccgcgtctcatatcatgtcacagatgacgcagatgacgataaacttgatgatgcagcttttgaagaaatgctcgcgaaagagatggaaacccaagatgactcagaggaagatctcagagatgcagaagagatagagcgagctgggtcgctcgaactagccaagctacaaattgccgacaagagactcggcaatccgatgatgcagctacgattggtgtgcaattcaccgcacaacttctacaacccgtgggcgtatgataacgatgaccctgttgatgaaagcatcgttactgcgtcgggtaaaatgttgctgcttgaccgattgcttcccgaactctttgctagagggcacaaagtgctcatcttttcgcagttcaagatacaattggacatcttgcatgactattgttccgaactgcgaggctggaacgtctgccgcatagacggcggtgtatcgcaagacgatagggcccaacaaattgatgatttcaacgaagatcctgaattcaagatattcttgttgtccaccagagccggtggccaaggcataaacttggccagtgcagataccgtcatactatttgattccgactggaatccccagcaagatctacaagctcaggatcgttgccaccgcattggccagactaggcctgtggtcatatatcgtttcgcaactaaaggcacggtcgaagagtcacttttgatgtctgcggacgcgaagcgtcgattagaaaagcttgtcattaagaaaggcggctttaaaaacataaatcaaaaacttgactccaatgaggatgtggacaaggatgagctcaaagctctcctcttgaaggatggtgaagtatatagacacagtggtggagacaagattctcagtgatgaggatctcaaagttctctgcgataggagtgactcggcctttgagaaggcggctagtggccgtggtaatgctgttggcttccaggtcgttgaaaccggagccgatgggatcaaacaagtcacgaattaacaccgacgaacatgacacgacatctaatacatacgatcgcgatgagcacaatgacacgaccttcccactggaaattgtgttttggctcagttacgggcgcttggattctcctgctactagggcagtcaaactgactcctcccatcttatgtttgaatagtctgccgttggaaattttatgataacgacataggctttttgccacaccatcctatcgatatctcttatctcttagctttacaatttctcattcactacttggctggtacacgggtcggttgcgcactgagcacaattctccggtcgaacaaagccggaacaaaagcattgcttcatagagctcattcaaagattttcgatagataatatttcatagctttctcttcaggagagtacaggagattacaatgtaggatgaacaaagaaagaaacctaaa

SEQ ID NO: 28310 - DNA, 345 bp, Muscodor strobelii
  misc_feature: SGI cDNA ID NO. 569713
  misc_feature: Encodes the peptide sequence at SEQ ID NO 28311
atggcgaccgctggccagaacttttacgagctttaccgccgtagcagtgtcggcgccgctctcactgatactctcgacgatctcatcaccgagaaccgcatcgatccccagcttgctatgaagatcctcgccaacttcgatcgcgccatcgcagaagtcctgcaggagaaggtccgctcacgcttgacattcaagggcagccttgacacctaccgcttctgcgacgaagtctggactttccagctgaagaacgttaccttcaagatggagaacggtggccaggtcgtgtcagcagatcgtgtcaagatagtgtcctgcaccgctaaacccactgggacggcctag

SEQ ID NO: 28311 - protein, 114 aa, Muscodor strobelii
  misc_feature: SGI Peptide ID NO. 569713
  misc_feature (57)..(108): Pfam Id: PF02751 Pfam Desc: Transcription initiation factor IIA, gamma subunit, beta-barrel domain
  misc_feature (7)..(55): Pfam Id: PF02268 Pfam Desc: Transcription initiation factor IIA, gamma subunit, helical domain
  misc_feature (1)..(113): NCBI GI: 256720721 Blast Desc: NECHADRAFT_50001 [Nectria haematococca mpVI 77-13-4]
  misc_feature (1)..(112): NCBI GI: 261352237 Blast Desc: transcription initiation factor IIA gamma chain [Verticillium albo-atrum VaMs.102]
  misc_feature (1)..(111): NCBI GI: 116195804 Blast Desc: CHGG_04500 [Chaetomium globosum CBS 148.51] gi|88180413|gb|EAQ87881.1| CHGG_04500 [Chaetomium globosum CBS 148.51]
  misc_feature (1)..(112): NCBI GI: 189205949 Blast Desc: transcription initiation factor IIA gamma chain [Pyrenophora tritici-repentis Pt-1C-BFP] gi|187975402|gb|EDU42028.1| transcription initiation factor IIA
  misc_feature (1)..(113): NCBI GI: 39975933 Blast Desc: MGG_06107 [Magnaporthe grisea 70-15] gi|145011596|gb|EDJ96252.1| MGG_06107 [Magnaporthe grisea 70-15]
  misc_feature (2)..(109): NCBI GI: 85112999 Blast Desc: NCU09748 [Neurospora crassa OR74A] gi|28926232|gb|EAA35214.1| [Neurospora crassa OR74A]
  misc_feature (4)..(114): NCBI GI: 67523451 Blast Desc: AN2181.2 [Aspergillus nidulans FGSC A4] gi|40745069|gb|EAA64225.1| AN2181.2 [Aspergillus nidulans FGSC A4] gi|259487565|tpe|CBF86336.1| TPA: transcription initiation
  misc_feature (4)..(114): NCBI GI: 145251215 Blast Desc: An15g05920 [Aspergillus niger] gi|134082651|emb|CAK42545.1| protein product [Aspergillus niger]
  misc_feature (4)..(114): NCBI GI: 71002444 Blast Desc: transcription initiation factor iia small chain [Aspergillus fumigatus Af293] gi|66853541|gb|EAL93865.1| transcription initiation factor iia small chain [Aspergillus iia
  misc_feature (4)..(114): NCBI GI: 119482003 Blast Desc: transcription initiation factor iia small chain [Neosartorya fischeri NRRL 181] gi|119409184|gb|EAW19133.1| transcription initiation factor iia small chain [Neosartorya NRRL
MATAGQNFYELYRRSSVGAALTDTLDDLITENRIDPQLAMKILANFDRAIAEVLQEKVRSRLTFKGSLDTYRFCDEVWTFQLKNVTFKMENGGQVVSADRVKIVSCTAKPTGTA

SEQ ID NO: 28312 - DNA, 1506 bp, Muscodor strobelii
  misc_feature: SGI EST ID NO. CUFF.66961.0
  misc_feature: Variant of the nucleotide sequence at SEQ ID NO 28310
gtagtcaggcaggtacctatgtaccattcattctacctagtgcatcccacccgccctgactcagcacaagacgaaggcacatagtagatatccctttggcggcgtttcaatacatcaactttgaccttaacatccacctcgccgcccatcgtcaacttgcgcgccgagcccagcaacgctgcggatctagatcaggactctcaagagcagtgatagatcgcctctgcgatcatcgtcatccaccatggcgaccgctggccagaacttttacgagctttaccgccgtagcagtgtcggcgccgctctcactgatactctcgacgatctcatcaccgagaaccgcatcgatccccagcttgctatgaagatcctcgccaacttcgatcgcgccatcgcagaagtcctgcaggagaaggtccgctcacgcttgacattcaagggcagccttgacacctaccgcttctgcgacgaagtctggactttccagctgaagaacgttaccttcaagatggagaacggtggccaggtcgtgtcagcagatcgtgtcaagatagtgtcctgcaccgctaaacccactgggacggcctagagagctccgagattggacaactagcatgaaaaaggctcaggagcacactctgggacatctgcaccttctctggcgtctaggctcccaggaatctctaccaattctgctcaaggcgctagacggccactgcctacactgccgcatcactttgcacagcctcgttctgagaatcgttgactgctactggccacgattcatttcctatttcgatatgtgaagatcttacgacttcaagcctaaataccagtacgctgtatcgtcagcaatgggcatatgggaacggacagaatgattctccgtcagccaggtacagagcgtagactgggtcatcatcagtgatcaagctcaaggtttttcacttttacgactgcatgaggcgtttcggtcttgctttagggtagatggtttacgctttgcgctggagttgagggaaattaatgcaatggcttttcagctgcacctgttttttgaactagtgcaacatcccctatgcttgatatcttgtagatgtaaatccgtgcctttcgcaactcaagtgtatcatatacttgtgtatggtctacattcatctatccctatctatttgccattctattcatccaaatttccaagtaaaggggtatcctcatcatcgtccttctctaccctcgtcacactcccatttcccgtttccagagcgtcttcctctactgcctcctcttctacaacttccccatcctctgcctgtgcctcgtccttacgcccaataatcacattacctgcgaccaacatcgtggcaccaacccaccacaacggtggcagcgactccgagaatatagcaaagccaagaatcgcagtgaccatgaagttcgtcgacgtgttcatgatagagacctgagttgttgactgccccttcgcaagagcttgggtaaacagcg

SEQ ID NO: 28313 - DNA, 702 bp, Muscodor strobelii
  misc_feature: SGI cDNA ID NO. 569714
  misc_feature: Encodes the peptide sequence at SEQ ID NO 28314
atgccacggaaatcctccacaccgagtatttccaaagctacttctgccgaatccgcctcgtccgcatcaaacgtcaagaggaggcgtggtccagcggtgaaaccccaaggtcagatcacggaattgagagaaactgttgatcaggacgcgatgacgtggtctgagagaaatcaatgggtcgtgtacgctgtgtcgagtggtgcttgtgctgcttttaatggggtttttgctaaattgacgacaaatgacttaacgactaagatctcaggcggcatttcagcattgctgggtctagaaagcgctgagagaatcttggaaatttgtgtgcgagttgcattctttggcttgaatctggctttcaacggtgtaatgtggacgctgtttacccaagctcttgcgaaggggcagtcaacaactcaggtctctatcatgaacacgtcgacgaacttcatggtcactgcgattcttggctttgctatattctcggagtcgctgccaccgttgtggtgggttggtgccacgatgttggtcgcaggtaatgtgattattgggcgtaaggacgaggcacaggcagaggatggggaagttgtagaagaggaggcagtagaggaagacgctctggaaacgggaaatgggagtgtgacgagggtagagaaggacgatgatgaggatacccctttacttggaaatttggatgaatag

SEQ ID NO: 28314 - protein, 233 aa, Muscodor strobelii
  misc_feature: SGI Peptide ID NO. 569714
  misc_feature (51)..(231): NCBI GI: 145603342 Blast Desc: MGG_13208 [Magnaporthe grisea 70-15] gi|145011597|gb|EDJ96253.1| MGG_13208 [Magnaporthe grisea 70-15]
  misc_feature (49)..(223): NCBI GI: 116195802 Blast Desc: CHGG_04499 [Chaetomium globosum CBS 148.51] gi|88180412|gb|EAQ87880.1| CHGG_04499 [Chaetomium globosum CBS 148.51]
  misc_feature (52)..(208): NCBI GI: 171690780 Blast Desc: protein product [Podospora anserina] gi|170945338|emb|CAP71450.1| protein product [Podospora anserina]
  misc_feature (52)..(213): NCBI GI: 85104851 Blast Desc: NCU06633 [Neurospora crassa OR74A] gi|28923398|gb|EAA32585.1| NCU06633 [Neurospora crassa OR74A]
  misc_feature (27)..(231): NCBI GI: 261352397 Blast Desc: conserved [Verticillium albo-atrum VaMs.102]
  misc_feature (53)..(199): NCBI GI: 46121849 Blast Desc: FG05302.1 [Gibberella zeae PH-1]
  misc_feature (25)..(233): NCBI GI: 256720722 Blast Desc: NECHADRAFT_85708 [Nectria haematococca mpVI 77-13-4]
  misc_feature (54)..(198): NCBI GI: 156049587 Blast Desc: SS1G_08500 [Sclerotinia sclerotiorum 1980] gi|154692899|gb|EDN92637.1| SS1G_08500 [Sclerotinia sclerotiorum 1980]
  misc_feature (54)..(212): NCBI GI: 154303591 Blast Desc: BC1G_08680 [Botryotinia fuckeliana B05.10] gi|150854474|gb|EDN29666.1| BC1G_08680 [Botryotinia fuckeliana B05.10]
  misc_feature (56)..(225): NCBI GI: 189205947 Blast Desc: conserved [Pyrenophora tritici-repentis Pt-1C-BFP] gi|187975401|gb|EDU42027.1| conserved [Pyrenophora tritici-repentis Pt-1C-BFP]
MPRKSSTPSISKATSAESASSASNVKRRRGPAVKPQGQITELRETVDQDAMTWSERNQWVVYAVSSGACAAFNGVFAKLTTNDLTTKISGGISALLGLESAERILEICVRVAFFGLNLAFNGVMWTLFTQALAKGQSTTQVSIMNTSTNFMVTAILGFAIFSESLPPLWWVGATMLVAGNVIIGRKDEAQAEDGEVVEEEAVEEDALETGNGSVTRVEKDDDEDTPLLGNLDE

SEQ ID NO: 28315 - DNA, 2289 bp, Muscodor strobelii
  misc_feature: SGI EST ID NO. CUFF.66962.1
  misc_feature: Variant of the nucleotide sequence at SEQ ID NO 28313
tgccagccatgaaaaagtggataatccgcacccactcagatgccaaaccgagacatacacattaaatcatgcaatgaatcgttgcttttgagtacatgacttatcccagaataatatcctaatccccagcctggtacatattcctcctatataattctcttggtacctgtctctttaatccgcctttgtccgcaatgccacggaaatcctccacaccgagtatttccaaagctacttctgccgaatccgcctcgtccgcatcaaacgtcaagaggaggcgtggtccagcggtgaaaccccaaggtcagatcacggaattgagagaaactgttgatcaggacgcgatgacgtggtctgagagaaatcaatgggtcgtgtacgctgtgtcgagtggtgcttgtgctgcttttaatggggtttttgctaaattgacgacaaatgacttaacgactaagatctcaggcggcatttcagcattgctgggtctagaaagcgctgagagaatcttggaaatttgtgtgcgagttgcattctttggcttgaatctggctttcaacggtgtaatgtggacgctgtttacccaagctcttgcgaaggggcagtcaacaactcaggtctctatcatgaacacgtcgacgaacttcatggtcactgcgattcttggctttgctatattctcggagtcgctgccaccgttgtggtgggttggtgccacgatgttggtcgcaggtaatgtgattattgggcgtaaggacgaggcacaggcagaggatggggaagttgtagaagaggaggcagtagaggaagacgctctggaaacgggaaatgggagtgtgacgagggtagagaaggacgatgatgaggatacccctttacttggaaatttggatgaatagaatggcaaatagatagggatagatgaatgtagaccatacacaagtatatgatacacttgagttgcgaaaggcacggatttacatctacaagatatcaagcataggggatgttgcactagttcaaaaaacaggtgcagctgaaaagccattgcattaatttccctcaactccagcgcaaagcgtaaaccatctaccctaaagcaagaccgaaacgcctcatgcagtcgtaaaagtgaaaaaccttgagcttgatcactgatgatgacccagtctacgctctgtacctggctgacggagaatcattctgtccgttcccatatgcccattgctgacgatacagcgtactggtatttaggcttgaagtcgtaagatcttcacatatcgaaataggaaatgaatcgtggccagtagcagtcaacgattctcagaacgaggctgtgcaaagtgatgcggcagtgtaggcagtggccgtctagcgccttgagcagaattggtagagattcctgggagcctagacgccagagaaggtgcagatgtcccagagtgtgctcctgagcctttttcatgctagttgtccaatctcggagctctctaggccgtcccagtgggtttagcggtgcaggacactatcttgacacgatctgctgacacgacctggccaccgttctccatcttgaaggtaacgttcttcagctggaaagtccagacttcgtcgcagaagcggtaggtgtcaaggctgccctgcaaagcgtggaaagtgttgcccgttagccatcgcggctctttcactaagcgagagagcaggagacatgatcacgtatgttgttgtttatatgctttattgcactaaaatggctattgctgcttgcttaccttgaatgtcaagcgtgagcggaccttctcctgcaggacttctgcgatggcgcgatcgaagttggcgaggatcttcatagcaagctggggatcgatgcggttctcggtgatgagatcgtcgagagtatcagtgagagcggcgccgacactgcaggagcgcaagactacgcattagcatgacttgcgcaaagcagacgtagagcgaactgcaggcagaaggaggatgcacctgctacggcggtaaagctcgtaaaagttctggccagcggtcgccatggtggatgacgatgatcgcagaggcgatctatcactgctcttgagagtcctgatctagatccgcagcgttgctgggctcggcgcgcaagttgacgatgggcggcgaggtggatgttaaggtcaaagttgatgtattgaaacgccgccaaagggatatctactatgtgccttcgtcttgtgctgagtcagggcgggtgggatgcactaggtagaatgaatggtacataggtacctgcctgactac

SEQ ID NO: 28316 - DNA, 2526 bp, Muscodor strobelii
  misc_feature: SGI cDNA ID NO. 569715
  misc_feature: Encodes the peptide sequence at SEQ ID NO 28317
atgacttctctacgatccccttcggcgaccatctccctcacccatccacagcccgtgcgacgccgaccatccgtaagctccagagtatcgtatgccgtgtccacagccgagcgaggcgaaaccctagccatacccgccgaatcccaaatcgaggaggagattgccgagatcaagagatatgaggacttcaccaccatagattgggttcaggatgcggcccaggagcgtctgcgccgagctgcgcgaaagagaaggacggctggcctacagagccatggcaaggtctcctggagatatcagctgtgggaatcctacgatgccgctcaaggatggatagtcgtcaccttgatcggcgctgcgattggtctcaatgccgcctttctcaacatcataaccgagtggctttccgatgccaaaactggttactgcacgactgccttctatcttaacgaaaagttctgctgctggggcgaggacaatggctgcccacactggaagaggtggaccggattcgaacccgcaaactacgttatttacatcatatttggaactgcattcgccttcacggcggcaactctagtcaagtcattcgctccctacgcagcaggctctggcatttccgagattaaatgcattatcgctggctttgtgatgaaaggtttcttaggtttctggacgcttgtcatcaagtctattgctctcccacttgctatatcttctggtctctctgtcggcaaggagggccccagtgtccactacgccgtatgcacgggcaatgtcatctcgagattcttcgacaagtacaagcgaaatgcttccaagacgagagagatcctcagcgcatgcgctgccgccggcgtaggagtcgctttcggcagccctatcggaggtgtgctcttctccttggaagagatgtcgaaccatttccccttgaagactctgtggaggagttacttttgtgccttggttgcgacggcggtactggcagcaatgaacccttttaggactggtcaacttgtcatgtttcaggtccagtatgaccgatcctggcatttcttcgagacagtgccttatatcttaatcggcatctttggtgggttatacggcgcttttgtcataaaatggaatctacgagtacaggccttccgaaaaaagtatctcgcgcagtgggccgtgcttgaggctacgctattggcactcggtacagccgtcatctgttacccgaatgcatttctacgtatcgacatgacagagagcatggaaatcctgttcttagaatgcgaaggaacagaggactaccacggtctgtgcgaacaagacaagttctggtcaaacatcatatccctagtacttgcgactattattaggattttccttgttatcatctcctatggttgcaaagtaccggcaggtatctttgtcccgtccatggccattggggcctcctttggccggacggttggaataatcatgcaggcaatccatcatgcctacccaaacagcgtcttcttttcagcatgccttccggatggaccgtgtatcacccccggaacctatgctttcttgggcgccgccgccgcgcttagtggcataatgcacgtcactgtatcggtcgtcgtcattatgttcgagctcaccggagctttgacttatatcttgcccactatgatcgtggtcggcgtcaccaaaattgtatcggagctatttggtaaaggtggtattgctgatcgaatgatctggttcagcgggtttccgttcctcgacaataaggaggaacacaactttggcgttcctgtatctgccgttatgactagcgatgtcgtggcgatacctgtacatggtatgacgctcgaatctatcgaagatttactcaaacagcctaaataccaaggtttccctatcatagaagatctcagcacccgagttcttgttggatatatcggccgcaccgagttgcgctatgctatcgatcgcctgcgccgcgatcgtgctgtaacaatagatcctcaggcgcagtgcaacttctcagcgccatcgctgagtgccatcacacctatcacgccaaccgttaccatacgaaatatggatcttagcatgtcatcagcatccattgatttcagccgctacgtagatgcatcacccgtggcagttcacccacggctgccgcttgaaacggtcatggacatgttccgcaagatcggacctcgggtgatactcatcgaacatcatggtaaacttacaggtctagtgacagtcaaggactgtctgaagtatcaattcaaggtagaagcagcagaaaacccccgcgaggaccgcgagattacgaagaactatgaacagctatggaatgctatggagagccttgcaggatgggtttcgcaaaaagtgtcaaaggctagtggtggccgtatacaattaaacggcggctatgaagaaaggagcgctctgatgcgcggcaatgggaggattatggatggcgatgaggatataggtgattttgatggcgtggagttagaggatagatag

SEQ ID NO: 28317 - protein, 841 aa, Muscodor strobelii
  misc_feature: SGI Peptide ID NO. 569715
  misc_feature (601)..(760): Pfam Id: PF00571 Pfam Desc: CBS domain pair
  misc_feature (185)..(568): Pfam Id: PF00654 Pfam Desc: Voltage gated chloride channel
  misc_feature (19)..(841): NCBI GI: 156049373 Blast Desc: SS1G_08393 [Sclerotinia sclerotiorum 1980] gi|154692792|gb|EDN92530.1| SS1G_08393 [Sclerotinia sclerotiorum 1980]
  misc_feature (8)..(841): NCBI GI: 261352396 Blast Desc: chloride channel protein [Verticillium albo-atrum VaMs.102]
  misc_feature (8)..(841): NCBI GI: 256720922 Blast Desc: [Nectria haematococca mpVI 77-13-4]
  misc_feature (9)..(841): NCBI GI: 154354101 Blast Desc: CLC voltage-gated chloride channel [Fusarium oxysporum f. sp. lycopersici]
  misc_feature (9)..(841): NCBI GI: 46121851 Blast Desc: FG05303.1 [Gibberella zeae PH-1]
  misc_feature (5)..(840): NCBI GI: 171690922 Blast Desc: protein product [Podospora anserina] gi|170945409|emb|CAP71521.1| protein product [Podospora anserina]
  misc_feature (68)..(841): NCBI GI: 164425026 Blast Desc: NCU06624 [Neurospora crassa OR74A] gi|157070759|gb|EAA33130.2| NCU06624 [Neurospora crassa OR74A]
  misc_feature (7)..(841): NCBI GI: 116195780 Blast Desc: CHGG_04488 [Chaetomium globosum CBS 148.51] gi|88180401|gb|EAQ87869.1| CHGG_04488 [Chaetomium globosum CBS 148.51]
  misc_feature (4)..(841): NCBI GI: 145603348 Blast Desc: MGG_06104 [Magnaporthe grisea 70-15] gi|145011600|gb|EDJ96256.1| MGG_06104 [Magnaporthe grisea 70-15]
  misc_feature (16)..(841): NCBI GI: 212533287 Blast Desc: voltage-gated chloride channel, [Penicillium marneffei ATCC 18224] gi|210072164|gb|EEA26253.1| voltage-gated chloride channel, [Penicillium marneffei ATCC 18224]
MTSLRSPSATISLTHPQPVRRRPSVSSRVSYAVSTAERGETLAIPAESQIEEEIAEIKRYEDFTTIDWVQDAAQERLRRAARKRRTAGLQSHGKVSWRYQLWESYDAAQGWIVVTLIGAAIGLNAAFLNIITEWLSDAKTGYCTTAFYLNEKFCCWGEDNGCPHWKRWTGFEPANYVIYIIFGTAFAFTAATLVKSFAPYAAGSGISEIKCIIAGFVMKGFLGFWTLVIKSIALPLAISSGLSVGKEGPSVHYAVCTGNVISRFFDKYKRNASKTREILSACAAAGVGVAFGSPIGGVLFSLEEMSNHFPLKTLWRSYFCALVATAVLAAMNPFRTGQLVMFQVQYDRSWHFFETVPYILIGIFGGLYGAFVIKWNLRVQAFRKKYLAQWAVLEATLLALGTAVICYPNAFLRIDMTESMEILFLECEGTEDYHGLCEQDKFWSNIISLVLATIIRIFLVIISYGCKVPAGIFVPSMAIGASFGRTVGIIMQAIHHAYPNSVFFSACLPDGPCITPGTYAFLGAAAALSGIMHVTVSVVVIMFELTGALTYILPTMIVVGVTKIVSELFGKGGIADRMIWFSGFPFLDNKEEHNFGVPVSAVMTSDVVAIPVHGMTLESIEDLLKQPKYQGFPIIEDLSTRVLVGYIGRTELRYAIDRLRRDRAVTIDPQAQCNFSAPSLSAITPITPTVTIRNMDLSMSSASIDFSRYVDASPVAVHPRLPLETVMDMFRKIGPRVILIEHHGKLTGLVTVKDCLKYQFKVEAAENPREDREITKNYEQLWNAMESLAGWVSQKVSKASGGRIQLNGGYEERSALMRGNGRIMDGDEDIGDFDGVELEDR

SEQ ID NO: 28318 - DNA, 2975 bp, Muscodor strobelii
  misc_feature: SGI EST ID NO. CUFF.66997.1
  misc_feature: Variant of the nucleotide sequence at SEQ ID NO 28316
ggtacatgccctgtaacccctaaaagtaccacttcagggtttgactgacgtacgtcgcagagctgtcgttcgtcgacccgtcattgaacggcacatttcgcctgttgccttagaccatcttccaagcagaagcttgtatatatcgaacgattcgtcgctctcgactccagtccccgattgcatgaagtttcactacatccgtgcgacgatgtccggtattccagggcgatgacttctctacgatccccttcggcgaccatctccctcacccatccacagcccgtgcgacgccgaccatccgtaagctccagagtatcgtatgccgtgtccacagccgagcgaggcgaaaccctagccatacccgccgaatcccaaatcgaggaggagattgccgagatcaagagatatgaggacttcaccaccatagattgggttcaggatgcggcccaggagcgtctgcgccgagctgcgcgaaagagaaggacggctggcctacagagccatggcaaggtctcctggagatatcagctgtgggaatcctacgatgccgctcaaggatggatagtcgtcaccttgatcggcgctgcgattggtctcaatgccgcctttctcaacatcataaccgagtggctttccgatgccaaaactggttactgcacgactgccttctatcttaacgaaaagttctgctgctggggcgaggacaatggctgcccacactggaagaggtggaccggattcgaacccgcaaactacgttatttacatcatatttggaactgcattcgccttcacggcggcaactctagtcaagtcattcgctccctacgcagcaggctctggcatttccgagattaaatgcattatcgctggctttgtgatgaaaggtttcttaggtttctggacgcttgtcatcaagtctattgctctcccacttgctatatcttctggtctctctgtcggcaaggagggccccagtgtccactacgccgtatgcacgggcaatgtcatctcgagattcttcgacaagtacaagcgaaatgcttccaagacgagagagatcctcagcgcatgcgctgccgccggcgtaggagtcgctttcggcagccctatcggaggtgtgctcttctccttggaagagatgtcgaaccatttccccttgaagactctgtggaggagttacttttgtgccttggttgcgacggcggtactggcagcaatgaacccttttaggactggtcaacttgtcatgtttcaggtccagtatgaccgatcctggcatttcttcgagacagtgccttatatcttaatcggcatctttggtgggttatacggcgcttttgtcataaaatggaatctacgagtacaggccttccgaaaaaagtatctcgcgcagtgggccgtgcttgaggctacgctattggcactcggtacagccgtcatctgttacccgaatgcatttctacgtatcgacatgacagagagcatggaaatcctgttcttagaatgcgaaggaacagaggactaccacggtctgtgcgaacaagacaagttctggtcaaacatcatatccctagtacttgcgactattattaggattttccttgttatcatctcctatggttgcaaagtaccggcaggtatctttgtcccgtccatggccattggggcctcctttggccggacggttggaataatcatgcaggcaatccatcatgcctacccaaacagcgtcttcttttcagcatgccttccggatggaccgtgtatcacccccggaacctatgctttcttgggcgccgccgccgcgcttagtggcataatgcacgtcactgtatcggtcgtcgtcattatgttcgagctcaccggagctttgacttatatcttgcccactatgatcgtggtcggcgtcaccaaaattgtatcggagctatttggtaaaggtggtattgctgatcgaatgatctggttcagcgggtttccgttcctcgacaataaggaggaacacaactttggcgttcctgtatctgccgttatgactagcgatgtcgtggcgatacctgtacatggtatgacgctcgaatctatcgaagatttactcaaacagcctaaataccaaggtttccctatcatagaagatctcagcacccgagttcttgttggatatatcggccgcaccgagttgcgctatgctatcgatcgcctgcgccgcgatcgtgctgtaacaatagatcctcaggcgcagtgcaacttctcagcgccatcgctgagtgccatcacacctatcacgccaaccgttaccatacgaaatatggatcttagcatgtcatcagcatccattgatttcagccgctacgtagatgcatcacccgtggcagttcacccacggctgccgcttgaaacggtcatggacatgttccgcaagatcggacctcgggtgatactcatcgaacatcatggtaaacttacaggtctagtgacagtcaaggactgtctgaagtatcaattcaaggtagaagcagcagaaaacccccgcgaggaccgcgagattacgaagaactatgaacagctatggaatgctatggagagccttgcaggatgggtttcgcaaaaagtgtcaaaggctagtggtggccgtatacaattaaacggcggctatgaagaaaggagcgctctgatgcgcggcaatgggaggattatggatggcgatgaggatataggtgattttgatggcgtggagttagaggatagataggactttagacctggcaactggatcgtgaatggagttctgcgtgttttgacggtttcatttttatggttgcacattgatatatgccatgctcatatgcctggtgatgttcttatgtacttcctcagctcaggtcagggtaccactgtcgtatcttgataaagtaatttggctgtgggcgatctagagatgccaagtgccttatctaatgactaagagacaac

SEQ ID NO: 28319 - DNA, 576 bp, Muscodor strobelii
  misc_feature: SGI cDNA ID NO. 569716
  misc_feature: Encodes the peptide sequence at SEQ ID NO 28320
atgccgtacaatacaacggcaatccctcctaggaaagaggtcacaggtcagacgcaactcccactatcaagagtcaagaaaatcatcgcccaagatcaagacatcaacgtctgctccaacaatgccgccttcgtaatcacactagcaaccgagatgttcgtccagtatctcgcaggcgaaggtctaaacatggccaagctggagcgaaagccacggcgcaacatccaatacaaagacatcgcaaacgcagtatcccaccaagataacctccagttcctcgaggacatggtccccaaaaccgtaccctacaagcagatcaaggctcacgccgccgcaacccgtgccaatctcaccggcggtgccaagactgcggatggggtggccattgcttcggtcgaggacccgcagcctgcgaagcagagcggcaagaagcagaagagtaatggccgtgcaagtggcggtagtgccagtctcgcatcttttgtcggtcgagtcgtgagtgaggatgaggacccgagcgatcagctgcggaacgagatgcagcaagcgagtggtgatgtccatatgtctggttga

SEQ ID NO: 28320 - protein, 191 aa, Muscodor strobelii
  misc_feature: SGI Peptide ID NO. 569716
  misc_feature (18)..(84): Pfam Id: PF00808 Pfam Desc: Histone-like transcription factor (CBF/NF-Y) and archaeal histone
  misc_feature (1)..(191): NCBI GI: 171690920 Blast Desc: protein product [Podospora anserina] gi|170945408|emb|CAP71520.1| protein product [Podospora anserina]
  misc_feature (1)..(191): NCBI GI: 256720723 Blast Desc: [Nectria haematococca mpVI 77-13-4]
  misc_feature (1)..(191): NCBI GI: 116195782 Blast Desc: CHGG_04489 [Chaetomium globosum CBS 148.51] gi|88180402|gb|EAQ87870.1| CHGG_04489 [Chaetomium globosum CBS 148.51]
  misc_feature (1)..(191): NCBI GI: 46121853 Blast Desc: FG05304.1 [Gibberella zeae PH-1]
  misc_feature (3)..(110): NCBI GI: 156049739 Blast Desc: [Sclerotinia sclerotiorum 1980] gi|154692975|gb|EDN92713.1| [Sclerotinia sclerotiorum 1980]
  misc_feature (1)..(110): NCBI GI: 154309073 Blast Desc: BC1G_07431 [Botryotinia fuckeliana B05.10] gi|150852474|gb|EDN27666.1| BC1G_07431 [Botryotinia fuckeliana B05.10]
  misc_feature (1)..(191): NCBI GI: 240106015 Blast Desc: Histone-like transcription factor and archaeal histone family protein [Coccidioides posadasii C735 delta SOWgp]
  misc_feature (1)..(135): NCBI GI: 226293936 Blast Desc: conserved [Paracoccidioides brasiliensis Pb18]
  misc_feature (1)..(116): NCBI GI: 225684306 Blast Desc: cytochrome b-c1 complex subunit Rieske [Paracoccidioides brasiliensis Pb03]
  misc_feature (1)..(190): NCBI GI: 239606233 Blast Desc: conserved [Ajellomyces dermatitidis ER-3]
  misc_feature (20)..(143): SWISSPROT Homolog: EC 2.7.7.7 DNA-directed DNA polymerase
MPYNTTAIPPRKEVTGQTQLPLSRVKKIIAQDQDINVCSNNAAFVITLATEMFVQYLAGEGLNMAKLERKPRRNIQYKDIANAVSHQDNLQFLEDMVPKTVPYKQIKAHAAATRANLTGGAKTADGVAIASVEDPQPAKQSGKKQKSNGRASGGSASLASFVGRVVSEDEDPSDQLRNEMQQASGDVHMSG

SEQ ID NO: 28321 - DNA, 2469 bp, Muscodor strobelii
  misc_feature: SGI EST ID NO. CUFF.66992.0
  misc_feature: Variant of the nucleotide sequence at SEQ ID NO 28319
tgtcacttcagtgcggatatttgtgaccttcactccactaaacaattggcgtcacctggattgatactacctttctcagatcttttcttcttcttatattattcacattgatccacggttggccgaatagtcttaagttcagcttcctggactataggcttcacctccaacctgcccctttgagtcgtggaagcagacttcaaatctgaagtctcgaggtcttcttttcgccacaacaccacaattgcaaaccatcaacgcacatcatgccgtacaatacaacggcaatccctcctaggaaagaggtcacaggtcagacgcaactcccactatcaagagtcaagaaaatcatcgcccaagatcaagacatcaacgtctgctccaacaatgccgccttcgtaatcacactagcaaccgagatgttcgtccagtatctcgcaggcgaaggtctaaacatggccaagctggagcgaaagccacggcgcaacatccaatacaaagacatcgcaaacgcagtatcccaccaagataacctccagttcctcgaggacatggtccccaaaaccgtaccctacaagcagatcaaggctcacgccgccgcaacccgtgccaatctcaccggcggtgccaagactgcggatggggtggccattgcttcggtcgaggacccgcagcctgcgaagcagagcggcaagaagcagaagagtaatggccgtgcaagtggcggtagtgccagtctcgcatcttttgtcggtcgagtcgtgagtgaggatgaggacccgagcgatcagctgcggaacgagatgcagcaagcgagtggtgatgtccatatgtctggttgaggatcggctagaaaacttggactagctgaggggaagaatcggccttaagctttgcataggttcggaaggatgggcggaagtgtgtgatgcgagttgagtgtgtttaatgaagttatgaggtatggcatggcctgttctaaagcacaacgctctagaaaagcatattcttaaagtcacgtaagaggtccaccgaagcaacggactcttgaccagaggtccggtttataaagtcaatgataggactgattgtgatcctcaattttcgctgtggctacgttgccctcgctttcccgacatgggtattttatacaccaaggattcgtaacttcgagacgaagccccctggtgacctacgaactcctggctctctcctctacatctttggtcccatccgaagtcacaaatacatacaggccgtgctctctactcctccatctcatcattaagatgcacaccagccggtaatcttccctctctcagcatcgtctcgagacgcgtgatttcatccaagctagtagctttcttgatcatgtcctgcagccgctgcttctccttgtcggtgagcttgatcctagacatgcgcatcgacaggccggcaccaccagcgctcgacaacgaggccgaagacgagctgtcaaaggtcttcgtcttgacgcccatgatcttggtcgcgagttctgtaggctcctccgctgtaccgaatagctccgcggcgtgtttgcgttctgcgtccttgaccttgacatagtcgagaaaccgcactgcgggacagcgccagagaacccaataccggtagttctataacatccttctgtcagcatcgcgtctcggcctttatggcttccgatggtgtgggaagggtggtcgctcacctctttctttgtgacggggttgtctcgaaggatcagatgtgtcaggtgtgcgaatgagccgagggggtccagatcggctagctcattgaggctgtttgactcgagttggaggttcgcgaggttgggaatggaggaggcgagactcggctgtatcgaggagacgcggttgcgcgcgaggaggagggtgtgtatgcgcggcgacagcgggaagttgccgaggacctggatgtcgttgtcgacgagatctatcgcatcttggggctgtgacaagaggaagagcagagtgtcagcaggcgacgactatgcataaggcgaaagaggaagagagaaagagacttactcctgcgacaccgagattctcaatggcgggaatgcgatgtcctgtaaggggccggcgagggcttgctatcaactctgcactttctgactagatcaaatagacgtgtagtatttgctcttttctgacgtacctcggaggtcgagctcgcgctccttgagggcgttgagccatgacggcgagttctgcagcagctccgccgtgagcctcattttggcggcgaggcgggccgagatggggttgctttaccgttgtgtgtgatatactcggaggatatatatgtgcgatcgtctgctgtagtctgctttcggcgcctctcgcttgaggcagctcttcttatttgctttgttgttcaaaatgttatgtcgtcgatcgtcggtatatgccaccatgcaagaccagaaagtgtttaaacaag

SEQ ID NO: 28322 - DNA, 633 bp, Muscodor strobelii
  misc_feature: SGI cDNA ID NO. 569717
  misc_feature: Encodes the peptide sequence at SEQ ID NO 28323
atgccgtacaatacaacggcaatccctcctaggaaagaggtcacaggtcagacgcaactcccactatcaagagtcaagaaaatcatcgcccaagatcaagacatcaacgtctgctccaacaatgccgccttcgtaatcacactagcaaccgagatgttcgtccagtatctcgcaggcgaaggtctaaacatggccaagctggagcgaaagccacggcgcaacatccaatacaaagacatcggtaccatctcccccctcatcgcctctcaactaacggcatacttacaacccactgcagcaaacgcagtatcccaccaagataacctccagttcctcgaggacatggtccccaaaaccgtaccctacaagcagatcaaggctcacgccgccgcaacccgtgccaatctcaccggcggtgccaagactgcggatggggtggccattgcttcggtcgaggacccgcagcctgcgaagcagagcggcaagaagcagaagagtaatggccgtgcaagtggcggtagtgccagtctcgcatcttttgtcggtcgagtcgtgagtgaggatgaggacccgagcgatcagctgcggaacgagatgcagcaagcgagtggtgatgtccatatgtctggttga

SEQ ID NO: 28323 - protein, 210 aa, Muscodor strobelii
  misc_feature: SGI Peptide ID NO. 569717
  misc_feature (18)..(84): Pfam Id: PF00808 Pfam Desc: Histone-like transcription factor (CBF/NF-Y) and archaeal histone
  misc_feature (18)..(80): Pfam Id: PF00808 Pfam Desc: Histone-like transcription factor (CBF/NF-Y) and archaeal histone
  misc_feature (1)..(210): NCBI GI: 116195782 Blast Desc: CHGG_04489 [Chaetomium globosum CBS 148.51] gi|88180402|gb|EAQ87870.1| CHGG_04489 [Chaetomium globosum CBS 148.51]
  misc_feature (1)..(210): NCBI GI: 171690920 Blast Desc: protein product [Podospora anserina] gi|170945408|emb|CAP71520.1| protein product [Podospora anserina]
  misc_feature (1)..(210): NCBI GI: 256720723 Blast Desc: [Nectria haematococca mpVI 77-13-4]
  misc_feature (1)..(210): NCBI GI: 46121853 Blast Desc: FG05304.1 [Gibberella zeae PH-1]
  misc_feature (1)..(210): NCBI GI: 119192646 Blast Desc: CIMG_00700 [Coccidioides immitis RS]
  misc_feature (3)..(129): NCBI GI: 156049739 Blast Desc: [Sclerotinia sclerotiorum 1980] gi|154692975|gb|EDN92713.1| [Sclerotinia sclerotiorum 1980]
  misc_feature (1)..(129): NCBI GI: 154309073 Blast Desc: BC1G_07431 [Botryotinia fuckeliana B05.10] gi|150852474|gb|EDN27666.1| BC1G_07431 [Botryotinia fuckeliana B05.10]
  misc_feature (1)..(210): NCBI GI: 240106015 Blast Desc: Histone-like transcription factor and archaeal histone family protein [Coccidioides posadasii C735 delta SOWgp]
  misc_feature (1)..(154): NCBI GI: 226293936 Blast Desc: conserved [Paracoccidioides brasiliensis Pb18]
  misc_feature (1)..(135): NCBI GI: 225684306 Blast Desc: cytochrome b-c1 complex subunit Rieske [Paracoccidioides brasiliensis Pb03]
  misc_feature (20)..(162): SWISSPROT Homolog: EC 2.7.7.7 DNA-directed DNA polymerase
MPYNTTAIPPRKEVTGQTQLPLSRVKKIIAQDQDINVCSNNAAFVITLATEMFVQYLAGEGLNMAKLERKPRRNIQYKDIGTISPLIASQLTAYLQPTAANAVSHQDNLQFLEDMVPKTVPYKQIKAHAAATRANLTGGAKTADGVAIASVEDPQPAKQSGKKQKSNGRASGGSASLASFVGRVVSEDEDPSDQLRNEMQQASGDVHMSG

SEQ ID NO: 28324 - DNA, 2469 bp, Muscodor strobelii; identical to SEQ ID NO: 28321
  misc_feature: SGI EST ID NO. CUFF.66992.0
  misc_feature: Variant of the nucleotide sequence at SEQ ID NO 28322

SEQ ID NO: 28325 - DNA, 756 bp, Muscodor strobelii
  misc_feature: SGI cDNA ID NO. 569718
  misc_feature: Reduced expression when VOC is produced
  misc_feature: Encodes the peptide sequence at SEQ ID NO 28326
atgaggctcacggcggagctgctgcagaactcgccgtcatggctcaacgccctcaaggagcgcgagctcgacctccgaggacatcgcattcccgccattgagaatctcggtgtcgcaggaccccaagatgcgatagatctcgtcgacaacgacatccaggtcctcggcaacttcccgctgtcgccgcgcatacacaccctcctcctcgcgcgcaaccgcgtctcctcgatacagccgagtctcgcctcctccattcccaacctcgcgaacctccaactcgagtcaaacagcctcaatgagctagccgatctggaccccctcggctcattcgcacacctgacacatctgatccttcgagacaaccccgtcacaaagaaagagaactaccggtattgggttctctggcgctgtcccgcagtgcggtttctcgactatgtcaaggtcaaggacgcagaacgcaaacacgccgcggagctattcggtacagcggaggagcctacagaactcgcgaccaagatcatgggcgtcaagacgaagacctttgacagctcgtcttcggcctcgttgtcgagcgctggtggtgccggcctgtcgatgcgcatgtctaggatcaagctcaccgacaaggagaagcagcggctgcaggacatgatcaagaaagctactagcttggatgaaatcacgcgtctcgagacgatgctgagagagggaagattaccggctggtgtgcatcttaatgatgagatggaggagtag

SEQ ID NO: 28326 - protein, 251 aa, Muscodor strobelii
  misc_feature: SGI Peptide ID NO. 569718
  misc_feature (1)..(251): NCBI GI: 116195784 Blast Desc: CHGG_04490 [Chaetomium globosum CBS 148.51] gi|88180403|gb|EAQ87871.1| CHGG_04490 [Chaetomium globosum CBS 148.51]
  misc_feature (1)..(251): NCBI GI: 46121855 Blast Desc: FG05305.1 [Gibberella zeae PH-1]
  misc_feature (1)..(251): NCBI GI: 256720923 Blast Desc: [Nectria haematococca mpVI 77-13-4]
  misc_feature (1)..(251): NCBI GI: 145603344 Blast Desc: MGG_13209 [Magnaporthe grisea 70-15] gi|145011598|gb|EDJ96254.1| MGG_13209 [Magnaporthe grisea 70-15]
  misc_feature (1)..(251): NCBI GI: 85107369 Blast Desc: U2 small nuclear ribonucleoprotein A' [Neurospora crassa OR74A] gi|74696536|sp|Q7S9P4.1|RU2A_NEUCR RecName: Full=U2 small nuclear ribonucleoprotein A'; Short=U2 snRNP-A' U2 small A'
  misc_feature (1)..(251): NCBI GI: 171690796 Blast Desc: protein product [Podospora anserina] gi|170945346|emb|CAP71458.1| protein product [Podospora anserina]
  misc_feature (1)..(242): NCBI GI: 145249046 Blast Desc: An14g02360 [Aspergillus niger] gi|134081537|emb|CAK41973.1| protein product [Aspergillus niger]
  misc_feature (1)..(242): NCBI GI: 169775379 Blast Desc: [Aspergillus oryzae RIB40] gi|83770020|dbj|BAE60155.1| protein product [Aspergillus oryzae]
  misc_feature (1)..(242): NCBI GI: 238495973 Blast Desc: small nuclear ribonucleoprotein U2, A' [Aspergillus flavus NRRL3357] gi|220694102|gb|EED50446.1| small nuclear ribonucleoprotein U2, A' [Aspergillus flavus NRRL3357]
  misc_feature (1)..(242): NCBI GI: 119479129 Blast Desc: small nuclear ribonucleoprotein U2, A' [Neosartorya fischeri NRRL 181] gi|119407747|gb|EAW17696.1| small nuclear ribonucleoprotein U2, A' [Neosartorya fischeri NRRL 181]
  misc_feature: Useful for introducing or modulating the production of volatile compounds
MRLTAELLQNSPSWLNALKERELDLRGHRIPAIENLGVAGPQDAIDLVDNDIQVLGNFPLSPRIHTLLLARNRVSSIQPSLASSIPNLANLQLESNSLNELADLDPLGSFAHLTHLILRDNPVTKKENYRYWVLWRCPAVRFLDYVKVKDAERKHAAELFGTAEEPTELATKIMGVKTKTFDSSSSASLSSAGGAGLSMRMSRIKLTDKEKQRLQDMIKKATSLDEITRLETMLREGRLPAGVHLNDEMEE

SEQ ID NO: 28327 - DNA, 2035 bp, Muscodor strobelii
  misc_feature: SGI EST ID NO. CUFF.66993.1
  misc_feature: Variant of the nucleotide sequence at SEQ ID NO 28325
ctttctggtcttgcatggtggcatataccgacgatcgacgacataacattttgaacaacaaagcaaataagaagagctgcctcaagcgagaggcgccgaaagcagactacagcagacgatcgcacatatatatcctccgagtatatcacacacaacggtaaagcaaccccatctcggcccgcctcgccgccaaaatgaggctcacggcggagctgctgcagaactcgccgtcatggctcaacgccctcaaggagcgcgagctcgacctccgaggtacgtcagaaaagagcaaatactacacgtctatttgatctagtcagaaagtgcagagttgatagcaagccctcgccggccccttacaggacatcgcattcccgccattgagaatctcggtgtcgcaggaccccaagatgcgatagatctcgtcgacaacgacatccaggtcctcggcaacttcccgctgtcgccgcgcatacacaccctcctcctcgcgcgcaaccgcgtctcctcgatacagccgagtctcgcctcctccattcccaacctcgcgaacctccaactcgagtcaaacagcctcaatgagctagccgatctggaccccctcggctcattcgcacacctgacacatctgatccttcgagacaaccccgtcacaaagaaagagaactaccggtattgggttctctggcgctgtcccgcagtgcggtttctcgactatgtcaaggtcaaggacgcagaacgcaaacacgccgcggagctattcggtacagcggaggagcctacagaactcgcgaccaagatcatgggcgtcaagacgaagacctttgacagctcgtcttcggcctcgttgtcgagcgctggtggtgccggcctgtcgatgcgcatgtctaggatcaagctcaccgacaaggagaagcagcggctgcaggacatgatcaagaaagctactagcttggatgaaatcacgcgtctcgagacgatgctgagagagggaagattaccggctggtgtgcatcttaatgatgagatggaggagtagagagcacggcctgtatgtatttgtgacttcggatgggaccaaagatgtagaggagagagccaggagttcgtaggtcaccagggggcttcgtctcgaagttacgaatccttggtgtataaaatacccatgtcgggaaagcgagggcaacgtagccacagcgaaaattgaggatcacaatcagtcctatcattgactttataaaccggacctctggtcaagagtccgttgcttcggtggacctcttacgtgactttaagaatatgcttttctagagcgttgtgctttagaacaggccatgccatacctcataacttcattaaacacactcaactcgcatcacacacttccgcccatccttccgaacctatgcaaagcttaaggccgattcttcccctcagctagtccaagttttctagccgatcctcaaccagacatatggacatcaccactcgcttgctgcatctcgttccgcagctgatcgctcgggtcctcatcctcactcacgactcgaccgacaaaagatgcgagactggcactaccgccacttgcacggccattactcttctgcttcttgccgctctgcttcgcaggctgcgggtcctcgaccgaagcaatggccaccccatccgcagtcttggcaccgccggtgagattggcacgggttgcggcggcgtgagccttgatctgcttgtagggtacggttttggggaccatgtcctcgaggaactggaggttatcttggtgggatactgcgtttgctgcagtgggttgtaagtatgccgttagttgagaggcgatgaggggggagatggtaccgatgtctttgtattggatgttgcgccgtggctttcgctccagcttggccatgtttagaccttcgcctgcgagatactggacgaacatctcggttgctagtgtgattacgaaggcggcattgttggagcagacgttgatgtcttgatcttgggcgatgattttcttgactcttgatactgg

SEQ ID NO: 28328 - DNA, 1242 bp, Muscodor strobelii
  misc_feature: SGI cDNA ID NO. 569719
  misc_feature: Encodes the peptide sequence at SEQ ID NO 28329
atgccgacctatctctgccacggcttccgctggcatcggcagagcgtgcgctacttcatcgccaaacacgacgtcgaggatggcgccaccgaatggatcgtcgctccaaacagccaagctgctctcttagagcagttttatgaactctacgattttcttccgcctctcgattctcctcgcgatcccccacagtccccgtcgtatcttggtcatcgccatgctccctccaacgactcgtcatatgtttcacggaccaactcatccgaataccacaatctggaagagcaaaagcctgtgcacgacgatggcgccaagacaaggagcaggagtgcttcacaaaagagcataaagtctttcagccgcccacggacgagcggccgcgacgagtcttcctatgtggcaccattgtcaccccttccgcaggcctctcccagtcccgaggattggtcaaaaggtctctcgcccatcagacttctagaggagttcgaccctaaggacgagaccaaggtcagcgggccttgggcctatgtcgccgatcacgtcatacaagttggcaccagcgtctccatcgctgatgaaatgttccgatacgaagcacgggcgaaacaggatgctagtaagcctatgcgcggtccgagtgacgaatacggtagaaaagttcacgggtcaagcagcaaaaaggctgggtggtttgagaaattacgagaccagttacaacgaggggaaagcatcaaatggtatgttgtcgtatgtggtgacgaggagcggtacaatcccacggcctatgacgatgacgagatgatcgaagaagaggaggaagaggaagaggaaggcatgtatgaggaggaatgtggcgaaagcagcagtgcgaagagtcaagaccgtcgtgcatggttacggcagtcacggtcgacacaatcaacagaagcaaactcaacaactacaacggggacctcggtaatcgatggcgggttcgaatatcgacttcctgaacttgccggtcttgccgcgatgactccgactgcactcccagaacgcaagaggagacaactattagcaccaccagccatcgataaggatcttgctaatatatccatctcatctcctccaaaatcgcctctttctccaagcatcacaaagctagcgtcggtagagtctccctctcgaacgttgaagtctgctcgttcatctattggattacgaaaactcttttctcgacgtggcacggaaacatcggtatga

SEQ ID NO: 28329 - protein, 413 aa, Muscodor strobelii
  misc_feature: SGI Peptide ID NO. 569719
  misc_feature (1)..(256): NCBI GI: 261352321 Blast Desc: conserved [Verticillium albo-atrum VaMs.102]
  misc_feature (1)..(256): NCBI GI: 116196342 Blast Desc: CHGG_04769 [Chaetomium globosum CBS 148.51] gi|88180682|gb|EAQ88150.1| CHGG_04769 [Chaetomium globosum CBS 148.51]
  misc_feature (1)..(244): NCBI GI: 156045283 Blast Desc: SS1G_09830 [Sclerotinia sclerotiorum 1980] gi|154694225|gb|EDN93963.1| SS1G_09830 [Sclerotinia sclerotiorum 1980]
  misc_feature (1)..(259): NCBI GI: 256727010 Blast Desc: NECHADRAFT_105910 [Nectria haematococca mpVI 77-13-4]
  misc_feature (150)..(256): NCBI GI: 145613329 Blast Desc: MGG_01731 [Magnaporthe grisea 70-15] gi|145020424|gb|EDK04553.1| MGG_01731 [Magnaporthe grisea 70-15]
  misc_feature (154)..(282): NCBI GI: 46136103 Blast Desc: FG09567.1 [Gibberella zeae PH-1]
  misc_feature (154)..(256): NCBI GI: 85104709 Blast Desc: NCU05255 [Neurospora crassa OR74A] gi|28923366|gb|EAA32556.1| [Neurospora crassa OR74A]
  misc_feature (1)..(62): NCBI GI: 85104709 Blast Desc: NCU05255 [Neurospora crassa OR74A] gi|28923366|gb|EAA32556.1| [Neurospora crassa OR74A]
  misc_feature (1)..(52): NCBI GI: 46136103 Blast Desc: FG09567.1 [Gibberella zeae PH-1]
  misc_feature (1)..(66): NCBI GI: 145613329 Blast Desc: MGG_01731 [Magnaporthe grisea 70-15] gi|145020424|gb|EDK04553.1| MGG_01731 [Magnaporthe grisea 70-15]
MPTYLCHGFRWHRQSVRYFIAKHDVEDGATEWIVAPNSQAALLEQFYELYDFLPPLDSPRDPPQSPSYLGHRHAPSNDSSYVSRTNSSEYHNLEEQKPVHDDGAKTRSRSASQKSIKSFSRPRTSGRDESSYVAPLSPLPQASPSPEDWSKGLSPIRLLEEFDPKDETKVSGPWAYVADHVIQVGTSVSIADEMFRYEARAKQDASKPMRGPSDEYGRKVHGSSSKKAGWFEKLRDQLQRGESIKWYVVVCGDEERYNPTAYDDDEMIEEEEEEEEEGMYEEECGESSSAKSQDRRAWLRQSRSTQSTEANSTTTTGTSVIDGGFEYRLPELAGLAAMTPTALPERKRRQLLAPPAIDKDLANISISSPPKSPLSPSITKLASVESPSRTLKSARSSIGLRKLFSRRGTETSV

SEQ ID NO: 28330 - DNA, 2600 bp, Muscodor strobelii
  misc_feature: SGI EST ID NO. CUFF.66886.0
  misc_feature: Variant of the nucleotide sequence at SEQ ID NO 28328
caaacagcttggacttgtacgagttgctacatagatagattggctacttcaagaagacgacggaggattgcataccacctgtttggatccggcgatcctgaatggcctgtgccagcaagctgtgcctcacacgctcattcttccgatgagaaacagcctgggactcggctggaaatggggccacaaaggagaagcagtgagcgacatggatgtgacagcaagtcggggtgagaagaggaaccatacttgttgcgccaaggtgccaacatacgtttttatgccataatcagcggcgctccttggcggctcacgttggcagtggacattggcagcagtcattacaaggtctcaccagacaaagacccccatcttatcgagccatctcaccggccactctgtgagcgtcgactcgattctcgacctgtccgccctccatttacgaggatccagtggatgtcgagtcccgtccagacccgctcgttgctttctcccttgcatcggctgccataattcagagacacagcagctaacctaccgaatctacagctcacagtacattctgttcatcctcacatcatctcttcctccccggctgcactacctgcatcaattccccggatttcatatttggaatctctctcctaggctccgatcctctgcatcttcgcatatagatcatatcattcattgcttttcgagcgacacatcacatacatcttccgtgtgcccagctctgcctctgacgccatctcccgcctgttccttgcgggtgccgtcccgtcgcaccggctgagttctcatcgagcttgagcctggatgcaccatgccgacctatctctgccacggcttccgctggcatcggcagagcgtgcgctacttcatcgccaaacacgacgtcgaggatggcgccaccgaatggatcgtcgctccaaacagccaagctgctctcttagagcagttttatgaactctacgattttcttccgcctctcgattctcctcgcgatcccccacagtccccgtcgtatcttggtcatcgccatgctccctccaacgactcgtcatatgtttcacggaccaactcatccgaataccacaatctggaagagcaaaagcctgtgcacgacgatggcgccaagacaaggagcaggagtgcttcacaaaagagcataaagtctttcagccgcccacggacgagcggccgcgacgagtcttcctatgtggcaccattgtcaccccttccgcaggcctctcccagtcccgaggattggtcaaaaggtctctcgcccatcagacttctagaggagttcgaccctaaggacgagaccaaggtcagcgggccttgggcctatgtcgccgatcacgtcatacaagttggcaccagcgtctccatcgctgatgaaatgttccgatacgaagcacgggcgaaacaggatgctagtaagcctatgcgcggtccgagtgacgaatacggtagaaaagttcacgggtcaagcagcaaaaaggctgggtggtttgagaaattacgagaccagttacaacgaggggaaagcatcaaatggtatgttgtcgtatgtggtgacgaggagcggtacaatcccacggcctatgacgatgacgagatgatcgaagaagaggaggaagaggaagaggaaggcatgtatgaggaggaatgtggcgaaagcagcagtgcgaagagtcaagaccgtcgtgcatggttacggcagtcacggtcgacacaatcaacagaagcaaactcaacaactacaacggggacctcggtaatcgatggcgggttcgaatatcgacttcctgaacttgccggtcttgccgcgatgactccgactgcactcccagaacgcaagaggagacaactattagcaccaccagccatcgataaggatcttgctaatatatccatctcatctcctccaaaatcgcctctttctccaagcatcacaaagctagcgtcggtagagtctccctctcgaacgttgaagtctgctcgttcatctattggattacgaaaactcttttctcgacgtggcacggaaacatcggtatgaactctcttcaatcatcgataatcaaactaagtcggcgatatggatcaaagacatactgcgtccaaagcatgcatatcccgcgatcccaacaaggatcataaatcagattctggccggtcttgatctctcccaaaacttaacttcgaatttggtctcgtctgaattgtataataccctttctccccatttgtttgaacttctaacgacgtaccaatacccatatgaacattttacgagaggcgtgcagcacaggtgttgagctaaaaactgggagcaattgaacggcgcatcatggcaaaggtacgggcagtcaaaaaaccgggttgattcccgtcgaacttatgatttcggactataatggtcattacgcgtggttgagtgaagcgcacgcgtatgtggcacatgggcagagcagatgatcgaaagtatgatgatcaaagtacatgtaacaatatcaaagcagaatgatggatttcaatcctcatctagcatcaattacatgacacaacttgcaagatctggttggcattttccg

SEQ ID NO: 28331 - DNA, 1038 bp, Muscodor strobelii
  misc_feature: SGI cDNA ID NO. 569720
  misc_feature: Encodes the peptide sequence at SEQ ID NO 28332
atgaagttcctcaccagtatctctgctctcgccgctgttgccagcgctgcctctgtcaacactgtcagatctgagtctcctcttgatattaagctgactcctgcgggcaccaattccgtcaaagccacaatcaccaacaatgattccagcgacctgagaatctttaagactggaaccatgcttgataaggcccgcgtcgagaaggtcaaagtataccaagggaaaaagcaggttggctttgctggtgtccgtcagcgaaccactacaacaggcttgaaagattctgcgttccagactatcaaagcaggagagtctttcaccaccgagatcaacattgctgagctccacgacctcagtgagggtggaagcttcgatgtccactccaagggagctctccaatatgctaccgagcactcgaatgtcatcaagggctccgttcctttctcctccaacgtccttagtatgaaggtcgatggaaagcaggctgctaaggctctctccgacattcaagtcaagcgcgccgctattcagaacgactgcagcggctctgaactctctgctactactgctgctatcgagggtgcgaactctcttgccaaagccgccgcagatgctgcgtcgtccgatgacgccaagctcgaggagtatttcggcactgcctcagtccgagatcaggttgttagcgttttcaacaaggtcgccgatgaggctagtagcaccagcagcggcgctgcccaatattgcaccgatgtttacaacgcttgcagtgatggtgtcctcgcttataccctcccttcgcaggactacatggtcaactgccctatctacttcagctacctatctgctgcctcctcgacatgccacgaccaggaccaacagtccaccactctccacgaaatgactcacttgaccgagatcgctggaactgacgacctcggatacggctactccgccgccactgctctctctacccaggatgctctgaacaacgctgactcttacgctctgtttgctcagtccgtctacgccggctgctaa

SEQ ID NO: 28332 - protein, 345 aa, Muscodor strobelii
  misc_feature: SGI Peptide ID NO. 569720
  misc_feature (1)..(345): Pfam Id: PF02102 Pfam Desc: Deuterolysin metalloprotease (M35) family
  misc_feature (1)..(345): NCBI GI: 85077806 Blast Desc: NCU05071 [Neurospora crassa OR74A] gi|28917104|gb|EAA26824.1| conserved [Neurospora crassa OR74A]
  misc_feature (1)..(345): NCBI GI: 261352695 Blast Desc: metalloproteinase [Verticillium albo-atrum VaMs.102]
  misc_feature (1)..(345): NCBI GI: 261353957 Blast Desc: neutral protease [Verticillium albo-atrum VaMs.102]
  misc_feature (1)..(345): NCBI GI: 145583577 Blast Desc: metallo-endopeptidase [Hypocrea lixii]
  misc_feature (1)..(345): NCBI GI: 256733382 Blast Desc: NECHADRAFT_36693 [Nectria haematococca mpVI 77-13-4]
  misc_feature (23)..(345): NCBI GI: 169598740 Blast Desc: SNOG_02177 [Phaeosphaeria nodorum SN15] gi|111069269|gb|EAT90389.1| SNOG_02177 [Phaeosphaeria nodorum SN15]
  misc_feature (1)..(345): NCBI GI: 46127823 Blast Desc: FG08289.1 [Gibberella zeae PH-1]
  misc_feature (23)..(345): NCBI GI: 157400017 Blast Desc: metalloendopeptidase [Trichoderma hamatum]
  misc_feature (1)..(345): NCBI GI: 39943414 Blast Desc: MGG_10927 [Magnaporthe grisea 70-15] gi|149209331|ref|XP_001522040.1| MGCH7_ch7g157 [Magnaporthe grisea 70-15] gi|86196112|gb|EAQ70750.1| MGCH7_ch7g157 grisea
  misc_feature (18)..(345): NCBI GI: 169614750 Blast Desc: SNOG_10522 [Phaeosphaeria nodorum SN15] gi|111060796|gb|EAT81916.1| SNOG_10522 [Phaeosphaeria nodorum SN15]
  misc_feature (24)..(345): SWISSPROT Homolog: EC 3.4.24.39 Deuterolysin
MKFLTSISALAAVASAASVNTVRSESPLDIKLTPAGTNSVKATITNNDSSDLRIFKTGTMLDKARVEKVKVYQGKKQVGFAGVRQRTTTTGLKDSAFQTIKAGESFTTEINIAELHDLSEGGSFDVHSKGALQYATEHSNVIKGSVPFSSNVLSMKVDGKQAAKALSDIQVKRAAIQNDCSGSELSATTAAIEGANSLAKAAADAASSDDAKLEEYFGTASVRDQVVSVFNKVADEASSTSSGAAQYCTDVYNACSDGVLAYTLPSQDYMVNCPIYFSYLSAASSTCHDQDQQSTTLHEMTHLTEIAGTDDLGYGYSAATALSTQDALNNADSYALFAQSVYAGC

SEQ ID NO: 28333 - DNA, 296 bp, Muscodor strobelii
  misc_feature: SGI EST ID NO. CUFF.66895.0
  misc_feature: Variant of the nucleotide sequence at SEQ ID NO 28331
cgggcaccaattccgtcaaagccacaatcaccaacaatgattccagcgacctgagaatctttaagactggaaccatgcttgataaggcccgcgtcgagaaggtcaaagtataccaagggaaaaagcaggttggctttgctggtgtccgtcagcgaaccactacaacaggcttgaaagattctgcgttccagactatcaaagcaggagagtctttcaccaccgagatcaacattgctgagctccacgacctcagtgagggtggaagcttcgatgtccactccaagggagctctccaa

SEQ ID NO: 28334 - DNA, 1137 bp, Muscodor strobelii
  misc_feature: SGI cDNA ID NO. 569721
  misc_feature: Encodes the peptide sequence at SEQ ID NO 28335
atgtcttggcttggtatggcaccggagcccaagagccctttggctcgttaccgcttgcttgcaccgaacgcttcggttcgagtgagcccgttgtgtgtcggtgccatgaatttcggcgacgcttggaaatcgcatatgaatgcctgtgataaagataccacattcaagctccttgacttctattacgaacaagggggaaacttcattgatacctctaacaactaccaattcgaggaatcagagagatggattggcgagtggatgacgagccgtggtgttcgcgatcaaatggttattgcgaccaagttcacaacaaactttcgagctggtcaccatgaagagacgactatcaatttccaaggcaatggcacgaagagcttgcacacatctgttaagcgttctctagacaaactccagaccgattatatcgacttactctatgtccattggtgggactactcgacgtcagtcgaagaagttatgcaatctttgaaccaactctgcaatgctggcaaagtgctttacttggtaggggctagcgatacacctgcgtgggtggttgcaaaggcaaatcagtatgccaaagatcatggcttacgaccgttctctgtgtatcagggccgatggtcgtgcggaacgcgtgacctagagcgagagattattccgatgacgcgaagtgagggaatgggcatttgcccttggggagctctcggtggaggcaagttcaaaactgaagaagagcgtaagaaagctgagggacgctccgcccagcctagcgatcacgatatcaaaataagcaatgctctcgaggctgttgcgagacgcaagggaaccattattacgagtgtggctttagcctacgtcatggcaaagacaccctacgtcttccctatcgtcggtggacgtaccattgaccaactgaaggccaatatcgaagctcttaacttgtcactctctgatgatgacatcaaggagattgaatctgccgcccctttcgatccaggatttcccaccaatttcgcctaccatgactatcctcctaaaaatcctggaaacgtatggttgctcggaatgggagggactacggactatgttgctcagccaaaggcaatcacaccaaaacgaatgggggattag

SEQ ID NO: 28335 - protein, 378 aa, Muscodor strobelii
  misc_feature: SGI Peptide ID NO. 569721
  misc_feature (22)..(331): Pfam Id: PF00248 Pfam Desc: Aldo/keto reductase family
  misc_feature (1)..(370): NCBI GI: 261353083 Blast Desc: norsolorinic acid reductase [Verticillium albo-atrum VaMs.102]
  misc_feature (4)..(373): NCBI GI: 164423792 Blast Desc: norsolorinic acid reductase [Neurospora crassa OR74A] gi|157070233|gb|EAA32737.2| norsolorinic acid reductase [Neurospora crassa OR74A]
  misc_feature (4)..(378): NCBI GI: 256727425 Blast Desc: NECHADRAFT_58032 [Nectria haematococca mpVI 77-13-4]
  misc_feature (7)..(375): NCBI GI: 154303677 Blast Desc: BC1G_08723 [Botryotinia fuckeliana B05.10] gi|150854517|gb|EDN29709.1| BC1G_08723 [Botryotinia fuckeliana B05.10]
  misc_feature (4)..(377): NCBI GI: 145613357 Blast Desc: MGG_01713 [Magnaporthe grisea 70-15] gi|145020443|gb|EDK04572.1| MGG_01713 [Magnaporthe grisea 70-15]
  misc_feature (4)..(376): NCBI GI: 255954357 Blast Desc: Pc21g08920 [Penicillium chrysogenum Wisconsin 54-1255] gi|211589642|emb|CAP95789.1| Pc21g08920 [Penicillium chrysogenum Wisconsin 54-1255]
  misc_feature (1)..(375): NCBI GI: 145240867 Blast Desc: An08g09700 [Aspergillus niger] gi|134077604|emb|CAK96748.1| protein product [Aspergillus niger]
  misc_feature (7)..(375): NCBI GI: 242796863 Blast Desc: aldo/keto reductase, [Talaromyces stipitatus ATCC 10500] gi|218719480|gb|EED18900.1| aldo/keto reductase, [Talaromyces stipitatus ATCC 10500]
  misc_feature (4)..(372): NCBI GI: 156049339 Blast Desc: SS1G_08376 [Sclerotinia sclerotiorum 1980] gi|154692775|gb|EDN92513.1| SS1G_08376 [Sclerotinia sclerotiorum 1980]
  misc_feature (12)..(342): NCBI GI: 189206311 Blast Desc: norsolorinic acid reductase [Pyrenophora tritici-repentis Pt-1C-BFP] gi|187975583|gb|EDU42209.1| norsolorinic acid reductase [Pyrenophora tritici-repentis
  misc_feature (7)..(337): SWISSPROT Homolog: EC 1.1.1.91 Aryl-alcohol dehydrogenase (NADP(+))
MSWLGMAPEPKSPLARYRLLAPNASVRVSPLCVGAMNFGDAWKSHMNACDKDTTFKLLDFYYEQGGNFIDTSNNYQFEESERWIGEWMTSRGVRDQMVIATKFTTNFRAGHHEETTINFQGNGTKSLHTSVKRSLDKLQTDYIDLLYVHWWDYSTSVEEVMQSLNQLCNAGKVLYLVGASDTPAWVVAKANQYAKDHGLRPFSVYQGRWSCGTRDLEREIIPMTRSEGMGICPWGALGGGKFKTEEERKKAEGRSAQPSDHDIKISNALEAVARRKGTIITSVALAYVMAKTPYVFPIVGGRTIDQLKANIEALNLSLSDDDIKEIESAAPFDPGFPTNFAYHDYPPKNPGNVWLLGMGGTTDYVAQPKAITPKRMGD

SEQ ID NO: 28336 - DNA, 707 bp, Muscodor strobelii
  misc_feature: SGI EST ID NO. CUFF.66910.0
  misc_feature: Variant of the nucleotide sequence at SEQ ID NO 28334
ctctcgcccgcctttcgttaacgccatattaacgccaccgtgtgtatggttcattacatttccaggttgggagtcattgcttccgatacatccatctctgtatagcctctcatcttagcacatatcgcgacgaaaggacgattgctctcaatcatatctgctcacactgtctagcaaatctctgcccataatgtcttggcttggtatggcaccggagcccaagagccctttggctcgttaccgcttgcttgcaccgaacgcttcggttcgagtgagcccgttgtgtgtcggtgccatgaatttcggcgacgcttggaaatcgcatatgaatgcctgtgataaagataccacattcaagctccttgacttctattacgaacaagggggaaacttcattgatacctctaacaactaccaattcgaggaatcagagagatggattggcgagtggatgacgagccgtggtgttcgcgatcaaatggttattgcgaccaagttcacaacaaactttcgagctggtcaccatgaagagacgactatcaatttccaaggcaatggcacgaagagcttgcacacatctgttaagcgttctctagacaaactccagaccgattatatcgacttactctatgtccattggtgggactactcgacgtcagtcgaagaagttatgcaatctttgaaccaactctgcaatgctggcaaag

SEQ ID NO: 28337 - DNA, 2097 bp, Muscodor strobelii
  misc_feature: SGI cDNA ID NO. 569722
  misc_feature: Encodes the peptide sequence at SEQ ID NO 28338
atgtcgccatcgtctacaggcgactcgcctctttcagctggtgctgcgagttcgtcagggcgggcgtttccattaccttcgagagatagcttctcgattgaagtcccatcgccacaactcaccggcaccaatggaccgtcgtcgctcaagtcgccgacaggccacaaatcccagcggaccgctagcttcagtcgagaagggatattaggggctgcgcaaaaagcacgaaccctctcacaagctaacgagcagacgccctcaagcagcaatggtatgcgcaaatcgccaagcgacgaagggacgatcaacccgctgaaaagacggaacacagatgccactgtcgactatcctcggagaagggccacaatagcgtgtgaagtatgcaggtcaagaaaatcacgttgtgatggcacaaaacctaaatgcaagctttgcactgagcttggggcagagtgtatctatcgtgaaccaggtatcaaactggatgcaggcgataaactaatcctagaaagattaacgcgcatcgagagcctccttcagatcagcttagtcaacagtcaccctaatgctatgcaaatttcctccgactcaccaccaatgagcaatggtacagctctcagcggcgacaatgtcatcctccagaatcctgccagtttcgtatctatcattccaagtggcggcctgggtacttggacaagtcatacaccagggacgaacatttctacaatgcccaaggtgcacacgaatgcagcgctgcatttgcttcagtggccattaatacgagaactcgtacagcggccctacgatccacagatcattctacaattggagttggcccgtgagccactacactcattggcgaaaacaccctgtgttgatctatcaaatacaaatgcgtacattgaagcatatttcgacagagtcaatatttggtatgcctgtgtaaacccatatacttggcgaagccattaccgtatggccttatcgactggttttcgtgaaggtcctgagagttgtattgttttactcgtccttgctcttggccaggccagcttgcgtggaagcatatcaagagtcgtaccgcacgaggatccaccaggcctacaatacttcacagccgcatggtctcttctacctggaatgatgacagctaacagtgttttggctgcacaatgccatctcctggctgcggcttatctcttctatctggtacggccattagaagcttggaacttgctctgcaccgtcagcagcaaactacagcttttactcatggcaccgacacgtgtgccagacgatcagagagaactattagagcgaatttattggaactcacttctatttgagagtgatcttctagctgagctggatcttccacattctggtgttgttcagttcgaggaaaatgttggtctgcctggaggtttccaaggtgaagaatcagaggccgtaggtcgcgacgatctgtggtacttcttggccgagatcgcacttagaagacttctcaatcgagttagtcaactcatctactctaaggactcgatggcttctacaaccagtctcgaacctgttgtagctgaactcgattttcaacttacacagtggtacgagagtctgccgatacccttacaatttccgttcacccggacgactctgccagaccccatacagactgtactgcgtttgcgcttctttgcgtgccggactattatatatcggccctatatactcgcagtattggataatgaacaagcagtcctcgaccctgcggttcgcgatagttgtcataaatgcctcgaggcttcaatccgccaattagagcacatatccgcacatcatgccggacacatgccttacctatggcaaggcgcactctctattgtgtctcagacgttacttgtgatgggcgccacaatgtcgccttcactttctaacattttattgacgttagtgccgcatagagaggcattggatcaaatcatcaatgatgtgatcatggacatcgaaaggatggctgtgctagcgccgagccttagcttagcagccgagattatcaaggaagccgaagtacgtcggcggactttcttgaacagctga

SEQ ID NO: 28338 - protein, 698 aa, Muscodor strobelii
  misc_feature: SGI Peptide ID NO. 569722
  misc_feature (123)..(161): Pfam Id: PF00172 Pfam Desc: Fungal Zn(2)-Cys(6) binuclear cluster domain
  misc_feature (1)..(697): NCBI GI: 171690570 Blast Desc: protein product [Podospora anserina] gi|170945233|emb|CAP71344.1| protein product [Podospora anserina]
  misc_feature (1)..(697): NCBI GI: 116196066 Blast Desc: conserved [Chaetomium globosum CBS 148.51] gi|88180544|gb|EAQ88012.1| conserved [Chaetomium globosum CBS 148.51]
  misc_feature (1)..(698): NCBI GI: 256727484 Blast Desc: [Nectria haematococca mpVI 77-13-4]
  misc_feature (1)..(689): NCBI GI: 46121379 Blast Desc: FG05068.1 [Gibberella zeae PH-1]
  misc_feature (1)..(697): NCBI GI: 85107002 Blast Desc: NCU07705 [Neurospora crassa OR74A] gi|28923893|gb|EAA33055.1| conserved [Neurospora crassa OR74A]
  misc_feature (1)..(698): NCBI GI: 145613319 Blast Desc: MGG_01734 [Magnaporthe grisea 70-15] gi|145020418|gb|EDK04547.1| MGG_01734 [Magnaporthe grisea 70-15]
  misc_feature (5)..(697): NCBI GI: 156035879 Blast Desc: SS1G_13144 [Sclerotinia sclerotiorum 1980] gi|154698548|gb|EDN98286.1| SS1G_13144 [Sclerotinia sclerotiorum 1980]
  misc_feature (97)..(698): NCBI GI: 71000806 Blast Desc: C6 finger domain protein [Aspergillus fumigatus Af293] gi|66852722|gb|EAL93046.1| C6 finger domain protein, [Aspergillus fumigatus Af293] gi|159129183|gb|EDP54297.1| C6 finger domain
  misc_feature (97)..(698): NCBI GI: 169784080 Blast Desc: [Aspergillus oryzae RIB40] gi|83775246|dbj|BAE65369.1| protein product [Aspergillus oryzae]
  misc_feature (106)..(698): NCBI GI: 115386004 Blast Desc: conserved [Aspergillus terreus NIH2624] gi|114190541|gb|EAU32241.1| conserved [Aspergillus terreus NIH2624]
MSPSSTGDSPLSAGAASSSGRAFPLPSRDSFSIEVPSPQLTGTNGPSSLKSPTGHKSQRTASFSREGILGAAQKARTLSQANEQTPSSSNGMRKSPSDEGTINPLKRRNTDATVDYPRRRATIACEVCRSRKSRCDGTKPKCKLCTELGAECIYREPGIKLDAGDKLILERLTRIESLLQISLVNSHPNAMQISSDSPPMSNGTALSGDNVILQNPASFVSIIPSGGLGTWTSHTPGTNISTMPKVHTNAALHLLQWPLIRELVQRPYDPQIILQLELAREPLHSLAKTPCVDLSNTNAYIEAYFDRVNIWYACVNPYTWRSHYRMALSTGFREGPESCIVLLVLALGQASLRGSISRVVPHEDPPGLQYFTAAWSLLPGMMTANSVLAAQCHLLAAAYLFYLVRPLEAWNLLCTVSSKLQLLLMAPTRVPDDQRELLERIYWNSLLFESDLLAELDLPHSGVVQFEENVGLPGGFQGEESEAVGRDDLWYFLAEIALRRLLNRVSQLIYSKDSMASTTSLEPVVAELDFQLTQWYESLPIPLQFPFTRTTLPDPIQTVLRLRFFACRTIIYRPYILAVLDNEQAVLDPAVRDSCHKCLEASIRQLEHISAHHAGHMPYLWQGALSIVSQTLLVMGATMSPSLSNILLTLVPHREALDQIINDVIMDIERMAVLAPSLSLAAEIIKEAEVRRRTFLNS

SEQ ID NO: 28339 - DNA, 4342 bp, Muscodor strobelii
  misc_feature: SGI EST ID NO. CUFF.66967.1
  misc_feature: Variant of the nucleotide sequence at SEQ ID NO 28337
tgagataggacagctgcagttcctattgcagcttgctgcaggtcgtagccgaggcagatcatccttccctttctggcttgagctattcgaaataatcgctcgtctaaactgtgataggaataccgtaggatgaccccgtgcttggccctacgagtatggagagacaccaaaggacgggtcaatgcggggatcaggttcaacggttggttcttggactccacgcagcttggtcgtgttcgaccagggcagccagggcccaacaagggtctcaggatgcgctgatgcagtgatcctctccgccgctggcaatctgtgccgtgtctggactctgcagcagctcgaagtggatggatgaagtattgaagttggaccaggggagggtcctctacgctgtccagcattcagatggtagacatattgcttatggtggcgccccggtgccctggtgccctggaaattctgtcggtgggtggttagatgccacccatgcatttccgaattcccatttctgaacataataacctctgtactgtgccttgcaggcccttatgaccctttcccagttccccttcgtcacactcttcgacctcgcctacgaatgcccgggtccaaggttaaatgcgagtccgtcttaaaggaattggctttccgccctaggttacacagctgcatcgacaaccacgattgaccacattttgttgtctcatctgagacctggagagttgggaagaccgctcgtcgggtctagggcgacgaaggtagatatgtcgccatcgtctacaggcgactcgcctctttcagctggtgctgcgagttcgtcagggcgggcgtttccattaccttcgagagatagcttctcgattgaagtcccatcgccacaactcaccggcaccaatggaccgtcgtcgctcaagtcgccgacaggccacaaatcccagcggaccgctagcttcagtcgagaagggatattaggggctgcgcaaaaagcacgaaccctctcacaagctaacgagcagacgccctcaagcagcaatggtatgcgcaaatcgccaagcgacgaagggacgatcaacccgctgaaaagacggaacacagatgccactgtcgactatcctcggagaagggccacaatagcgtgtgaagtatgcaggtcaagaaaatcacgttgtgatggcacaaaacctaaatgcaagctttgcactgagcttggggcagagtgtatctatcgtgaaccaggtatcaaactggatgcaggcgataaactaatcctagaaagattaacgcgcatcgagagcctccttcagatcagcttagtcaacagtcaccctaatgctatgcaaatttcctccgactcaccaccaatgagcaatggtacagctctcagcggcgacaatgtcatcctccagaatcctgccagtttcgtatctatcattccaagtggcggcctgggtacttggacaagtcatacaccagggacgaacatttctacaatgcccaaggtgcacacgaatgcagcgctgcatttgcttcagtggccattaatacgagaactcgtacagcggccctacgatccacagatcattctacaattggagttggcccgtgagccactacactcattggcgaaaacaccctgtgttgatctatcaaatacaaatgcgtacattgaagcatatttcgacagagtcaatatttggtatgcctgtgtaaacccatatacttggcgaagccattaccgtatggccttatcgactggttttcgtgaaggtcctgagagttgtattgttttactcgtccttgctcttggccaggccagcttgcgtggaagcatatcaagagtcgtaccgcacgaggatccaccaggcctacaatacttcacagccgcatggtctcttctacctggaatgatgacagctaacagtgttttggctgcacaatgccatctcctggctgcggcttatctcttctatctggtacggccattagaagcttggaacttgctctgcaccgtcagcagcaaactacagcttttactcatggcaccgacacgtgtgccagacgatcagagagaactattagagcgaatttattggaactcacttctatttgagagtgatcttctagctgagctggatcttccacattctggtgttgttcagttcgaggaaaatgttggtctgcctggaggtttccaaggtgaagaatcagaggccgtaggtcgcgacgatctgtggtacttcttggccgagatcgcacttagaagacttctcaatcgagttagtcaactcatctactctaaggactcgatggcttctacaaccagtctcgaacctgttgtagctgaactcgattttcaacttacacagtggtacgagagtctgccgatacccttacaatttccgttcacccggacgactctgccagaccccatacagactgtactgcgtttgcgcttctttgcgtgccggactattatatatcggccctatatactcgcagtattggataatgaacaagcagtcctcgaccctgcggttcgcgatagttgtcataaatgcctcgaggcttcaatccgccaattagagcacatatccgcacatcatgccggacacatgccttacctatggcaaggcgcactctctattgtgtctcagacgttacttgtgatgggcgccacaatgtcgccttcactttctaacattttattgacgttagtgccgcatagagaggcattggatcaaatcatcaatgatgtgatcatggacatcgaaaggatggctgtgctagcgccgagccttagcttagcagccgagattatcaaggaagccgaagtacgtcggcggactttcttgaacagctgataagtgcatcttcttcgaaacagtccgtctctacgttccaacaaaattccgacgttaccgtggataaaagccaaccaagccgccgggtatccaaagctccgtccggcacatggctagccttcacacacaattttgaagtactctaaagtgctcatggtcccctattcacgaaagcgcccactcgtggctggatgtctccatgcggagaactcacggcatgtgcatccgtgccaatgctattatgttcggcccgtcatgtcgtcttttccaaacaacttacttcagataaccgcgctcgcaatgcgacctgcgatcgttaaatcataggggatctgatacggacgtctgtgctcccatggctgtagggaacttctgtttgcgcaggctgcgtctacgatctgccagtcacatctcgcagtgttagctctcacatcaagaccgagatggtctgcgaatgcgacgacaaccaggaacagaatatcccgcgtctcctatacctaagagaattcatctttgggttgcgccaagacaaccgaatggtagccttcaaaccggtgacagctcgtggttggcggggaaaattgctggttgaacgtggcagttaggctacacggtccgaacatccggaaaactccaacaacctcgtatccatttcctgattcagacaaattcagacctcattaaggatagttacccggatataacccgaattcgaacaaatattgtgtcaaacgcaagctctcaattacccacagcatgtacgcagtcagacggatgtgccaggagctaactcggccaaattcatgagcaagagagcggcatcaccatattgcctgcatttgcctctttatgagtcacgagctcttgcacatagatgagaacaaggaaccagaatgttcgaaacgcgaatttaatcttgaacccgaaatgtaaatcatagacgtcacgttcctctactcctaccctcctgcttttttatcttatactatatttacagtagcgtcatggcaatgacagatgtggtttctcgagcattcatgggagccgttacgtggaattgatagcacttcgttgcatatttatgagggcctaagcgccggtgggagtttggagttgtaaatcaaagcctgaaactgagtcttggatattagcgagttcttatcagaagatgaattgtccatatcattattagcttatggggagtgcagaaatactatgaacacgaatgtccctgattttcttgtcctatgaactgtgcatactgaaatcgtaaaattaggtggctccttccgagtaaaaccggcacattactgtgtcctcgcaaagattcagtttgtctgtataatttgatgtcaacttttgcttggtcgtcgtcaactctcgactaactttctagaatggaaacttaaacaggcactccggaaccccagatctgcgcaaggatcggattaggtagaaaagatgagacgacagcttccccg

SEQ ID NO: 28340 - DNA, 1260 bp, Muscodor strobelii
  misc_feature: SGI cDNA ID NO. 569723
  misc_feature: Encodes the peptide sequence at SEQ ID NO 28341
atgtggacaaatacaagagcatttttggcgacagggctgcttgggtcagcatctgcttcctttctctatgtaactagttatgcgggcaccgtgacgactctgaatctgcttcagtctagtgccaaaagaagcacagcattacttcagacagtcgatacttcgacagcgtgtggtagccagccttcgtggctggcattggactttcagaagtcatacgtctactgcttggatgaggcttggggccaaacgaacggggccgtcacttctttctacaccaacgcaaatggttcgttgtcgcccatcgctaaggcagagttaattggaggtcctgtgagcatcgctgagtttggcgttggtggcagtggtttagcgatagcttcctatgctggttctggtctcaatgttgttgctttgaccccagaaggcggtgtcgatgtcgttcaaaattttacatttgccctcgatcagcctggtcctgatccgccacaccaagctattctcgatcctacggcggcatttattctagtgccggatcttggggcagatctggttcgaatctaccaagctgatgcaggaagcctgtcattaacacccgtcgaaccgctggttgccaagccggggtcgggtcccagacacggcgttttcaagacggctcttgacaagaccttcttctacttggtctctgaacttgggtatgttatagcagtcttatacctgttcgccaagtctttctatttgcgcctctctattacgcctagcctttataccaacacgattaccgggtacgaagtattgtaccatgcgaacaaaacactgggcttctctgaattatttgtaatgggtacacacggagacaataagacgctcccagaaggtaccggcgctgctgagattcatgtttctcctgatgaaaagttcttgattgtctcgtcacggtgggaatactccatgaatattaccaacttcgatccaaataactcaaccatgatccgatccgatccaattatcaattacgctatagacaatgacacgggatctctgaagaaacttcaggaagtcccagctggcggtgcaggtccgcgccatttctctctgaacgcggacggcaatctcctagccgtgggtctacaaggagatggacgtgtggcaattatcgagcgcgacgtcaaaacaggtatgcttggtgattttgtcgcaactgctaatgtgccgggcgaagtcaatactgtcatcttctatgaagactaccacgtgaagtga

SEQ ID NO: 28341 - protein, 419 aa, Muscodor strobelii
  misc_feature: SGI Peptide ID NO. 569723
  misc_feature (2)..(414): NCBI GI: 256727485 Blast Desc: NECHADRAFT_76383 [Nectria haematococca mpVI 77-13-4]
  misc_feature (48)..(412): NCBI GI: 39952179 Blast Desc: MGG_01732 [Magnaporthe grisea 70-15] gi|145020420|gb|EDK04549.1| MGG_01732 [Magnaporthe grisea 70-15]
  misc_feature (28)..(414): NCBI GI: 46121377 Blast Desc: FG05067.1 [Gibberella zeae PH-1]
  misc_feature (16)..(418): NCBI GI: 261352282 Blast Desc: conserved [Verticillium albo-atrum VaMs.102]
  misc_feature (15)..(414): NCBI GI: 116196062 Blast Desc: CHGG_04629 [Chaetomium globosum CBS 148.51] gi|88180542|gb|EAQ88010.1| CHGG_04629 [Chaetomium globosum CBS 148.51]
  misc_feature (22)..(415): NCBI GI: 156049353 Blast Desc: SS1G_08383 [Sclerotinia sclerotiorum 1980] gi|154692782|gb|EDN92520.1| SS1G_08383 [Sclerotinia sclerotiorum 1980]
  misc_feature (9)..(406): NCBI GI: 85106994 Blast Desc: NCU07703 [Neurospora crassa OR74A] gi|28923891|gb|EAA33053.1| [Neurospora crassa OR74A]
  misc_feature (22)..(414): NCBI GI: 154303669 Blast Desc: BC1G_08719 [Botryotinia fuckeliana B05.10] gi|150854513|gb|EDN29705.1| BC1G_08719 [Botryotinia fuckeliana B05.10]
  misc_feature (7)..(415): NCBI GI: 156034529 Blast Desc: SS1G_13199 [Sclerotinia sclerotiorum 1980] gi|154698603|gb|EDN98341.1| SS1G_13199 [Sclerotinia sclerotiorum 1980]
  misc_feature (16)..(414): NCBI GI: 145231194 Blast Desc: An01g14730 [Aspergillus niger] gi|134055991|emb|CAK44170.1| protein product [Aspergillus niger]
  misc_feature (34)..(394): SWISSPROT Homolog: EC 3.1.1.31 6-phosphogluconolactonase
MWTNTRAFLATGLLGSASASFLYVTSYAGTVTTLNLLQSSAKRSTALLQTVDTSTACGSQPSWLALDFQKSYVYCLDEAWGQTNGAVTSFYTNANGSLSPIAKAELIGGPVSIAEFGVGGSGLAIASYAGSGLNVVALTPEGGVDVVQNFTFALDQPGPDPPHQAILDPTAAFILVPDLGADLVRIYQADAGSLSLTPVEPLVAKPGSGPRHGVFKTALDKTFFYLVSELGYVIAVLYLFAKSFYLRLSITPSLYTNTITGYEVLYHANKTLGFSELFVMGTHGDNKTLPEGTGAAEIHVSPDEKFLIVSSRWEYSMNITNFDPNNSTMIRSDPIINYAIDNDTGSLKKLQEVPAGGAGPRHFSLNADGNLLAVGLQGDGRVAIIERDVKTGMLGDFVATANVPGEVNTVIFYEDYHVK

SEQ ID NO: 28342 - DNA, 2626 bp, Muscodor strobelii
  misc_feature: SGI EST ID NO. CUFF.66942.0
  misc_feature: Variant of the nucleotide sequence at SEQ ID NO 28340
catagagccaaatgatatgactaatcaagtctgccggcttggacactagaaagaacagcttggaggtctatgcatacgtccatagcatgaccagtgtcaaaatcgaatcagaagtctcgaccgccaggctcacttatttcggtgcttatctaaatacatgcaaaacgcgtgcattcgaactcctctcacatacaatttccttttaatacagtaatggcagtaggtggtaatacagttgattcttacggcgatgcgccaggtaacaaaaaaaacagctcacacactatctaatattcaggtgcagtgcaatatacgcacctgatggcggcggtccatcaaattagctgacggaaaacaacaggctcactacaacaacaatcccaacaaatttcacatgctgctgccagaccacagctatcaacgccgtcgaatttctacgccagaccagcgccgtcgaaaccttgatatcgaaatgtgctcaatcgctgccttgtcagctcgaccgccaggctccaaccaaattctgaaagacatttatcagatcttatttgtgatcctgcattacttcatgcagctcctccgcacagacaagtacttcacatgtcaggcggactttagcgaccatcgaccctgtcgctcatgcgatcgccatgttgccttctcgaaacttggcatcagccttggtcatgccgtcgatcctcagcaatgtcgcttattgttctttcatcggttcgtcagttgggaagtatacggcggcgaggttgccaagaagggcgagcctcaaatgagcaagtcgtatccttgttcaggtgtcgcgcaagaatggttctgcattatatccgtgccgtgtctactccacatttctccgcatcaattgctacctaccttgatcttgtgaagtggtggtggaaatgaggggtcacgtaactccagtcataaccccaaaccaggtacctgaagctatctcttgcatgcacacaccccagacccgttgagatgtctcggctgtcaccatggatcttggagaatctcataggtagagtgtacaattgcaaatctcgcgactcgcactggaacggttccgaggccgtgcgcaaaggcatgtccgtagaaatatcgcttcatggtatctcgactggcaaatttaccatagtttcgcattaaatctagcaaatttcaaatcaataggtcacaaattccagctgctcgaaaggtacacgcagtggccatcacttgaaggtccccgcatgaaccagtttagtgtgaaagggcctaacctagactgcggataatttcggtccaaaggctgatcctccggataaattcgaatccacgcagtaggacagagctaacaccgttaggtttagtccaccaacccagtgtcctagacgcagtttatgccaccaagccttttacttttgtctattcggaagggaaaaatcgatgttccaaatgaaaaacgggatcaagatgttatgatgagaagtcatggcgatgggttaaaactggtggtttggttgacgtcgtggatagtcgtgtttctcgttcttttgaactaccatatctcgcaattttcagaatcatctggtaagatgtggacaaatacaagagcatttttggcgacagggctgcttgggtcagcatctgcttcctttctctatgtaactagttatgcgggcaccgtgacgactctgaatctgcttcagtctagtgccaaaagaagcacagcattacttcagacagtcgatacttcgacagcgtgtggtagccagccttcgtggctggcattggactttcagaagtcatacgtctactgcttggatgaggcttggggccaaacgaacggggccgtcacttctttctacaccaacgcaaatggttcgttgtcgcccatcgctaaggcagagttaattggaggtcctgtgagcatcgctgagtttggcgttggtggcagtggtttagcgatagcttcctatgctggttctggtctcaatgttgttgctttgaccccagaaggcggtgtcgatgtcgttcaaaattttacatttgccctcgatcagcctggtcctgatccggtaaggcaggatgtacctcatggtatgtacaaggttcctcgtgccctatcacgattattgtttctttagctgacttacacattttgatagtgagtagtctccttcgcctccagagaggtccaatgtgcctcgactcgaaatcctgtatttacaccatgtagccacaccaagctattctcgatcctacggcggcatttattctagtgccggatcttggggcagatctggttcgaatctaccaagctgatgcaggaagcctgtcattaacacccgtcgaaccgctggttgccaagccggggtcgggtcccagacacggcgttttcaagacggctcttgacaagaccttcttctacttggtctctgaacttgggtatgttatagcagtcttatacctgttcgccaagtctttctatttgcgcctctctattacgcctagcctttatagtgcgtcgaagctaatcatacgagatagtatattcttctctttatttggaatggactctatccactttgaatatatccggacacgtgtatgactactaacatgacat

SEQ ID NO: 28343 - DNA, 1983 bp, Muscodor strobelii
  misc_feature: SGI cDNA ID NO. 569724
  misc_feature: Reduced expression when VOC is produced
  misc_feature: Encodes the peptide sequence at SEQ ID NO 28344
atggatgattcagatctcgacaatgccttccacgatgaagcccccataggcgaggactccatactatcgccgcggggtatcgaggccttcacgcgaaaggtcaccaccacggcgagccatctggccggtcatgccgtcgatcctgccggttcccattatcacaacgccatgagccaggtgcacaagcagctagcgaggcccgtcatccagcggcggatgttctccatggcgaagacgacccctaccgatctcgtccgctccaagttctctacctccgagatacaatcacgtgcgctttcttacctatccgatgacatgctccaaaacatccccgaagacgaaaatgcctactctctattccagggcttcaaggccacctttccagagctgaccgaggaaggcaagcgtcacaaacgaaaggtctcccgagggaggaagatgatcgaggagactcccagcacgcctacaagtccacaccatctccacaaactgaagaaggagaaatcttcgctgatgcacgagctcgagatgctcgggatacggaagaacatggccagtagcgagattcgcgagatcgatatcaagatcgcaaacttgagcggcatgcggaggattattctcgagaggctggccggtctagagcaggaagaggctttattagaacatgacatcatggacatggaaggccgcatagacgacgcacaagtgttagtcgcagaagctgaacagatagctgccgccgccactgtcactccgacgagatcagatgaagatgatctgatcacagatcaggacatggatgagttcatgtcgaaatctgtgtacgagaagcttccctcggcatcaagcacaccaacacgtccgaagcgacacaagacgatccggcgcaaatccatgcccattctacatgagcacttcgaccccggaaccaatatcagggaaatcaaggctcatcaagatgagatcactggtctggatttcgatgtcccatttggtactatggtcacggcttctctcgatgacacggtcaaggtttgggatctcaatgcgggtcggtgcatagggtctttggagggccacaccgcctctgtacgcgccctacaggttgaggataatatcctcgtcacgggctcggcagatgcgactatccggctctgggatctgagcaaagcacactacgacccgcaaggtagcagattcggtcaagataacgaggaagacgacggtatagcctttgaaaatccggatgatcatgcggtcgaccctccggaaggcagtatggcggattgtccactgtttgtgttacagtctcatatggatgagattactgcgctgcacttacgcggcgacgtactcgtctctggctcgtctgacaaaacactgcggcaatgggatcttgaaaaggggcggtgtattcagacgctcgatgtcatgtgggcagctgcacaggcctcggcgtctctcggcacgggcgagggaacttggagacaaactactcgtcaagctcccggagctgcggattttgtgggcgcattgcaggtgttcgagtcagctctagcttgtggaactgcggatggcatggttaggctgtgggatttgagaagcggacaggttcatcggagtcttgtgggacacactggacccgttacttgcctgcagtttgatgatgtacatctggtgactggaagtttggaccggagtattcggatatgggatctccgcacaggctcgattttcgacgcctatgcatatgacaaccccgtgacaagcatgatgtttgacgagcgacggattgctagcgcggcaggcgaggatgtggtcaagatttatgacaagatggagtcgaggcaatggagctgcggcgctggtatcacggaggctgaagagggaaggagtccggcaattgtggaccatgtgaggatgagagatgggtatgtggtcgagggcaggagagatgggagggttggtgtttgggcttgctga

SEQ ID NO: 28344 - protein, 660 aa, Muscodor strobelii
  misc_feature: SGI Peptide ID NO. 569724
  misc_feature (536)..(572): Pfam Id: PF00400 Pfam Desc: WD domain, G-beta repeat
  misc_feature (351)..(387): Pfam Id: PF00400 Pfam Desc: WD domain, G-beta repeat
  misc_feature (309)..(347): Pfam Id: PF00400 Pfam Desc: WD domain, G-beta repeat
  misc_feature (429)..(465): Pfam Id: PF00400 Pfam Desc: WD domain, G-beta repeat
  misc_feature (12)..(660): NCBI GI: 119478477 Blast Desc: WD-repeat protein, [Neosartorya fischeri NRRL 181] gi|187609672|sp|A1DDL6.1|MDV1_NEOFI RecName: Full=Mitochondrial division protein 1 gi|119407524|gb|EAW17473.1| WD-repeat protein,
  misc_feature (12)..(660): NCBI GI: 187609701 Blast Desc: WD-repeat protein, [Neosartorya fischeri NRRL 181] gi|187609672|sp|A1DDL6.1|MDV1_NEOFI RecName: Full=Mitochondrial division protein 1 gi|119407524|gb|EAW17473.1| WD-repeat protein,
  misc_feature (6)..(660): NCBI GI: 187609704 Blast Desc: WD-repeat protein, [Neosartorya fischeri NRRL 181] gi|187609672|sp|A1DDL6.1|MDV1_NEOFI RecName: Full=Mitochondrial division protein 1 gi|119407524|gb|EAW17473.1| WD-repeat protein,
  misc_feature (22)..(660): NCBI GI: 242819001 Blast Desc: WD repeat-containing protein [Talaromyces stipitatus ATCC 10500] gi|218713690|gb|EED13114.1| WD repeat-containing protein [Talaromyces stipitatus ATCC 10500]
  misc_feature (12)..(660): NCBI GI: 145249768 Blast Desc: An14g06000 [Aspergillus niger] gi|134081906|emb|CAK42161.1| protein product [Aspergillus niger]
  misc_feature (19)..(660): NCBI GI: 169621496 Blast Desc: SNOG_13958 [Phaeosphaeria nodorum SN15] gi|187609695|sp|Q0U2T3.2|MDV1_PHANO RecName: Full=Mitochondrial division protein 1 gi|160704271|gb|EAT78583.2| SNOG_13958 nodorum
  misc_feature (12)..(660): NCBI GI: 121713962 Blast Desc: WD repeat-containing protein [Aspergillus clavatus NRRL 1] gi|187609658|sp|A1CBP8.1|MDV1_ASPCL RecName: Full=Mitochondrial division protein 1 gi|119402745|gb|EAW13166.1|
  misc_feature (6)..(660): NCBI GI: 187609703 Blast Desc: WD repeat-containing protein [Aspergillus clavatus NRRL 1] gi|187609658|sp|A1CBP8.1|MDV1_ASPCL RecName: Full=Mitochondrial division protein 1 gi|119402745|gb|EAW13166.1|
  misc_feature (50)..(660): NCBI GI: 115399570 Blast Desc: conserved [Aspergillus terreus NIH2624] gi|114192257|gb|EAU33957.1| conserved [Aspergillus terreus NIH2624]
  misc_feature (15)..(660): NCBI GI: 169779371 Blast Desc: [Aspergillus oryzae RIB40] gi|83772889|dbj|BAE63017.1| protein product [Aspergillus oryzae]
  misc_feature: Useful for introducing or modulating the production of volatile compounds
MDDSDLDNAFHDEAPIGEDSILSPRGIEAFTRKVTTTASHLAGHAVDPAGSHYHNAMSQVHKQLARPVIQRRMFSMAKTTPTDLVRSKFSTSEIQSRALSYLSDDMLQNIPEDENAYSLFQGFKATFPELTEEGKRHKRKVSRGRKMIEETPSTPTSPHHLHKLKKEKSSLMHELEMLGIRKNMASSEIREIDIKIANLSGMRRIILERLAGLEQEEALLEHDIMDMEGRIDDAQVLVAEAEQIAAAATVTPTRSDEDDLITDQDMDEFMSKSVYEKLPSASSTPTRPKRHKTIRRKSMPILHEHFDPGTNIREIKAHQDEITGLDFDVPFGTMVTASLDDTVKVWDLNAGRCIGSLEGHTASVRALQVEDNILVTGSADATIRLWDLSKAHYDPQGSRFGQDNEEDDGIAFENPDDHAVDPPEGSMADCPLFVLQSHMDEITALHLRGDVLVSGSSDKTLRQWDLEKGRCIQTLDVMWAAAQASASLGTGEGTWRQTTRQAPGAADFVGALQVFESALACGTADGMVRLWDLRSGQVHRSLVGHTGPVTCLQFDDVHLVTGSLDRSIRIWDLRTGSIFDAYAYDNPVTSMMFDERRIASAAGEDVVKIYDKMESRQWSCGAGITEAEEGRSPAIVDHVRMRDGYVVEGRRDGRVGVWAC

SEQ ID NO: 28345 - DNA, 2465 bp, Muscodor strobelii
  misc_feature: SGI EST ID NO. CUFF.66948.0
  misc_feature: Variant of the nucleotide sequence at SEQ ID NO 28343
atgatcattggcaagctagtcctggcttggttccaatggcaatgcgcttctgcgatcgcgtggctcgtgcaactccactgtgctctgaactctatgaatcgattcactggtaacaattgcttggtgtctcatgagttgcagaacactttcatcctccgtgcttaattgtaatcccgatacttataattcatgaacaggaagccaaaagttgagagataagacagttctgtgggacctgcattacttgcgatacccgcgcttgcacaaatagatgagagatccagtcacgattgatttggatcacgcattcggtcacgaggttccaagatctcgctcctgccaccaacccaaaccaaagtcttcgaccgcgcatggatgattcagatctcgacaatgccttccacgatgaagcccccataggcgaggactccatactatcgccgcggggtatcgaggccttcacgcgaaaggtcaccaccacggcgagccatctggccggtcatgccgtcgatcctgccggttcccattatcacaacgccatgagccaggtgcacaagcagctagcgaggcccgtcatccagcggcggatgttctccatggcgaagacgacccctaccgatctcgtccgctccaagttctctacctccgagatacaatcacgtgcgctttcttacctatccgatgacatgctccaaaacatccccgaagacgaaaatgcctactctctattccagggcttcaaggccacctttccagagctgaccgaggaaggcaagcgtcacaaacgaaaggtctcccgagggaggaagatgatcgaggagactcccagcacgcctacaagtccacaccatctccacaaactgaagaaggagaaatcttcgctgatgcacgagctcgagatgctcgggatacggaagaacatggccagtagcgagattcgcgagatcgatatcaagatcgcaaacttgagcggcatgcggaggattattctcgagaggctggccggtctagagcaggaagaggctttattagaacatgacatcatggacatggaaggccgcatagacgacgcacaagtgttagtcgcagaagctgaacagatagctgccgccgccactgtcactccgacgagatcagatgaagatgatctgatcacagatcaggacatggatgagttcatgtcgaaatctgtgtacgagaagcttccctcggcatcaagcacaccaacacgtccgaagcgacacaagacgatccggcgcaaatccatgcccattctacatgagcacttcgaccccggaaccaatatcagggaaatcaaggctcatcaagatgagatcactggtctggatttcgatgtcccatttggtactatggtcacggcttctctcgatgacacggtcaaggtttgggatctcaatgcgggtcggtgcatagggtctttggagggccacaccgcctctgtacgcgccctacaggttgaggataatatcctcgtcacgggctcggcagatgcgactatccggctctgggatctgagcaaagcacactacgacccgcaaggtagcagattcggtcaagataacgaggaagacgacggtatagcctttgaaaatccggatgatcatgcggtcgaccctccggaaggcagtatggcggattgtccactgtttgtgttacagtctcatatggatgagattactgcgctgcacttacgcggcgacgtactcgtctctggctcgtctgacaaaacactgcggcaatgggatcttgaaaaggggcggtgtattcagacgctcgatgtcatgtgggcagctgcacaggcctcggcgtctctcggcacgggcgagggaacttggagacaaactactcgtcaagctcccggagctgcggattttgtgggcgcattgcaggtgttcgagtcagctctagcttgtggaactgcggatggcatggttaggctgtgggatttgagaagcggacaggttcatcggagtcttgtgggacacactggacccgttacttgcctgcagtttgatgatgtacatctggtgactggaagtttggaccggagtattcggatatgggatctccgcacaggctcgattttcgacgcctatgcatatgacaaccccgtgacaagcatgatgtttgacgagcgacggattgctagcgcggcaggcgaggatgtggtcaagatttatgacaagatggagtcgaggcaatggagctgcggcgctggtatcacggaggctgaagagggaaggagtccggcaattgtggaccatgtgaggatgagagatgggtatgtggtcgagggcaggagagatgggagggttggtgtttgggcttgctgaccagtagattggacgagagactaagagtgagaattgtatatttgtatattgtgggtgtctcgataggagccaatgaacatatatttcgaagagagtctggaattataggat

SEQ ID NO: 28346 - DNA, 798 bp, Muscodor strobelii
  misc_feature: SGI cDNA ID NO. 569725
  misc_feature: Encodes the peptide sequence at SEQ ID NO 28347
atggataccataattgacctcaaggatgcctccaaggcccttgatctgtccaacattcgcttccaactcatccgccttgaggataccattaccttccatttgatagaacgagttcagttccccctcaacaagaccatctatcaacctggcgctgtcgaccttggtgacgcctccgatggcaagctcagcttcatggactggtatctgcgcgagcaggagaagctccagtccctgatccgccgctacgaggctcccgacgagtaccctttcttccccgaggctctgcagaagcccatcctcaagcccctcgagtaccccaagatcctgcacaccaacaacgtcaacgtcaacgaccaaatcaagaagttctacatcgaacaattcctccctaccgtatgccccgacttcggccgcgaggatcagggtgagtccaaggagaattatggctcctcggccacctgcgacatcgtctgcctccaagccctttcgcgccgcatccatttcggcaagttcgtcgccgagtccaagttccagtctgatcccgaaggctacacgcgcatgataaaggccggcgaccgccacggcattggcgagtccatcaccaacgccgccgtcgagaagcaggtcctcgcccgcctgcgcctcaaggctcagacctacggcaccgacccctccctggctaacacggagaactccggcaagattaatgttgatgccgttgtatccatgtacagggactttgtcatccctatcactaaggaggtcgaggtcgattatctcatgcagcgactcgattga

SEQ ID NO: 28347 - protein, 265 aa, Muscodor strobelii
  misc_feature: SGI Peptide ID NO. 569725
  misc_feature (1)..(265): NCBI GI: 47846873 Blast Desc: chorismate mutase [Rosellinia sp. PF1022]
  misc_feature (1)..(265): NCBI GI: 256727603 Blast Desc: NECHADRAFT_91158 [Nectria haematococca mpVI 77-13-4]
  misc_feature (1)..(265): NCBI GI: 85105491 Blast Desc: NCU07725 [Neurospora crassa OR74A] gi|28923564|gb|EAA32739.1| NCU07725 [Neurospora crassa OR74A]
  misc_feature (1)..(265): NCBI GI: 261352406 Blast Desc: chorismate mutase [Verticillium albo-atrum VaMs.102]
  misc_feature (1)..(264): NCBI GI: 121713960 Blast Desc: chorismate mutase [Aspergillus clavatus NRRL 1] gi|119402744|gb|EAW13165.1| chorismate mutase [Aspergillus clavatus NRRL 1]
  misc_feature (1)..(265): NCBI GI: 156049725 Blast Desc: SS1G_08569 [Sclerotinia sclerotiorum 1980] gi|154692968|gb|EDN92706.1| SS1G_08569 [Sclerotinia sclerotiorum 1980]
  misc_feature (1)..(264): NCBI GI: 255954223 Blast Desc: Pc21g08250 [Penicillium chrysogenum Wisconsin 54-1255] gi|211589575|emb|CAP95722.1| Pc21g08250 [Penicillium chrysogenum Wisconsin 54-1255]
  misc_feature (1)..(264): NCBI GI: 189206279 Blast Desc: chorismate mutase [Pyrenophora tritici-repentis Pt-1C-BFP] gi|187975567|gb|EDU42193.1| chorismate mutase [Pyrenophora tritici-repentis Pt-1C-BFP]
  misc_feature (1)..(264): NCBI GI: 119478479 Blast Desc: chorismate mutase [Neosartorya fischeri NRRL 181] gi|119407525|gb|EAW17474.1| chorismate mutase [Neosartorya fischeri NRRL 181]
  misc_feature (1)..(264): NCBI GI: 169779369 Blast Desc: [Aspergillus oryzae RIB40] gi|238500013|ref|XP_002381241.1| chorismate mutase [Aspergillus flavus NRRL3357] gi|83772888|dbj|BAE63016.1| protein product
  misc_feature (5)..(265): SWISSPROT Homolog: EC 5.4.99.5 Chorismate mutase
MDTIIDLKDASKALDLSNIRFQLIRLEDTITFHLIERVQFPLNKTIYQPGAVDLGDASDGKLSFMDWYLREQEKLQSLIRRYEAPDEYPFFPEALQKPILKPLEYPKILHTNNVNVNDQIKKFYIEQFLPTVCPDFGREDQGESKENYGSSATCDIVCLQALSRRIHFGKFVAESKFQSDPEGYTRMIKAGDRHGIGESITNAAVEKQVLARLRLKAQTYGTDPSLANTENSGKINVDAVVSMYRDFVIPITKEVEVDYLMQRLD

SEQ ID NO: 28348 - DNA, 2099 bp, Muscodor strobelii
  misc_feature: SGI EST ID NO. CUFF.67022.0
  misc_feature: Variant of the nucleotide sequence at SEQ ID NO 28346
caccaaaccttgaatccttccgcgacttctcaccgaggcaggtaaaagcagaagccacgaaggatacttgcaccaagcttcaacagcaactgagagatggataccataattgacctcaaggatgcctccaaggcccttgatctgtccaacattcgcttccaactcatccgccttgaggataccattaccttccatttgatagaacgagttcagttccccctcaacaagaccatctatcaacctggcgctgtcgaccttggtgacgcctccgatggcaagctcagcttcatggactggtatctgcgcgagcaggagaagctccagtccctgatccgccgctacgaggctcccgacgagtaccctttcttccccgaggctctgcagaagcccatcctcaagcccctcgagtaccccaagatcctgcacaccaacaacgtcaacgtcaacgaccaaatcaagaagttctacatcgaacaattcctccctaccgtatgccccgacttcggccgcgaggatcagggtgagtccaaggagaattatggctcctcggccacctgcgacatcgtctgcctccaagccctttcgcgccgcatccatttcggcaagttcgtcgccgagtccaagttccagtctgatcccgaaggctacacgcgcatgataaaggccggcgaccgccacggcattggcgagtccatcaccaacgccgccgtcgagaagcaggtcctcgcccgcctgcgcctcaaggctcagacctacggcaccgacccctccctggctaacacggagaactccggcaagattaatgttgatgccgttgtatccatgtacagggactttgtcatccctatcactaaggaggtcgaggtcgattatctcatgcagcgactcgattgagcgcgatgagagtggcacacataggtgcaaactcaatgcctaacttgtttctgctgagaaaggaagaatggcatggcgcaggcatggttcttaaaagagggatgggagttgcaacgaccagaagcaaggcatagcgatggaattggactcattttcttcttattctttttgttattttgatttcgatgctctcaagatggaggacttaagtactcctcgacagccttgacagcatcagagaacttgctagcttcaatcaaaatcatggagcccttgggcatgacccccatctcctgaaacgccctgcggctgtctgcgacggcgtcgtcgatcttcgtaaatgcatagctcccgtatgccgttgcgtacctctgcaatacctcgtcttcaggatggaaatagtagagcgtcgcgtcttgctttccctttttcttcttccgttcctccacgtcgagcgtagactcgatctcgtggtatgtcttggatacgatgaggtagtgtgtgaattcgtaaggctccttgtcctcgactgcgtcggcgatctcgtcgatgagcatgcggtacaggggcggtgagatctccgagggcatgttgatcaatcgctctgagagtaggaggccgacgtgctttcccgaggcgaggagctcgggtataggggcaagtgattctgtggctttagccttggcgctgaggtactcgatgagctgcgccatggccttgttctctcggtgctcttgaatattgagtgcggtgaggagagcgaagggatcggactcttctccgtctgtcttcactgtcgagccgatcgtgggttgtgagagtatgaggtctgcgagtgcagatacgtcgaatagggttgcgtcgacgtcgaagagttgccgtatcaaggacttggtgccgtggaagtcgatcttgtcgttgaaattgaaccactcaaagtcaacgttcaccatgtcgaagtcctgtaagactgtgttagtatatgcgcaaaccaaaggggcaatgtttggttccgaacctcatcgtcggagctcccgctgtcttcaaccatcttgtcggctgcttccggtgcgccgtctacttctctcgctcgctttttcgccattgtggattgatggatcgcttgcgtgagtctatgttatttcgaaatcgttgagatcgccagagtctcagaggttgtcggcgttgcgcactctagaatgtga

SEQ ID NO: 28349 - DNA, 858 bp, Muscodor strobelii
  misc_feature: SGI cDNA ID NO. 569726
  misc_feature: Reduced expression when VOC is produced
  misc_feature: Encodes the peptide sequence at SEQ ID NO 28350
atggcgaaaaagcgagcgagagaagtagacggcgcaccggaagcagccgacaagatggttgaagacagcgggagctccgacgatgaggacttcgacatggtgaacgttgactttgagtggttcaatttcaacgacaagatcgacttccacggcaccaagtccttgatacggcaactcttcgacgtcgacgcaaccctattcgacgtatctgcactcgcagacctcatactctcacaacccacgatcggctcgacagtgaagacagacggagaagagtccgatcccttcgctctcctcaccgcactcaatattcaagagcaccgagagaacaaggccatggcgcagctcatcgagtacctcagcgccaaggctaaagccacagaatcacttgcccctatacccgagctcctcgcctcgggaaagcacgtcggcctcctactctcagagcgattgatcaacatgccctcggagatctcaccgcccctgtaccgcatgctcatcgacgagatcgccgacgcagtcgaggacaaggagccttacgaattcacacactacctcatcgtatccaagacataccacgagatcgagtctacgctcgacgtggaggaacggaagaagaaaaagggaaagcaagacgcgacgctctactatttccatcctgaagacgaggtattgcagaggtacgcaacggcatacgggagctatgcatttacgaagatcgacgacgccgtcgcagacagccgcagggcgtttcaggagatgggggtcatgcccaagggctccatgattttgattgaagctagcaagttctctgatgctgtcaaggctgtcgaggagtacttaagtcctccatcttga

SEQ ID NO: 28350 - protein, 285 aa, Muscodor strobelii
  misc_feature: SGI Peptide ID NO. 569726
  misc_feature (1)..(282): NCBI GI: 46136171 Blast Desc: FG09601.1 [Gibberella zeae PH-1] gi|115311316|sp|Q4HZK7.1|BCP1_GIBZE RecName: Full=Protein BCP1
  misc_feature (1)..(285): NCBI GI: 39952133 Blast Desc: MGG_01709 [Magnaporthe grisea 70-15] gi|145020447|gb|EDK04576.1| MGG_01709 [Magnaporthe grisea 70-15]
  misc_feature (1)..(285): NCBI GI: 116195822 Blast Desc: CHGG_04509 [Chaetomium globosum CBS 148.51] gi|115311315|sp|Q2H137.1|BCP1_CHAGB RecName: Full=Protein BCP1 gi|88180422|gb|EAQ87890.1| CHGG_04509 [Chaetomium globosum CBS
  misc_feature (33)..(283): NCBI GI: 261352405 Blast Desc: BCP1 [Verticillium albo-atrum VaMs.102]
  misc_feature (3)..(284): NCBI GI: 115311313 Blast Desc: BCP1 [Verticillium albo-atrum VaMs.102]
  misc_feature (1)..(282): NCBI GI: 85105495 Blast Desc: NCU07726 [Neurospora crassa OR74A] gi|74616705|sp|Q7S8R3.1|BCP1_NEUCR RecName: Full=Protein bcp-1 gi|28923565|gb|EAA32740.1| conserved [Neurospora crassa OR74A]
  misc_feature (34)..(284): NCBI GI: 119478481 Blast Desc: NFIA_073910 [Neosartorya fischeri NRRL 181] gi|119407526|gb|EAW17475.1| conserved [Neosartorya fischeri NRRL 181]
  misc_feature (33)..(284): NCBI GI: 121713958 Blast Desc: conserved [Aspergillus clavatus NRRL 1] gi|119402743|gb|EAW13164.1| conserved [Aspergillus clavatus NRRL 1]
  misc_feature (14)..(285): NCBI GI: 238840443 Blast Desc: bcp1 [Microsporum canis CBS 113480]
  misc_feature (31)..(284): NCBI GI: 70997177 Blast Desc: conserved [Aspergillus fumigatus Af293] gi|66850978|gb|EAL91304.1| conserved [Aspergillus fumigatus Af293] gi|159126933|gb|EDP52049.1| conserved [Aspergillus A1163]
  misc_feature: Useful for introducing or modulating the production of volatile compounds
MAKKRAREVDGAPEAADKMVEDSGSSDDEDFDMVNVDFEWFNFNDKIDFHGTKSLIRQLFDVDATLFDVSALADLILSQPTIGSTVKTDGEESDPFALLTALNIQEHRENKAMAQLIEYLSAKAKATESLAPIPELLASGKHVGLLLSERLINMPSEISPPLYRMLIDEIADAVEDKEPYEFTHYLIVSKTYHEIESTLDVEERKKKKGKQDATLYYFHPEDEVLQRYATAYGSYAFTKIDDAVADSRRAFQEMGVMPKGSMILIEASKFSDAVKAVEEYLSPPS

SEQ ID NO: 28351 - DNA, 2209 bp, Muscodor strobelii
  misc_feature: SGI EST ID NO. CUFF.67023.1
  misc_feature: Variant of the nucleotide sequence at SEQ ID NO 28349
tcacattctagagtgcgcaacgccgacaacctctgagactctggcgatctcaacgatttcgaaataacatagactcacgcaagcgatccatcaatccacaatggcgaaaaagcgagcgagagaagtagacggcgcaccggaagcagccgacaagatggttgaagacagcgggagctccgacgatgaggacttcgacatggtgaacgttgactttgagtggttcaatttcaacgacaagatcgacttccacggcaccaagtccttgatacggcaactcttcgacgtcgacgcaaccctattcgacgtatctgcactcgcagacctcatactctcacaacccacgatcggctcgacagtgaagacagacggagaagagtccgatcccttcgctctcctcaccgcactcaatattcaagagcaccgagagaacaaggccatggcgcagctcatcgagtacctcagcgccaaggctaaagccacagaatcacttgcccctatacccgagctcctcgcctcgggaaagcacgtcggcctcctactctcagagcgattgatcaacatgccctcggagatctcaccgcccctgtaccgcatgctcatcgacgagatcgccgacgcagtcgaggacaaggagccttacgaattcacacactacctcatcgtatccaagacataccacgagatcgagtctacgctcgacgtggaggaacggaagaagaaaaagggaaagcaagacgcgacgctctactatttccatcctgaagacgaggtattgcagaggtacgcaacggcatacgggagctatgcatttacgaagatcgacgacgccgtcgcagacagccgcagggcgtttcaggagatgggggtcatgcccaagggctccatgattttgattgaagctagcaagttctctgatgctgtcaaggctgtcgaggagtacttaagtcctccatcttgagagcatcgaaatcaaaataacaaaaagaataagaagaaaatgagtccaattccatcgctatgccttgcttctggtcgttgcaactcccatccctcttttaagaaccatgcctgcgccatgccattcttcctttctcagcagaaacaagttaggcattgagtttgcacctatgtgtgccactctcatcgcgctcaatcgagtcgctgcatgagataatcgacctcgacctccttagtgatagggatgacaaagtccctgtacatggatacaacggcatcaacattaatcttgccggagttctccgtgttagccagggaggggtcggtgccgtaggtctgagccttgaggcgcaggcgggcgaggacctgcttctcgacggcggcgttggtgatggactcgccaatgccgtggcggtcgccggcctttatcatgcgcgtgtagccttcgggatcagactggaacttggactcggcgacgaacttgccgaaatggatgcggcgcgaaagggcttggaggcagacgatgtcgcaggtggccgaggagccataattctccttggactcaccctgatcctcgcggccgaagtcggggcatacggtagggaggaattgttcgatgtagaacttcttgatttggtcgttgacgttgacgttgttggtgtgcaggatcttggggtactcgaggggcttgaggatgggcttctgcagagcctcggggaagaaagggtactcgtcgggagcctcgtagcggcggatcagggactggagcttctcctgctcgcgcagataccagtccatgaagctgagcttgccatcggaggcgtcaccaaggtcgacagcgccaggttgatagatggtcttgttgagggggaactgaactcgttctatcaaatggaaggtaatggtatcctcaaggcggctggatcaggcgcgttgtttatgttagttatctagcgtaatttaaactactataagccgtggacggatgatggaagtgtgcaaagcgagagtgactcaagcggggcagaattgtagaggggtaaggtgtcgcaggcctaggaattgtgcacaccaggacagcttacatgagttggaagcgaatgttggacagatcaagggccttggaggcatccttgaggtcaattatggtatccatctctcagttgctgttgaagcttggtgcaagtatccttcgtggcttctgcttttacctgcctcggtgagaagtcgcggaaggattcaaggtttggtg

SEQ ID NO: 28352 - DNA, 843 bp, Muscodor strobelii
  misc_feature: SGI cDNA ID NO. 569727
  misc_feature: Reduced expression when VOC is produced
  misc_feature: Encodes the peptide sequence at SEQ ID NO 28353
atgggttaccacgcaagtcctatgtcggcgatagaagacgacgatttcgaatttgaggagacatgttttcgacacttttataagccgctatcgaacttacccacgccccccttgtctttaaatgcttcatctgtagcacaaagtcctgaagcgacgctacaaaacaatcaaattgtcaactcgcaatatctaggcccagcagctcatctcgtaaggatgctacctccaggagcttctcctttcattgcaccatctaggtctattgtccaggacatgttactccgagccaatttgtccatggacattattgctttggccgtctgtattcttgattctttagacgccaaattctccaaaacttggcgggcatcatttcccttgaagataccaggccattcaacatcgaagcgacacacgctgccacctatacccgtacgatcagaacatatcagttctgtgtcacccgaagtcgtcatcttagcatcgttgatcattgcacggaagttcgtcgacgacgtgcatcagcccacacagagtttcagtgtcgaatggggtaacagtctatggacttgcgaccaaattaattttacggagcgttgtattatggagaatctcaactaccgcatatttcccctctggaatgttgagctcatcaaggaagcgaggcacgacatcgagatggcacgccgcgagattacccaagaaagcggtgcggcgcgcgaggagggcaaaaagcaccttaaatcaatgagctcgggatatgctgtcgttggtctgggccttcaactcacccctgcagctacaccgcgcacggaaacaccggcattctttgatcaactctaa

SEQ ID NO: 28353 - protein, 280 aa, Muscodor strobelii
  misc_feature: SGI Peptide ID NO. 569727
  misc_feature (13)..(271): NCBI GI: 116196248 Blast Desc: CHGG_04722 [Chaetomium globosum CBS 148.51] gi|88180635|gb|EAQ88103.1| CHGG_04722 [Chaetomium globosum CBS 148.51]
  misc_feature (13)..(272): NCBI GI: 171690364 Blast Desc: protein product [Podospora anserina] gi|170945130|emb|CAP71241.1| protein product [Podospora anserina]
  misc_feature (20)..(272): NCBI GI: 85104811 Blast Desc: NCU08288 [Neurospora crassa OR74A] gi|28923390|gb|EAA32578.1| [Neurospora crassa OR74A]
  misc_feature (27)..(272): NCBI GI: 256727049 Blast Desc: NECHADRAFT_18350 [Nectria haematococca mpVI 77-13-4]
  misc_feature (1)..(230): NCBI GI: 261352331 Blast Desc: conserved [Verticillium albo-atrum VaMs.102]
  misc_feature (23)..(273): NCBI GI: 156034811 Blast Desc: SS1G_13341 [Sclerotinia sclerotiorum 1980] gi|154698744|gb|EDN98482.1| SS1G_13341 [Sclerotinia sclerotiorum 1980]
  misc_feature (11)..(233): NCBI GI: 145613564 Blast Desc: MGG_01534 [Magnaporthe grisea 70-15] gi|145020624|gb|EDK04753.1| MGG_01534 [Magnaporthe grisea 70-15]
  misc_feature (6)..(269): NCBI GI: 189198399 Blast Desc: conserved [Pyrenophora tritici-repentis Pt-1C-BFP] gi|187981485|gb|EDU48111.1| conserved [Pyrenophora tritici-repentis Pt-1C-BFP]
  misc_feature: Useful for introducing or modulating the production of volatile compounds
MGYHASPMSAIEDDDFEFEETCFRHFYKPLSNLPTPPLSLNASSVAQSPEATLQNNQIVNSQYLGPAAHLVRMLPPGASPFIAPSRSIVQDMLLRANLSMDIIALAVCILDSLDAKFSKTWRASFPLKIPGHSTSKRHTLPPIPVRSEHISSVSPEVVILASLIIARKFVDDVHQPTQSFSVEWGNSLWTCDQINFTERCIMENLNYRIFPLWNVELIKEARHDIEMARREITQESGAAREEGKKHLKSMSSGYAVVGLGLQLTPAATPRTETPAFFDQL

SEQ ID NO: 28354 - DNA, 1829 bp, Muscodor strobelii
  misc_feature: SGI EST ID NO. CUFF.66989.1
  misc_feature: Variant of the nucleotide sequence at SEQ ID NO 28352
cgcgactgctggcatttctacatacctcttataaggacaagcccacagccagatatgagtttttcttactccatcgttcgcgcttgacaatcaatttatgatttgtatgcacactgcattgcctcgcatcactagctttgcggatcccaaacctggccttgccctttcagcccatttatggctgctttgggcttgcagcttgcaggagctccatctcgacgcgaggtgcacgtacgaaccgtgcggtggctgctagagttgactataagtaggaccaccggcatcatcaattgccttgcatctgttccggcattatatctcgtttacgcgtacgcgttgccgtctagatccgagaattgattgtttctttttatacacattggcagagtgtggatttcggccttgcatattaatcttcggcactgtctcttcaagatagatctccagacagtctataaatcaccctatgcatctttccctccttaactaacaaatagacacaaccttcaaccgcactgcattgagctatgagaataccgttcttctctcgatcctcgttgggctttagtcataaagactcattatatcgttaaagatgggttaccacgcaagtcctatgtcggcgatagaagacgacgatttcgaatttgaggagacatgttttcgacacttttataagccgctatcgaacttacccacgccccccttgtctttaaatgcttcatctgtagcacaaagtcctgaagcgacgctacaaaacaatcaaattgtcaactcgcaatatctaggcccagcagctcatctcgtaaggatgctacctccaggagcttctcctttcattgcaccatctaggtctattgtccaggacatgttactccgagccaatttgtccatggacattattgctttggccgtctgtattcttgattctttagacgccaaattctccaaaacttggcgggcatcatttcccttgaagataccaggccattcaacatcgaagcgacacacgctgccacctatacccgtacgatcagaacatatcagttctgtgtcacccgaagtcgtcatcttagcatcgttgatcattgcacggaagttcgtcgacgacgtgcatcagcccacacagagtttcagtgtcgaatggggtaacagtctatggacttgcgaccaaattaattttacggagcgttgtattatggagaatctcaactaccgcatatttcccctctggaatgttgagctcatcaaggaagcgaggcacgacatcgagatggcacgccgcgagattacccaagaaagcggtgcggcgcgcgaggagggcaaaaagcaccttaaatcaatgagctcgggatatgctgtcgttggtctgggccttcaactcacccctgcagctacaccgcgcacggaaacaccggcattctttgatcaactctaatgaccgatatgtggtgtcattcgacagaaagcaattagttgcgtctaagggacaaagtgccatcgtgtcgggctatggtagagattagttgcgccatcgcacataatatcctctgtgtattaattaatcgaggtacatgcatctggagaccgcgtggatcgggactcggctggatctgcatttgaggaacgtggggaagaaccaaaattgcattcgtctcgggcatcggctcgaatatgatccgggccaagggaaacagggcaataaggagtcatctggtgcaggatatatggttcataaggcacagcagctgcaaggcgaaggcgtcccatatttgatctttcgtttcttagtattatacccaatataacagcgatgctttgattcctcg

SEQ ID NO: 28355 - DNA, 1368 bp, Muscodor strobelii
  misc_feature: SGI cDNA ID NO. 569728
  misc_feature: Encodes the peptide sequence at SEQ ID NO 28356
atgaatcattccatatccttggcccatgagccagatttgtcctactcgctaggtcctgtctacgccgaatccaatgaggccctcgcacaggtggccacagggctgagagccgttcttcggcgagcacagtcgatgcctcagcagcctgagctagatatggcactcgataacatagttatagacagagagggcctttatgagggtttgcaagactggccccgatctcctatacgtgccaactcaaagcgtagaagatccgtcatctcgcagaatgataagaaagcagtcgatcacgctattgatgatcagaggtctaatgatagaaaggacgcatatctcacgaaggggagctttcgacttcgaaaccgagacttgtcgaagttccgtttcccaaagccttcatcttctcaagagcctgtgtggtatgccggggatggatttacagcagcggaggcgaagccggaattttcatttcggatgacaggcaagctcagaggcaaatcattcaaaccattgcctgctctaggccaactagtcttagagcaagacaacgttcctgaacacgggcagtcgtcgatttccttcactttccagcgatcagagacttcaaaggcgctgggagccaaaacccgttgtttcgatgcagaagaagattggccaaccaagcaagccttctatgaaatcgatcaacaaagcaaaaagcgatcgaaaccaaatgtcgcacggaagcgcaccctcgtcctggacaaggaacatagccagccattacttcctcggaagaacaaacctgagatcaacccgatactaccacgcaagaggcaacgatcgcattttgagaaatttggcagacgccgacgtcgatcacgcagtgggcatgaagatactctgacactcgcatctccagacaatctatcagggttggggccattaccattgtgtaataacgatgatgccgatgatgtcacaggctatcaatacgacgaaaccgtcaacgacagaactacgggagaacaagactcagacgaggatcacacgagcagaattgaaagcagcccagacatggggaacagtagcccactatatccgtctcagagtgatgaagatgaagaattcgaagatgacgaaagcgaagtcggcgaggagatggacaccgatagcatgggtcctttgctcatcaagaatcgtcgtcttaaggacgaaaacctggccttgaaaaagctgcttcgagagcataacatatcatggcagggccattccaagcggcccgctagtcctgagccttcctcgcgggtcactaggtctcgtcgctcacacgcccaggggacgctcccgtatctgcccgttgagatccagcttctccagaaatga

SEQ ID NO: 28356 - protein, 455 aa, Muscodor strobelii
  misc_feature: SGI Peptide ID NO. 569728
MNHSISLAHEPDLSYSLGPVYAESNEALAQVATGLRAVLRRAQSMPQQPELDMALDNIVIDREGLYEGLQDWPRSPIRANSKRRRSVISQNDKKAVDHAIDDQRSNDRKDAYLTKGSFRLRNRDLSKFRFPKPSSSQEPVWYAGDGFTAAEAKPEFSFRMTGKLRGKSFKPLPALGQLVLEQDNVPEHGQSSISFTFQRSETSKALGAKTRCFDAEEDWPTKQAFYEIDQQSKKRSKPNVARKRTLVLDKEHSQPLLPRKNKPEINPILPRKRQRSHFEKFGRRRRRSRSGHEDTLTLASPDNLSGLGPLPLCNNDDADDVTGYQYDETVNDRTTGEQDSDEDHTSRIESSPDMGNSSPLYPSQSDEDEEFEDDESEVGEEMDTDSMGPLLIKNRRLKDENLALKKLLREHNISWQGHSKRPASPEPSSRVTRSRRSHAQGTLPYLPVEIQLLQK

SEQ ID NO: 28357 - DNA, 1068 bp, Muscodor strobelii
  misc_feature: SGI cDNA ID NO. 569729
  misc_feature: Reduced expression when VOC is produced
  misc_feature: Encodes the peptide sequence at SEQ ID NO 28358
atggcgccctcagcgcagtacgagctcgcgcacccacccaacgacgccatctcctccctcgtcttcgcccccgagtctccctcccgcctcctcgtatcatcgtgggacaagaacgtctacctctacgacacacaagccgagggcgccgaggacggccaacacggcgccctcatccagaccatagagcatcgcgcaccggtactagacgtatgcttcggcgccagcgacgatgaggccttcagcgctggcatggactggcaagtcctcaagctcgacctcacgaccggcgagcagacccccatgagcaagcacagtgcccctgtacggagggtggtatacagccggcagcactccctcctcgtctccgcatcgtgggacagcacactacacatacacaacccagccgacgcctctcaaaccccgctaaccatcaccctcccgggcaaaccccacgccctgtccgccagcccgtccaagctcatcgtagccatgacatcccgcctcgtccacatctacgacctcgcagccctcgcctcgggactcagcacccagaccgcgcccgaaccctggcaacagcgcgaatcgtccctcaaattcctgacccgcgccgtggccgccatgccctcggacgaaggctacgccaccagcagcatcgagggccgcgtcgccgtagagttcttcgacgcgtccgccgagtcgcaagcccgcaagtacgccttcaagtgccaccgccagaaccagaccggcgccgacgggaccgccaccgacgtcgtctaccccgtcaacgccctcgccttccaccccacgtacggaacattcgcctccggtggcggcgacacaaccgtcgcgctgtgggatgccgaggccaagcgtcggatgaaggtctaccagaagttcaccgacagcatcgctgctctcgccttctcggccgatgggagacagctggccgttggtgtctgccctgggtttgagacgggcatggaggactatagcggcgagggacggacgtccattgtgatacgcgaacttggtgaaactgaggctttgcctaagggcaaggcgaagtag

SEQ ID NO: 28358 - protein, 355 aa, Muscodor strobelii
  misc_feature: SGI Peptide ID NO. 569729
  misc_feature (260)..(286): Pfam Id: PF00400 Pfam Desc: WD domain, G-beta repeat
  misc_feature (14)..(43): Pfam Id: PF00400 Pfam Desc: WD domain, G-beta repeat
  misc_feature (1)..(353): NCBI GI: 261353084 Blast Desc: mitotic checkpoint protein BUB3 [Verticillium albo-atrum VaMs.102]
  misc_feature (1)..(352): NCBI GI: 116195814 Blast Desc: CHGG_04505 [Chaetomium globosum CBS 148.51] gi|88180418|gb|EAQ87886.1| CHGG_04505 [Chaetomium globosum CBS 148.51]
  misc_feature (1)..(352): NCBI GI: 171690808 Blast Desc: protein product [Podospora anserina] gi|170945352|emb|CAP71464.1| protein product [Podospora anserina]
  misc_feature (1)..(352): NCBI GI: 85112981 Blast Desc: NCU09744 [Neurospora crassa OR74A] gi|28926228|gb|EAA35210.1| NCU09744 [Neurospora crassa OR74A]
  misc_feature (1)..(352): NCBI GI: 46123683 Blast Desc: FG06219.1 [Gibberella zeae PH-1]
  misc_feature (1)..(352): NCBI GI: 256726858 Blast Desc: [Nectria haematococca mpVI 77-13-4]
  misc_feature (4)..(352): NCBI GI: 226278532 Blast Desc: mitotic checkpoint protein BUB3 [Paracoccidioides brasiliensis Pb01]
  misc_feature (4)..(352): NCBI GI: 255956559 Blast Desc: Pc21g20450 [Penicillium chrysogenum Wisconsin 54-1255] gi|211590743|emb|CAP96942.1| Pc21g20450 [Penicillium chrysogenum Wisconsin 54-1255]
  misc_feature (4)..(353): NCBI GI: 239614823 Blast Desc: nuclear pore complex subunit [Ajellomyces dermatitidis ER-3]
  misc_feature (4)..(353): NCBI GI: 261190608 Blast Desc: nuclear pore complex subunit [Ajellomyces dermatitidis SLH14081] gi|239591136|gb|EEQ73717.1| nuclear pore complex subunit [Ajellomyces dermatitidis SLH14081]
  misc_feature: Useful for introducing or modulating the production of volatile compounds
MAPSAQYELAHPPNDAISSLVFAPESPSRLLVSSWDKNVYLYDTQAEGAEDGQHGALIQTIEHRAPVLDVCFGASDDEAFSAGMDWQVLKLDLTTGEQTPMSKHSAPVRRVVYSRQHSLLVSASWDSTLHIHNPADASQTPLTITLPGKPHALSASPSKLIVAMTSRLVHIYDLAALASGLSTQTAPEPWQQRESSLKFLTRAVAAMPSDEGYATSSIEGRVAVEFFDASAESQARKYAFKCHRQNQTGADGTATDVVYPVNALAFHPTYGTFASGGGDTTVALWDAEAKRRMKVYQKFTDSIAALAFSADGRQLAVGVCPGFETGMEDYSGEGRTSIVIRELGETEALPKGKAK

SEQ ID NO: 28359 - DNA, 1670 bp, Muscodor strobelii
  misc_feature: SGI EST ID NO. CUFF.66986.0
  misc_feature: Variant of the nucleotide sequence at SEQ ID NO 28357
ggcttatcgataaatacatcaccccaaggaggacggatgctatgcgacaggcagccgacaatgacaacgaaggtgatcatgaacgttaggaaaaagtaaccaagtcaattctagtggcggaactgaatcttaagcctccgatttcaaccgcgtattatccaattgaactcgatcccattacactactagatcagcactcctacttcttccaaaatcaacagcctagcctcatatcacgagctgcttgcgacacgacgacatggcgccctcagcgcagtacgagctcgcgcacccacccaacgacgccatctcctccctcgtcttcgcccccgagtctccctcccgcctcctcgtatcatcgtgggacaagaacgtctacctctacgacacacaagccgagggcgccgaggacggccaacacggcgccctcatccagaccatagagcatcgcgcaccggtactagacgtatgcttcggcgccagcgacgatgaggccttcagcgctggcatggactggcaagtcctcaagctcgacctcacgaccggcgagcagacccccatgagcaagcacagtgcccctgtacggagggtggtatacagccggcagcactccctcctcgtctccgcatcgtgggacagcacactacacatacacaacccagccgacgcctctcaaaccccgctaaccatcaccctcccgggcaaaccccacgccctgtccgccagcccgtccaagctcatcgtagccatgacatcccgcctcgtccacatctacgacctcgcagccctcgcctcgggactcagcacccagaccgcgcccgaaccctggcaacagcgcgaatcgtccctcaaattcctgacccgcgccgtggccgccatgccctcggacgaaggctacgccaccagcagcatcgagggccgcgtcgccgtagagttcttcgacgcgtccgccgagtcgcaagcccgcaagtacgccttcaagtgccaccgccagaaccagaccggcgccgacgggaccgccaccgacgtcgtctaccccgtcaacgccctcgccttccaccccacgtacggaacattcgcctccggtggcggcgacacaaccgtcgcgctgtgggatgccgaggccaagcgtcggatgaaggtctaccagaagttcaccgacagcatcgctgctctcgccttctcggccgatgggagacagctggccgttggtgtctgccctgggtttgagacgggcatggaggactatagcggcgagggacggacgtccattgtgatacgcgaacttggtgaaactgaggctttgcctaagggcaaggcgaagtagggtctttgttgtgagaaggaagggagaagaacagagggaaaaactgatatccaaagagtaccaagatgtatgcgtctcgatctgttgtgcggcaagagacggagctggggagatacagataccaacgaactgagaaaccttataaatcgatatccggaatgcccactcgtgtgaagtgtcgttctgaaagtcttggatgtttaatttgactatatttacgaacgcccttgcgttaaaccagagaggaaatattgatatttctattgggcagctagcgacatcatctcctttaagtacaacataactgatctcagacatataatgaaaacaaccttgtttggaa

SEQ ID NO: 28360 - DNA, 1071 bp, Muscodor strobelii
  misc_feature: SGI cDNA ID NO. 569730
  misc_feature: Encodes the peptide sequence at SEQ ID NO 28361
atgccttttgcgcagctggtggtcggcagccccggcgccggcaagagcacatattgcgacggcatgcatcagttcatgagtgccatcggacgcgagtgttctgtcgtgaacctggaccctgccaacgacgagacgagttacccgtgcgctctggacatccgcgacttggtcactctggaggagatcatgtccgacgaccagctgggccccaacggcggcatcctctatgcatttgaagagctcgagcacaacatggagtggttagagaaaggtctaaaggatctcgaggaatcgtatgttctattcgactgccccggccaggtcgagctctacactcaccacaattcacttcgtaatatcttctttaagctacagaagatgggctatcggcttgtggttgtccacctctcggatagtttctgcctcacacagccctcgctgtatatttctaacctcctcctcactctccgtgccatgctgcagatggaccttccccacatcaacgtcctcaccaaaatcgacaagatctcctcctacgaccctctccccttcaacctcgacttcttcaccgaggtgcaagatctgggttacctgctgccgtacctgcaacaagagtcacccgccatgcgaagcgacaagttcagccgtctgaaccaagcggttgccgacctggtcgagagttttgctctcgtccggttcgaggtcctcgctgtcgagaataagaagagcatgacacagcttttgcgcgtgattgatcgagctggtggctacgttttcggcggcgcggagggcgcgaacgataccgtatggcaactagcaatgcgaaacgagacttctatgatggaggtgcaggatatccaggagcgatgggtcgacgccaaagacgagtacgacgctgcggagcaaaaggactgggaggatcacgtcaagatgcagatagatagtgccggtgcagacacaggcactgccacccccgatctaatcccagacgagggcgaggacgacgagttcgatggcatgccgcctccgataggcgacagtggggtcaaagtgattcggcggcaacggtga

SEQ ID NO: 28361 - protein, 356 aa, Muscodor strobelii
  misc_feature: SGI Peptide ID NO. 569730
  misc_feature (7)..(257): Pfam Id: PF03029 Pfam Desc: Conserved ATP binding protein
  misc_feature (1)..(310): NCBI GI: 145603338 Blast Desc: conserved [Magnaporthe grisea 70-15] gi|145011593|gb|EDJ96249.1| conserved [Magnaporthe grisea 70-15]
  misc_feature (1)..(354): NCBI GI: 261359701 Blast Desc: ATP-binding domain 1 family member B [Verticillium albo-atrum VaMs.102]
  misc_feature (1)..(354): NCBI GI: 46121841 Blast Desc: FG05298.1 [Gibberella zeae PH-1]
  misc_feature (1)..(298): NCBI GI: 116195812 Blast Desc: CHGG_04504 [Chaetomium globosum CBS 148.51] gi|88180417|gb|EAQ87885.1| CHGG_04504 [Chaetomium globosum CBS 148.51]
  misc_feature (1)..(353): NCBI GI: 156049603 Blast Desc: SS1G_08508 [Sclerotinia sclerotiorum 1980] gi|154692907|gb|EDN92645.1| SS1G_08508 [Sclerotinia sclerotiorum 1980]
  misc_feature (1)..(354): NCBI GI: 121699804 Blast Desc: ATP binding protein, [Aspergillus clavatus NRRL 1] gi|119396309|gb|EAW06741.1| ATP binding protein, [Aspergillus clavatus NRRL 1]
  misc_feature (1)..(356): NCBI GI: 171690810 Blast Desc: protein product [Podospora anserina] gi|170945353|emb|CAP71465.1| protein product [Podospora anserina]
  misc_feature (1)..(354): NCBI GI: 70992205 Blast Desc: ATP binding protein [Aspergillus fumigatus Af293] gi|66848584|gb|EAL88913.1| ATP binding protein, [Aspergillus fumigatus Af293]
  misc_feature (1)..(354): NCBI GI: 159124519 Blast Desc: ATP binding protein, [Aspergillus fumigatus A1163]
  misc_feature (1)..(354): NCBI GI: 119471593 Blast Desc: ATP binding protein, [Neosartorya fischeri NRRL 181] gi|119406340|gb|EAW16291.1| ATP binding protein, [Neosartorya fischeri NRRL 181]
MPFAQLVVGSPGAGKSTYCDGMHQFMSAIGRECSVVNLDPANDETSYPCALDIRDLVTLEEIMSDDQLGPNGGILYAFEELEHNMEWLEKGLKDLEESYVLFDCPGQVELYTHHNSLRNIFFKLQKMGYRLVVVHLSDSFCLTQPSLYISNLLLTLRAMLQMDLPHINVLTKIDKISSYDPLPFNLDFFTEVQDLGYLLPYLQQESPAMRSDKFSRLNQAVADLVESFALVRFEVLAVENKKSMTQLLRVIDRAGGYVFGGAEGANDTVWQLAMRNETSMMEVQDIQERWVDAKDEYDAAEQKDWEDHVKMQIDSAGADTGTATPDLIPDEGEDDEFDGMPPPIGDSGVKVIRRQR

SEQ ID NO: 28362 - DNA, 2129 bp, Muscodor strobelii
  misc_feature: SGI EST ID NO. CUFF.67026.0
  misc_feature: Variant of the nucleotide sequence at SEQ ID NO 28360
ggtaggcactcatctcaggcagaagcccagcgtcaactgtgtcacggagttgacactagtcgcgatgccttttgcgcagctggtggtcggcagccccggcgccggcaagagcacatattgcgacggcatgcatcagttcatgagtgccatcggacgcgagtgttctgtcgtgaacctggaccctgccaacgacgagacgagttacccgtgcgctctggacatccgcgacttggtcactctggaggagatcatgtccgacgaccagctgggccccaacggcggcatcctctatgcatttgaagagctcgagcacaacatggagtggttagagaaaggtctaaaggatctcgaggaatcgtatgttctattcgactgccccggccaggtcgagctctacactcaccacaattcacttcgtaatatcttctttaagctacagaagatgggctatcgggtaagctgtgcccccattgttaaaggcgacccaggacaaagggagactgaccatgccaaagcttgtggttgtccacctctcggatagtttctgcctcacacagccctcgctgtatatttctaacctcctcctcactctccgtgccatgctgcagatggaccttccccacatcaacgtcctcaccaaaatcgacaagatctcctcctacgaccctctccccttcaacctcgacttcttcaccgaggtgcaagatctgggttacctgctgccgtacctgcaacaagagtcacccgccatgcgaagcgacaagttcagccgtctgaaccaagcggttgccgacctggtcgagagttttgctctcgtccggttcgaggtcctcgctgtcgagaataagaagagcatgacacagcttttgcgcgtgattgatcgagctggtggctacgttttcggcggcgcggagggcgcgaacgataccgtatggcaactagcaatgcgaaacgagacttctatgatggaggtgcaggatatccaggagcgatgggtcgacgccaaagacgagtacgacgctgcggagcaaaaggactgggaggatcacgtcaagatgcagatagatagtgccggtgcagacacaggcactgccacccccgatctaatcccagacgagggcgaggacgacgagttcgatggcatgccgcctccgataggcgacagtggggtcaaagtgattcggcggcaacggtgacctctcaaccttcactgacttggtccatttccatatcactatcctcgaccagattcggtgtctccacgcccaatgcaccgcgtctggatctagtcgtggtggtaaagatgtcgccgaaggtgtcggatggattatcaggtttctcgcccttagcctcgaaaatgaggtttctggcgcgacggattgcctcctcctcgacttttcgtatggtaccactgatcttgactactcggaatacgcatggcttgccgttcctgacgggcacggagtccatgaaagtcagagctgtccagacaaatcggtaggatccgcgtgcgattcgcaagatcacggtcgacgttgttggggagaggtatttcactgcaggtaagggttagcgtgagcagaggtgggcagacaagggggacgtaagttgccttaccctgaagattaccgccctcaagtgcgcccgccccatagtcgccgaacagcgtagagacttgggaaatgatcgcacgacggaggagttggggggtcaaatcaggcgtcgtgggctgattgagaagcacaacatctggcagatggggacggctccccaattcagaggggtacaggatgttgacaaggaggtagcgctccttgattctgaccatgatgggcgatgctgctgcgaatcaaactcgtcagtctagtcccgccagtagcgatgggagaggatgcttcagaaataatgtcgtaggcatcacatttcaatagacatcaactgaagtagctactgattcgagaagacggttagtgaggtgaaatgattggcgtttttccatcattgcgaccgcgcttctgagagctttatcttatcggctaggtggaaatcaaaataagtggcatccgaatatcagaatgtaaacagtttcgagtagaatagcggataatgttttaatagccatctagctt

SEQ ID NO: 28363 - DNA, 567 bp, Muscodor strobelii
  misc_feature: SGI cDNA ID NO. 569731
  misc_feature: Encodes the peptide sequence at SEQ ID NO 28364
atggtcagaatcaaggagcgctacctccttgtcaacatcctgtacccctctgaattggggagccgtccccatctgccagatgttgtgcttctcaatcagcccacgacgcctgatttgaccccccaactcctccgtcgtgcgatcatttcccaagtctctacgctgttcggcgactatggggcgggcgcacttgagggcggtaatcttcaggtgaaatacctctccccaacaacgtcgaccgtgatcttgcgaatcgcacgcggatcctaccgatttgtctggacagctctgactttcatggactccgtgcccgtcaggaacggcaagccatgcgtattccgagtagtcaagatcagtggtaccatacgaaaagtcgaggaggaggcaatccgtcgcgccagaaacctcattttcgaggctaagggcgagaaacctgataatccatccgacaccttcggcgacatctttaccaccacgactagatccagacgcggtgcattgggcgtggagacaccgaatctggtcgaggatagtgatatggaaatggaccaagtcagtgaaggttga

SEQ ID NO: 28364 - protein, 188 aa, Muscodor strobelii
  misc_feature: SGI Peptide ID NO. 569731
  misc_feature (7)..(132): Pfam Id: PF01900 Pfam Desc: Rpp14/Pop5 family
  misc_feature (1)..(155): NCBI GI: 256720920 Blast Desc: NECHADRAFT_96720 [Nectria haematococca mpVI 77-13-4]
  misc_feature (1)..(156): NCBI GI: 171690812 Blast Desc: protein product [Podospora anserina] gi|170945354|emb|CAP71466.1| protein product [Podospora anserina]
  misc_feature (1)..(187): NCBI GI: 261359700 Blast Desc: Rpp14 family protein [Verticillium albo-atrum VaMs.102]
  misc_feature (1)..(142): NCBI GI: 121699806 Blast Desc: Rpp14 family family [Aspergillus clavatus NRRL 1] gi|119396310|gb|EAW06742.1| Rpp14 family family [Aspergillus clavatus NRRL 1]
  misc_feature (1)..(142): NCBI GI: 238490540 Blast Desc: conserved [Aspergillus flavus NRRL3357] gi|220696920|gb|EED53261.1| conserved [Aspergillus flavus NRRL3357]
  misc_feature (1)..(147): NCBI GI: 212530262 Blast Desc: conserved [Penicillium marneffei ATCC 18224] gi|210074686|gb|EEA28773.1| conserved [Penicillium marneffei ATCC 18224]
  misc_feature (1)..(169): NCBI GI: 258572694 Blast Desc: [Uncinocarpus reesii 1704] gi|237905379|gb|EEP79780.1| [Uncinocarpus reesii 1704]
  misc_feature (1)..(169): NCBI GI: 240108846 Blast Desc: Rpp14 family protein [Coccidioides posadasii C735 delta SOWgp]
  misc_feature (1)..(184): NCBI GI: 169610730 Blast Desc: SNOG_08472 [Phaeosphaeria nodorum SN15] gi|111062520|gb|EAT83640.1| SNOG_08472 [Phaeosphaeria nodorum SN15]
  misc_feature (1)..(157): NCBI GI: 238840402 Blast Desc: Rpp14 family protein [Microsporum canis CBS 113480]
  misc_feature (1)..(137): SWISSPROT Homolog: EC 3.1.26.5 Ribonuclease P
MVRIKERYLLVNILYPSELGSRPHLPDVVLLNQPTTPDLTPQLLRRAIISQVSTLFGDYGAGALEGGNLQVKYLSPTTSTVILRIARGSYRFVWTALTFMDSVPVRNGKPCVFRVVKISGTIRKVEEEAIRRARNLIFEAKGEKPDNPSDTFGDIFTTTTRSRRGALGVETPNLVEDSDMEMDQVSEG

SEQ ID NO: 28365 - DNA, 2150 bp, Muscodor strobelii
  misc_feature: SGI EST ID NO. CUFF.67027.1
  misc_feature: Variant of the nucleotide sequence at SEQ ID NO 28363
aagctagatggctattaaaacattatccgctattctactcgaaactgtttacattctgatattcggatgccacttattttgatttccacctagccgataagataaagctctcagaagcgcggtcgcaatgatggaaaaacgccaatcatttcacctcactaaccgtcttctcgaatcagtagctacttcagttgatgtctattgaaatgtgatgcctacgacattatttctgaagcatcctctcccatcgctactggcgggactagactgacgagtttgattcgcagcagcatcgcccatcatggtcagaatcaaggagcgctacctccttgtcaacatcctgtacccctctgaattggggagccgtccccatctgccagatgttgtgcttctcaatcagcccacgacgcctgatttgaccccccaactcctccgtcgtgcgatcatttcccaagtctctacgctgttcggcgactatggggcgggcgcacttgagggcggtaatcttcaggtgaaatacctctccccaacaacgtcgaccgtgatcttgcgaatcgcacgcggatcctaccgatttgtctggacagctctgactttcatggactccgtgcccgtcaggaacggcaagccatgcgtattccgagtagtcaagatcagtggtaccatacgaaaagtcgaggaggaggcaatccgtcgcgccagaaacctcattttcgaggctaagggcgagaaacctgataatccatccgacaccttcggcgacatctttaccaccacgactagatccagacgcggtgcattgggcgtggagacaccgaatctggtcgaggatagtgatatggaaatggaccaagtcagtgaaggttgagaggtcaccgttgccgccgaatcactttgaccccactgtcgcctatcggaggcggcatgccatcgaactcgtcgtcctcgccctcgtctgggattagatcgggggtggcagtgcctgtgtctgcaccggcactatctatctgcatcttgacgtgatcctcccagtccttttgctccgcagcgtcgtactcgtctttggcgtcgacccatcgctcctggatatcctgcacctccatcatagaagtctcgtttcgcattgctagttgccatacggtatcgttcgcgccctccgcgccgccgaaaacgtagccaccagctcgatcaatcacgcgcaaaagctgtgtcatgctcttcttattctcgacagcgaggacctcgaaccggacgagagcaaaactctcgaccaggtcggcaaccgcttggttcagacggctgaacttgtcgcttcgcatggcgggtgactcttgttgcaggtacggcagcaggtaacccagatcttgcacctcggtgaagaagtcgaggttgaaggggagagggtcgtaggaggagatcttgtcgattttggtgaggacgttgatgtggggaaggtccatctgcagcatggcacggagagtgaggaggaggttagaaatatacagcgagggctgtgtgaggcagaaactatccgagaggtggacaaccacaagctttggcatggtcagtctccctttgtcctgggtcgcctttaacaatgggggcacagcttacccgatagcccatcttctgtagcttaaagaagatattacgaagtgaattgtggtgagtgtagagctcgacctggccggggcagtcgaatagaacatacgattcctcgagatcctttagacctttctctaaccactccatgttgtgctcgagctcttcaaatgcatagaggatgccgccgttggggcccagctggtcgtcggacatgatctcctccagagtgaccaagtcgcggatgtccagagcgcacgggtaactcgtctcgtcgttggcagggtccaggttcacgacagaacactcgcgtccgatggcactcatgaactgatgcactaaatacgtgacttacatgagcatgcatccatacagtcttctcacctgatgccggagagagtgaactgggagttagcttactgccgtcgcaatatgtgctcttgccggcgccggggctgccgaccaccagctgcgcaaaaggcatcgcgactagtgtcaactccgtgacacagttgacgctgggcttctgcctgagatgagtgcctacc

SEQ ID NO: 28366 - DNA, 1320 bp, Muscodor strobelii
  misc_feature: SGI cDNA ID NO. 569732
  misc_feature: Encodes the peptide sequence at SEQ ID NO 28367
atggcccccgaaacttctgtttctgaacttgcaaagttcatccaagaaaagacgcagctggtagaaaatggcgtgaggggccagcccggcgatgacttttccttgaaatttagtggaaagcccgcacaggcacaactgactccagagcttgaaactgcgcggaatgaggttatcgaagctatggacgagcttcgagcccgtctccttcagccttttgcttacgccgcctctatctttctgcctgtggctcctattagtgttgtatgccactctctgtacacattcaaaatcacaaacgaggttccgctcgcccctagccaagctattacatacgacgagcttgccagaaagtgtaacatgccgtttgatgatctgcgccgtgtcgtccaaactgctatctcttaccgcatttttgaagaggtagagcctgatgtttcagtgaaacacaacgctgtgtctgctatgttctcagttattcctggagcaagagatatccttgggctctttgccgaagagcaaatgctgggagccagcaatttcgtcgaaagcattcagcgcttccctggcagtggtgagcctggccattcctcggctatgattacggaacgtgccaagagagggctgtcaaacgacagtattgaggatccttcaaagggcttgtttgatctagttgctgacgacgaggctcgtgtgactcgttatcgaaatgctatgggcatgtcgacgagggcccctggatattcggcttcgtacttcttgaatacggtgccatggaatgatgcccagagatgccctaaaacgatcgtggatattggcggtgctggcggcgactttgtcaaacagatactgcagaagtttccgaccgtcgaaaaagcaaccgtgttggatctgcctgaggtcgttgccatcgctgagacacctaaggagttggaaggacgtcttgagttctctgcgtacaacttcctcacacaacctgtgactcacgaagcggacgcctatgtgattcgacatatcttccacgactggagcgatgactacgccgtcaagatcgtgaagaacattgtgcccaagatgaagaacggcagccgaatctggatttgcgaggccgtcgttcccgaactaggtgccaagagccacgttacagatcagcgaaagagaggtgccgatatcctcatgaagattgcctataacggcaaagagcgaagtagacgcgggtgggcagatgtctttgagcgagcagataaaagattccgcattagcagcattgtgcaacctgagggtgcgcaagacgcagtcattgatgtcgttttcgaggcttga

SEQ ID NO: 28367 - protein, 439 aa, Muscodor strobelii
  misc_feature: SGI Peptide ID NO. 569732
  misc_feature (142)..(411): Pfam Id: PF00891 Pfam Desc: O-methyltransferase
  misc_feature (266)..(411): Pfam Id: PF00891 Pfam Desc: O-methyltransferase
  misc_feature (1)..(438): NCBI GI: 169613869 Blast Desc: SNOG_10068 [Phaeosphaeria nodorum SN15] gi|111061283|gb|EAT82403.1| SNOG_10068 [Phaeosphaeria nodorum SN15]
  misc_feature (6)..(434): NCBI GI: 238507580 Blast Desc: O-methyltransferase, [Aspergillus flavus NRRL3357] gi|220688510|gb|EED44862.1| O-methyltransferase, [Aspergillus flavus NRRL3357]
  misc_feature (41)..(438): NCBI GI: 212536596 Blast Desc: O-methyltransferase, [Penicillium marneffei ATCC 18224] gi|210070853|gb|EEA24943.1| O-methyltransferase, [Penicillium marneffei ATCC 18224]
  misc_feature (6)..(434): NCBI GI: 242813653 Blast Desc: hydroxyindole O-methyltransferase, [Talaromyces stipitatus ATCC 10500] gi|218714548|gb|EED13971.1| hydroxyindole O-methyltransferase, [Talaromyces stipitatus ATCC 10500]
  misc_feature (92)..(434): NCBI GI: 242813658 Blast Desc: hydroxyindole O-methyltransferase, [Talaromyces stipitatus ATCC 10500] gi|218714549|gb|EED13972.1| hydroxyindole O-methyltransferase, [Talaromyces stipitatus ATCC 10500]
  misc_feature (1)..(437): NCBI GI: 154292573 Blast Desc: BC1G_14810 [Botryotinia fuckeliana B05.10] gi|150845891|gb|EDN21084.1| BC1G_14810 [Botryotinia fuckeliana B05.10]
  misc_feature (3)..(427): NCBI GI: 145246714 Blast Desc: An12g05370 [Aspergillus niger] gi|134080327|emb|CAK46249.1| protein product [Aspergillus niger]
  misc_feature (2)..(429): NCBI GI: 116192635 Blast Desc: CHGG_06035 [Chaetomium globosum CBS 148.51] gi|88181948|gb|EAQ89416.1| CHGG_06035 [Chaetomium globosum CBS 148.51]
  misc_feature (7)..(417): NCBI GI: 212545252 Blast Desc: O-methyltransferase, [Penicillium marneffei ATCC 18224] gi|210065749|gb|EEA19843.1| O-methyltransferase, [Penicillium marneffei ATCC 18224]
  misc_feature (83)..(435): NCBI GI: 212537911 Blast Desc: O-methyltransferase, [Penicillium marneffei ATCC 18224] gi|210068853|gb|EEA22944.1| O-methyltransferase, [Penicillium marneffei ATCC 18224]
  misc_feature (110)..(429): SWISSPROT Homolog: EC 2.1.1.110 Sterigmatocystin 8-O-methyltransferase
MAPETSVSELAKFIQEKTQLVENGVRGQPGDDFSLKFSGKPAQAQLTPELETARNEVIEAMDELRARLLQPFAYAASIFLPVAPISVVCHSLYTFKITNEVPLAPSQAITYDELARKCNMPFDDLRRVVQTAISYRIFEEVEPDVSVKHNAVSAMFSVIPGARDILGLFAEEQMLGASNFVESIQRFPGSGEPGHSSAMITERAKRGLSNDSIEDPSKGLFDLVADDEARVTRYRNAMGMSTRAPGYSASYFLNTVPWNDAQRCPKTIVDIGGAGGDFVKQILQKFPTVEKATVLDLPEVVAIAETPKELEGRLEFSAYNFLTQPVTHEADAYVIRHIFHDWSDDYAVKIVKNIVPKMKNGSRIWICEAVVPELGAKSHVTDQRKRGADILMKIAYNGKERSRRGWADVFERADKRFRISSIVQPEGAQDAVIDVVFEA

SEQ ID NO: 28368 - DNA, 1695 bp, Muscodor strobelii
  misc_feature: SGI EST ID NO. CUFF.67016.0
  misc_feature: Variant of the nucleotide sequence at SEQ ID NO 28366
caccacacgactcttgaaaagactccgaagctaccaaaatggcccccgaaacttctgtttctgaacttgcaaagttcatccaagaaaagacgcagctggtagaaaatggcgtgaggggccagcccggcgatgacttttccttgaaatttagtggaaagcccgcacaggcacaactgactccagagcttgaaactgcgcggaatgaggttatcgaagctatggacgagcttcgagcccgtctccttcagccttttgcttacgccgcctctatctttctgcctgtggtacgttcttcttgaaaagattcgaggatcattttgcgcttaccatgaattaggctcctattagtgttgtatgccactctctgtacacattcaaaatcacaaacgaggttccgctcgcccctagccaagctattacatacgacgagcttgccagaaagtgtaacatgccgtttgatgatctgcgccgtgtcgtccaaactgctatctcttaccgcatttttgaagaggtagagcctgatgtttcagtgaaacacaacgctgtgtctgctatgttctcagttattcctggagcaagagatatccttgggctctttgccgaagagcaaatgctgggagccagcaatttcgtcgaaagcattcagcgcttccctggcagtggtgagcctggccattcctcggctatgattacggaacgtgccaagagagggctgtcaaacgacagtattgaggatccttcaaagggcttgtttgatctagttgctgacgacgaggctcgtgtgactcgttatcgaaatgctatgggcatgtcgacgagggcccctggatattcggcttcgtacttcttgaatacggtgccatggaatgatgcccagagatgccctaaaacgatcgtggatattggcggtgctggcggcgactttgtcaaacagatactgcagaagtttccgaccgtcgaaaaagcaaccgtgttggatctgcctgaggtcgttgccatcgctgagacacctaaggagttggaaggacgtcttgagttctctgcgtacaacttcctcacacaacctgtgactcacgaagcggacgcctatgtgattcgacatatcttccacgactggagcgatgactacgccgtcaagatcgtgaagaacattgtgcccaagatgaagaacggcagccgaatctggatttgcgaggccgtcgttcccgaactaggtgccaagagccacgttacagatcagcgaaagagaggtgccgatatcctcatgaagattgcctataacggcaaagagcgaagtagacgcgggtgggcagatgtctttgagcgagcagataaaagattccgcattagcagcattgtgcaacctgagggtgcgcaagacgcagtcattgatgtcgttttcgaggcttgaacttggagagaacttaaatgaaaagcattgagaccagaatctgattcaacactcattctgctctataccaggtagatcagatctcacctctagcttgtattctagattgtattatagatgacccaattaaccgagtttctgttcgaatagatcttgtgagtgacattcatgctgcgcaagacggcggggggatagcatgtattctatcgatataatacctcaatttcacatcggaatcgagttgaaatgagtcagattcgtggatgtagtttgcattgtcaggg

SEQ ID NO: 28369 - DNA, 1074 bp, Muscodor strobelii
  misc_feature: SGI cDNA ID NO. 569733
  misc_feature: Encodes the peptide sequence at SEQ ID NO 28370
atggcagaccctctgagggtggccatcctgatagtctcaaccactgcagacagggatccatcgacggatgcctcagaagctattctgcgcgctgtcttcgaacaagaaggcgatggtttttggagagttttcgacacgaaaattgtcagcgatgagccggaccgtatcaaaaagcaaatcgaagagtggtgtgaaggggttgaccaagactatgctaacctcatcgtaactaccggtggaacgggtttcgccgtaacagaccatactcctgagacagtctcagaaatcatagataaaccagctccaggtcttgttcatgggatgctggctgcgtccataagcgtcacaccctttgctatgatgtctcgcccagtagcgggtgttagaaagcattcggtaatcattacgctaccgggttcaccaaaaggtgcgaaagagaatctgcaggctgtcttgaagacactaccccacgcttgtctgcaggccgctggccacgattcaagaaagttacacgctggaggtgtgaagaagctcgaagaggatgctggaatcggcgcgagtacgccaaaaagtcactctcacgctcaaagccattcccacggacatagtcacgatcatagtcacggtcacgatcacaagcataaccacggtcatggccacggaggcttagttagacatacaaatcccagcactaatcctatgtccaacgacccgagccttggaccaagcaggaggaacagagagtcaccttaccctatgctctcagtcgaagatgcactgcaaaagatcaaagataacacgcccttccgtgaggtcgtggtcacaaaagtcgacacctcactgactggccacgtgcttgctgatgatgtttcagcgcgagagaatgtccctgcattcagagcaagcatagtagacggatatgccgtcgtggtgcccaaggatgggaatatgaaaggcatttttcccgtggtggccatatcccatgcagcccctggagaggagcaggttttgaaaaaggggagattgcccggattacaactggagcaccgcttccacgtggtgccacctccgtaa

SEQ ID NO: 28370 - protein, 357 aa, Muscodor strobelii
  misc_feature: SGI Peptide ID NO. 569733
  misc_feature (8)..(157): Pfam Id: PF00994 Pfam Desc: molybdopterin binding domain
  misc_feature (253)..(309): Pfam Id: PF03453 Pfam Desc: MoeA N-terminal region (domain I and II)
  misc_feature (4)..(342): NCBI GI: 261352239 Blast Desc: gephyrin [Verticillium albo-atrum VaMs.102]
  misc_feature (5)..(342): NCBI GI: 164422762 Blast Desc: NCU09746 [Neurospora crassa OR74A] gi|157069810|gb|EAA35212.2| NCU09746 [Neurospora crassa OR74A]
  misc_feature (5)..(342): NCBI GI: 171690786 Blast Desc: protein product [Podospora anserina] gi|170945341|emb|CAP71453.1| protein product [Podospora anserina]
  misc_feature (1)..(342): NCBI GI: 116195808 Blast Desc: CHGG_04502 [Chaetomium globosum CBS 148.51] gi|88180415|gb|EAQ87883.1| CHGG_04502 [Chaetomium globosum CBS 148.51]
  misc_feature (4)..(342): NCBI GI: 256720720 Blast Desc: [Nectria haematococca mpVI 77-13-4]
  misc_feature (5)..(342): NCBI GI: 154303579 Blast Desc: BC1G_08674 [Botryotinia fuckeliana B05.10] gi|150854468|gb|EDN29660.1| BC1G_08674 [Botryotinia fuckeliana B05.10]
  misc_feature (4)..(342): NCBI GI: 46121843 Blast Desc: FG05299.1 [Gibberella zeae PH-1]
  misc_feature (2)..(329): NCBI GI: 225558552 Blast Desc: molybdenum cofactor biosynthesis protein [Ajellomyces capsulatus G186AR]
  misc_feature (1)..(332): NCBI GI: 115388187 Blast Desc: ATEG_02421 [Aspergillus terreus NIH2624] gi|114195683|gb|EAU37383.1| ATEG_02421 [Aspergillus terreus NIH2624]
  misc_feature (1)..(329): NCBI GI: 239614014 Blast Desc: molybdenum cofactor biosynthesis protein [Ajellomyces dermatitidis ER-3]
MADPLRVAILIVSTTADRDPSTDASEAILRAVFEQEGDGFWRVFDTKIVSDEPDRIKKQIEEWCEGVDQDYANLIVTTGGTGFAVTDHTPETVSEIIDKPAPGLVHGMLAASISVTPFAMMSRPVAGVRKHSVIITLPGSPKGAKENLQAVLKTLPHACLQAAGHDSRKLHAGGVKKLEEDAGIGASTPKSHSHAQSHSHGHSHDHSHGHDHKHNHGHGHGGLVRHTNPSTNPMSNDPSLGPSRRNRESPYPMLSVEDALQKIKDNTPFREVVVTKVDTSLTGHVLADDVSARENVPAFRASIVDGYAVVVPKDGNMKGIFPVVAISHAAPGEEQVLKKGRLPGLQLEHRFHVVPPP

SEQ ID NO: 28371 - DNA, 1867 bp, Muscodor strobelii
  misc_feature: SGI EST ID NO. CUFF.67009.0
  misc_feature: Variant of the nucleotide sequence at SEQ ID NO 28369
accagctccaggtcttgttcatgggatgctggctgcgtccataagcgtcacaccctttgctatgatgtctcgcccagtagcgggtgttagaaagcattcggtaatcattacgctaccgggttcaccaaaaggtgcgaaagagaatctgcaggctgtcttgaagacactaccccacgcttgtctgcaggccgctggccacgattcaagaaagttacacgctggaggtgtgaagaagctcgaagaggatgctggaatcggcgcgagtacgccaaaaagtcactctcacgctcaaagccattcccacggacatagtcacgatcatagtcacggtcacgatcacaagcataaccacggtcatggccacggaggcttagttagacatacaaatcccagcactaatcctatgtccaacgacccgagccttggaccaagcaggaggaacagagagtcaccttaccctatgctctcagtcgaagatgcactgcaaaagatcaaagataacacgcccttccgtgaggtcgtggtcacaaaagtcgacacctcactgactggccacgtgcttgctgatgatgtttcagcgcgagagaatgtccctgcattcagagcaagcatagtagacggatatgccgtcgtggtgcccaaggatgggaatatgaaaggcatttttcccgtggtggccatatcccatgcagcccctggagaggagcaggttttgaaaaaggggagattgcccggattacaactggagcaccgcttccacgtggtgccacctccgtaatcatggtcgaggacacggtactgaaaacgatgacagatgacgggaaagaagaaaaagaaattgagattctagctgacggtgtaaaagagggcgagaacatccgagaaatcggcagcgatatacagaaaggctctgttgtcttaagccgaggagaacagatatcagctgttggcggtgagattggtctcctcgctgccgtaggcgtcggagaagtcgaaacgtatcgcaagccggtcgtaggcgtgctatcgacaggcgacgagatcgtggagcacgatcgacccggtgctctacgtttgggcgaggtccgcgatactaatcgcatcactttgatgtcagcagcaaaagagcaaggcttcgaagtcgttgacctcggtatcgctaccgataagcctggtactttggaacaaacactacgagatgctttccgccgcgtcgacgtcatcattacctctggcggtgtttcaatgggcgaactcgatcttcttaaaccaactatcgaacgggcgctcggtgggacgatacactttggtcgcgtcgccatgaaacccggcaagccaagcacgtttgcaaccgtccctgtgaaggacaacgcaggggaccgtgtctcgaagttgattttctcattacctgggaatcccgcttctgcgctcgtcacattccacttattcgtgctgcctgcgctgcatcagatggctggaatttctccgccaggactaacgaagatccccgtgcacctgggccacgatttcacgctcgataaggctcgacctgagtatcatcgtgctatcgtcattgttggcagtgatggcaagttgacggctacaagcaccggcggacagcgcagctcgaaggttggaagtttgaggggtgcgaattgtttgctttgtttgccgagtggtaaggagccgctgaaagcgggtgctcaggttgatgcgctgttgatgggtaacgtgaggtttgagatgtagtatcagtttggaacttctacacagtcttaatcaacgttgtctgaaccacaattttataccttaacttggtagaacaaggctaccagccaggccatgaacaaaataagtgatacaccca

SEQ ID NO: 28372 - DNA, 942 bp, Muscodor strobelii
  misc_feature: SGI cDNA ID NO. 569734
  misc_feature: Encodes the peptide sequence at SEQ ID NO 28373
atgacagatgacgggaaagaagaaaaagaaattgagattctagctgacggtgtaaaagagggcgagaacatccgagaaatcggcagcgatatacagaaaggctctgttgtcttaagccgaggagaacagatatcagctgttggcggtgagattggtctcctcgctgccgtaggcgtcggagaagtcgaaacgtatcgcaagccggtcgtaggcgtgctatcgacaggcgacgagatcgtggagcacgatcgacccggtgctctacgtttgggcgaggtccgcgatactaatcgcatcactttgatgtcagcagcaaaagagcaaggcttcgaagtcgttgacctcggtatcgctaccgataagcctggtactttggaacaaacactacgagatgctttccgccgcgtcgacgtcatcattacctctggcggtgtttcaatgggcgaactcgatcttcttaaaccaactatcgaacgggcgctcggtgggacgatacactttggtcgcgtcgccatgaaacccggcaagccaagcacgtttgcaaccgtccctgtgaaggacaacgcaggggaccgtgtctcgaagttgattttctcattacctgggaatcccgcttctgcgctcgtcacattccacttattcgtgctgcctgcgctgcatcagatggctggaatttctccgccaggactaacgaagatccccgtgcacctgggccacgatttcacgctcgataaggctcgacctgagtatcatcgtgctatcgtcattgttggcagtgatggcaagttgacggctacaagcaccggcggacagcgcagctcgaaggttggaagtttgaggggtgcgaattgtttgctttgtttgccgagtggtaaggagccgctgaaagcgggtgctcaggttgatgcgctgttgatgggtaacgtgaggtttgagatgtag

SEQ ID NO: 28373 - protein, 313 aa, Muscodor strobelii
  misc_feature: SGI Peptide ID NO. 569734
  misc_feature (71)..(221): Pfam Id: PF00994 Pfam Desc: molybdopterin binding domain
  misc_feature (234)..(307): Pfam Id: PF03454 Pfam Desc: MoeA C-terminal region (domain IV)
  misc_feature (7)..(58): Pfam Id: PF03453 Pfam Desc: MoeA N-terminal region (domain I and II)
  misc_feature (13)..(313): NCBI GI: 164422762 Blast Desc: NCU09746 [Neurospora crassa OR74A] gi|157069810|gb|EAA35212.2| NCU09746 [Neurospora crassa OR74A]
  misc_feature (7)..(310): NCBI GI: 116195808 Blast Desc: CHGG_04502 [Chaetomium globosum CBS 148.51] gi|88180415|gb|EAQ87883.1| CHGG_04502 [Chaetomium globosum CBS 148.51]
  misc_feature (1)..(310): NCBI GI: 256720720 Blast Desc: [Nectria haematococca mpVI 77-13-4]
  misc_feature (2)..(310): NCBI GI: 145603340 Blast Desc: MGG_06109 [Magnaporthe grisea 70-15] gi|145011594|gb|EDJ96250.1| MGG_06109 [Magnaporthe grisea 70-15]
  misc_feature (1)..(312): NCBI GI: 156049601 Blast Desc: SS1G_08507 [Sclerotinia sclerotiorum 1980] gi|154692906|gb|EDN92644.1| SS1G_08507 [Sclerotinia sclerotiorum 1980]
  misc_feature (1)..(312): NCBI GI: 154303579 Blast Desc: BC1G_08674 [Botryotinia fuckeliana B05.10] gi|150854468|gb|EDN29660.1| BC1G_08674 [Botryotinia fuckeliana B05.10]
  misc_feature (13)..(310): NCBI GI: 46121843 Blast Desc: FG05299.1 [Gibberella zeae PH-1]
  misc_feature (1)..(309): NCBI GI: 189205951 Blast Desc: gephyrin [Pyrenophora tritici-repentis Pt-1C-BFP] gi|187975403|gb|EDU42029.1| gephyrin [Pyrenophora tritici-repentis Pt-1C-BFP]
  misc_feature (2)..(300): NCBI GI: 169611208 Blast Desc: SNOG_08712 [Phaeosphaeria nodorum SN15] gi|160702246|gb|EAT83880.2| SNOG_08712 [Phaeosphaeria nodorum SN15]
  misc_feature (14)..(313): NCBI GI: 171690786 Blast Desc: protein product [Podospora anserina] gi|170945341|emb|CAP71453.1| protein product [Podospora anserina]
MTDDGKEEKEIEILADGVKEGENIREIGSDIQKGSVVLSRGEQISAVGGEIGLLAAVGVGEVETYRKPVVGVLSTGDEIVEHDRPGALRLGEVRDTNRITLMSAAKEQGFEVVDLGIATDKPGTLEQTLRDAFRRVDVIITSGGVSMGELDLLKPTIERALGGTIHFGRVAMKPGKPSTFATVPVKDNAGDRVSKLIFSLPGNPASALVTFHLFVLPALHQMAGISPPGLTKIPVHLGHDFTLDKARPEYHRAIVIVGSDGKLTATSTGGQRSSKVGSLRGANCLLCLPSGKEPLKAGAQVDALLMGNVRFEM

SEQ ID NO: 28374 - DNA, 1867 bp, Muscodor strobelii; identical to SEQ ID NO: 28371
  misc_feature: SGI EST ID NO. CUFF.67009.0
  misc_feature: Variant of the nucleotide sequence at SEQ ID NO 28372

SEQ ID NO: 28375 - DNA, 969 bp, Muscodor strobelii
  misc_feature: SGI cDNA ID NO. 569735
  misc_feature: Encodes the peptide sequence at SEQ ID NO 28376
atggtcgaggacacggtactgaaaacgatgacagatgacgggaaagaagaaaaagaaattgagattctagctgacggtgtaaaagagggcgagaacatccgagaaatcggcagcgatatacagaaaggctctgttgtcttaagccgaggagaacagatatcagctgttggcggtgagattggtctcctcgctgccgtaggcgtcggagaagtcgaaacgtatcgcaagccggtcgtaggcgtgctatcgacaggcgacgagatcgtggagcacgatcgacccggtgctctacgtttgggcgaggtccgcgatactaatcgcatcactttgatgtcagcagcaaaagagcaaggcttcgaagtcgttgacctcggtatcgctaccgataagcctggtactttggaacaaacactacgagatgctttccgccgcgtcgacgtcatcattacctctggcggtgtttcaatgggcgaactcgatcttcttaaaccaactatcgaacgggcgctcggtgggacgatacactttggtcgcgtcgccatgaaacccggcaagccaagcacgtttgcaaccgtccctgtgaaggacaacgcaggggaccgtgtctcgaagttgattttctcattacctgggaatcccgcttctgcgctcgtcacattccacttattcgtgctgcctgcgctgcatcagatggctggaatttctccgccaggactaacgaagatccccgtgcacctgggccacgatttcacgctcgataaggctcgacctgagtatcatcgtgctatcgtcattgttggcagtgatggcaagttgacggctacaagcaccggcggacagcgcagctcgaaggttggaagtttgaggggtgcgaattgtttgctttgtttgccgagtggtaaggagccgctgaaagcgggtgctcaggttgatgcgctgttgatgggtaacgtgaggtttgagatgtag

SEQ ID NO: 28376 - protein, 322 aa, Muscodor strobelii
  misc_feature: SGI Peptide ID NO. 569735
  misc_feature (80)..(230): Pfam Id: PF00994 Pfam Desc: molybdopterin binding domain
  misc_feature (243)..(316): Pfam Id: PF03454 Pfam Desc: MoeA C-terminal region (domain IV)
  misc_feature (1)..(67): Pfam Id: PF03453 Pfam Desc: MoeA N-terminal region (domain I and II)
  misc_feature (1)..(322): NCBI GI: 164422762 Blast Desc: NCU09746 [Neurospora crassa OR74A] gi|157069810|gb|EAA35212.2| NCU09746 [Neurospora crassa OR74A]
  misc_feature (1)..(319): NCBI GI: 116195808 Blast Desc: CHGG_04502 [Chaetomium globosum CBS 148.51] gi|88180415|gb|EAQ87883.1| CHGG_04502 [Chaetomium globosum CBS 148.51]
  misc_feature (1)..(319): NCBI GI: 145603340 Blast Desc: MGG_06109 [Magnaporthe grisea 70-15] gi|145011594|gb|EDJ96250.1| MGG_06109 [Magnaporthe grisea 70-15]
  misc_feature (1)..(321): NCBI GI: 156049601 Blast Desc: SS1G_08507 [Sclerotinia sclerotiorum 1980] gi|154692906|gb|EDN92644.1| SS1G_08507 [Sclerotinia sclerotiorum 1980]
  misc_feature (1)..(321): NCBI GI: 154303579 Blast Desc: BC1G_08674 [Botryotinia fuckeliana B05.10] gi|150854468|gb|EDN29660.1| BC1G_08674 [Botryotinia fuckeliana B05.10]
  misc_feature (1)..(319): NCBI GI: 46121843 Blast Desc: FG05299.1 [Gibberella zeae PH-1]
  misc_feature (1)..(318): NCBI GI: 189205951 Blast Desc: gephyrin [Pyrenophora tritici-repentis Pt-1C-BFP] gi|187975403|gb|EDU42029.1| gephyrin [Pyrenophora tritici-repentis Pt-1C-BFP]
  misc_feature (1)..(309): NCBI GI: 169611208 Blast Desc: SNOG_08712 [Phaeosphaeria nodorum SN15] gi|160702246|gb|EAT83880.2| SNOG_08712 [Phaeosphaeria nodorum SN15]
  misc_feature (1)..(322): NCBI GI: 171690786 Blast Desc: protein product [Podospora anserina] gi|170945341|emb|CAP71453.1| protein product [Podospora anserina]
  misc_feature (1)..(321): NCBI GI: 145251175 Blast Desc: An15g05720 [Aspergillus niger] gi|61696876|gb|AAX53111.1| molybdenum cofactor biosynthesis protein [Aspergillus niger] gi|134082631|emb|CAK42525.1| protein
MVEDTVLKTMTDDGKEEKEIEILADGVKEGENIREIGSDIQKGSVVLSRGEQISAVGGEIGLLAAVGVGEVETYRKPVVGVLSTGDEIVEHDRPGALRLGEVRDTNRITLMSAAKEQGFEVVDLGIATDKPGTLEQTLRDAFRRVDVIITSGGVSMGELDLLKPTIERALGGTIHFGRVAMKPGKPSTFATVPVKDNAGDRVSKLIFSLPGNPASALVTFHLFVLPALHQMAGISPPGLTKIPVHLGHDFTLDKARPEYHRAIVIVGSDGKLTATSTGGQRSSKVGSLRGANCLLCLPSGKEPLKAGAQVDALLMGNVRFEM

SEQ ID NO: 28377 - DNA, 1867 bp, Muscodor strobelii; identical to SEQ ID NO: 28371
  misc_feature: SGI EST ID NO. CUFF.67009.0
  misc_feature: Variant of the nucleotide sequence at SEQ ID NO 28375

SEQ ID NO: 28378 - DNA, 747 bp, Muscodor strobelii
  misc_feature: SGI cDNA ID NO. 569736
  misc_feature: Reduced expression when VOC is produced
  misc_feature: Encodes the peptide sequence at SEQ ID NO 28379
atggctcccgcgaagattcttgcacttccggctcttgctgctgttgctgctgctcttagcatcgacacctacgtgccatcatgtgccccggcatgtatctctgaggctatcaccaagcacaccacctgcgacgagacggacaatgtctgtatttgccaaaatacttacaccatccgggtcgatggcatggtctgcctgcgcgacgcgtgcgatggcactgcttatggcgagactcagactggaattgacaacttctgtgccgacgtgatgagtggtggtgatggatcgtctactaccacgacaaccacctcgacctcgaccaccagcacaagcaccaccagtactgacacccccaccacctatcctactacctctacgagctctcctctcccaacaagcagcactaccacaactggatccgaaactcctaccagcttgcccggaggttctcaaagccctacttcatcaactggaagcgagacccctacctcttcgagctactcgggctcccctgctcctacctcgtcaggcggcgcgagcacatcgacgttcgtcaccacatacccaggtggctcagtcagctcctccatcatcatcaccacgacgccctcttcgtccgctggcgctactaccacctcctctagcgctcctacgagcacaacgcctcccactggtgctgccggccgtgtcgagtctggtgcctccttcgccgctattgtctttggtgccattgcctacctgctgtga

SEQ ID NO: 28379 - protein, 248 aa, Muscodor strobelii
  misc_feature: SGI Peptide ID NO. 569736
  misc_feature: Useful for introducing or modulating the production of volatile compounds
MAPAKILALPALAAVAAALSIDTYVPSCAPACISEAITKHTTCDETDNVCICQNTYTIRVDGMVCLRDACDGTAYGETQTGIDNFCADVMSGGDGSSTTTTTTSTSTTSTSTTSTDTPTTYPTTSTSSPLPTSSTTTTGSETPTSLPGGSQSPTSSTGSETPTSSSYSGSPAPTSSGGASTSTFVTTYPGGSVSSSIIITTTPSSSAGATTTSSSAPTSTTPPTGAAGRVESGASFAAIVFGAIAYLL

SEQ ID NO: 28380 - DNA, 5232 bp, Muscodor strobelii
  misc_feature: SGI EST ID NO. CUFF.67208.0
  misc_feature: Variant of the nucleotide sequence at SEQ ID NO 28378
agatgatgatgaacagtattagtggatctattggtgtgacaactgccgagcgcataatgttatcactggtgagcttattacagtacagcctcttcattctgaacaagtgatccttacaatttggacatcgagccgatttccgcagtgatgatgccttccttgtcgagttgtcaatggtctggcaccacgaagatatcaggcatggtgacattgagtctggagcgattcggccgcagaccattggctcgtgacgaagtttgaattcccaattctacacagcccagccgtatgcccatcgaccaacaaatattaagtgttgtatcgaaatgcgtctcctgccatcaataagaagcattccaagagcggcaagggaccaacggctgacttgacaaatacgatgttgcacaaactcgtgtgtatgcacgggagatcgaaggtgtagcgtactacaaaaataaccttcgggtgttttgtgcatggaggtggaatgcgactgtccaaaactgtccccatgacttcgaaaatatagcacgggacggagacttgccttggaacgggagcaatagcttgcgacgctgaggtgaacacgaaatgcagggctcaaagctaggcacgctagacacggcgctgcatcgacaacacccaatcacagcagtaattcaccagatcaaatcgacggaccaccaaccagtgccggttccaggaggcgtgtggccaacatgacagcgatctggggtaccggcgggggcagcggccaatctatggcacgttaccttccctcttgaggcgcgagcggccgtgatgaaagtatcgaattcccattgccagacaaatgcgacaaagcccacgtcagagctgcagcgaccgaggcagcgattcgagaggctcgagagaggtacacagaggttttgtaataattggcaagtggattcctccgtttcaagctcaagccaccactcctgcccgatctagccatgaaacagcccctcgcggcgagtgcgacgcagttgattggacagatgacgccaagccccctataacgcggttagactatgacggcacattgcatggcctacccaagttgtactgctgccatccgttgtaacttcggccattttgcagcttaaccagacctccctgttcagtaagtgtcctcactcggatgattggtctaaaagtatgtgctgaagtacctgaagtaggcataacaacaatattttcagaccgaacggcttgggaaacaacatgcagcaacgctattgggaatgcaaagatcggggacaggggaaatagaagctacagaggaagcaagcatttaaccagtatgggatcgtgctctgctattactagttcaggtcgaaacaaagcaggaagtggaatggagatgtcatgagccttcatcaagaaagtgaatgccgatctgcaaacatcttcgtgagggaaggattcctggtctgtggatacacagacgttccatccgtttgtttcttagccagtccttgaacgacctgtcctataaaggaaatcgcattgcctcacatctcatattatcgcttttctgttagatcttgtcatctgcattatcaggcgctaaacacaacctacctatctacctaataatcagcaaactgtctatcgcttataccaacgctcgttattaaaccaaattaattatcttgaataacaatggctcccgcgaagattcttgcacttccggctcttgctgctgttgctgctgctcttagcatcgacacctacgtgccatcatgtgccccggcatgtatctctgaggctatcaccaagcacaccacctgcgacgagacggacaatgtctgtatttgccaaaatacttacaccatccgggtcgatggcatggtctgcctgcgcgacgcgtgcgatggcactgcttatggcgagactcagactggaattgacaacttctgtgccgacgtgatgagtggtggtgatggatcgtctactaccacgacaaccacctcgacctcgaccaccagcacaagcaccaccagtactgacacccccaccacctatcctactacctctacgagtcagacaccctcgagctctcccacatatcccacgagtacttcggagagtccctcccagactcccactgacacttcgtcttactcaggctctcctctcccaacaagcagcactaccacaactggatccgaaactcctaccagcttgcccggaggttctcaaagccctacttcatcaactggaagcgagacccctacctcttcgagctactcgggctcccctgctcctacctcgtcaggcggcgcgagcacatcgacgttcgtcaccacatacccaggtggctcagtcagctcctccatcatcatcaccacgacgccctcttcgtccgctggcgctactaccacctcctctagcgctcctacgagcacaacgcctcccactggtgctgccggccgtgtcgagtctggtgcctccttcgccgctattgtctttggtgccattgcctacctgctgtgatttatgatgggcttggtggaggtataatgaatgaatggttgcatatcatgggataagaaactcgacaaaattgtcgagttatctgcttgaattttggcgcttatgaaaaattgcatggcagtatgccgagcgagaagtgagactgagaaaatacccgagtcagagtgttggctgagccaatgttggctgagattggttaggaatcgtctcttggaagggggttcactaccttggaagctgtaaataggcatcataaataacttgtacatggttcgtgagcacaaagtatatatcatgtttggtttctacgtctgcgttgttgtggtacacttgctttgctctttcaatcagtcaccgttgaatacctacaccgacacaccttcatgttaccactttcaatacctaagtttcaaaccttacagacatctataggatatatctgtagacaacatactacttgcacatttacggccctatgacaagtacaattttgacatagtgatgctcgtactaatgtagtgctattccgcttcgactttagtccccaattgctagaaatgtcaatacgcaacattctgccatagcgagcaaaagaaacaaaagactttcgagctacgtcaaataagagccgtatgacatagccattttttcgtaaatcgcgtatggctggggcaagatttgctcgaacatcagttctgcgaataactaacatcgcacaatatccaatcgaaccacaggccacaatacatttatatacacgaacgtttaattgcaccaacaacacatttttaagaacattaactatcagatattagaactgtaaataaatacgatttccgcaaaatcaattgtgtcaagatgttagattgccatcggcacattatttgctgttctattcggagttatatactatattgtggtcctgagagtgccccgcaatcggagaggacttgaaggcagcgcagcccaagcttcaagatggagactgaacttcttctcgaagtttccctttcctcccgccattacaaatgggcatgatagaccaggcaaggcgagctgatgtcggaggacaaggcgaaatgtgtagcaacttgtccttacaatcttaattggtaaattttatttctccacgagggcattgcgtcccaccttcttctgtctactacctcacaagccttatcttggtacctacgtgacattatctgcatcgcgcgctaatacctgccttcacatggcctcaagctgaatcatttgtgcgccgctgacctgtgatcacaatgcactgccttttattcacaatccttaatacttcatagagctgttgctgtttctccatttccattgttgatttgctacttgccacttggagcaagagatcacgtctacaattgcagtggttctagacaaagacttttcgcctttaagaaaaccaacaaaccaatagttcacttccaacgaattcgccaaagtgcatttcatggaccagtcataggtcgacacttgcgaacatcaccaatacgtaccaaggagccatttcatggtgtccaattaagcaatttgcattcccctccatcaccacggcaattgccccgcgcttcagacccgaccagacaattccctgcaagctgtttgcactctcgctatgcctcaaaatgcagaggaagcaatcaggctgaaaacagagggaaacggcttcttcacggctggcaattttataagtgctgagagcttgtattccaaagcaataatcgctgatgacactaatgcttcactctacacgaatcgcgcgatggcgcgcatcaagctcaacctctacgactctgccatttctgattgccgcgcatgtctcaagctcgacgagaacagcatgaaagggaccttcatactctcacagtgtctcctagctatccacgattacgacggtgcgctggagactggcttacgagcgcatagactgggaagcgcaacgaacgataagtctctacctaacttaacacaacaagtattgcgttgtaagaaggaaatttgggaggcacgagaaaagaaacgcgttcgcgaaacccaggaactcgaacacgaaaccattgctctcatggagcgtgagcgcgacgacatggctgttactggacaggatatcggcgaacagaatcaaattcgagaggaatgggatcagaaaatcgagctacttcgaaccacattcgagaaagctaggacagcgtcagaacggaaacgagaacccccacctgcatgggccgtcgatgatataacctttgacataatggttgatcctgttatgacgaagactggcaaatcttacgagagagcttcgatcgttgaggccattaagcgccagccgctcgatcccatcaccagagaacctctccgatttagtgatctacgtccgaatttagcactaaaggaggcatgcgaggaatacatcaaaaacaatggctgggcggtggactggtagtctcgtcacggaaacggaatttttcttcgtttatatagtttgagataaattcttgtggcaacgttattagctcatttgtatcgaggcgcgttcgcatgggtggcctcgacttgctcgaaccgcttgcattgtacggcgttagtggctgattaagattgctctagcagaggaaagcgatgggacagcttctgatcatttggatgagactatagaaaatggcatttttaattgtcaaagcgaat

SEQ ID NO: 28381 - DNA, 828 bp, Muscodor strobelii
  misc_feature: SGI cDNA ID NO. 569737
  misc_feature: Reduced expression when VOC is produced
  misc_feature: Encodes the peptide sequence at SEQ ID NO 28382
atgcctcaaaatgcagaggaagcaatcaggctgaaaacagagggaaacggcttcttcacggctggcaattttataagtgctgagagcttgtattccaaagcaataatcgctgatgacactaatgcttcactctacacgaatcgcgcgatggcgcgcatcaagctcaacctctacgactctgccatttctgattgccgcgcatgtctcaagctcgacgagaacagcatgaaagggaccttcatactctcacagtgtctcctagctatccacgattacgacggtgcgctggagactggcttacgagcgcatagactgggaagcgcaacgaacgataagtctctacctaacttaacacaacaagtattgcgttgtaagaaggaaatttgggaggcacgagaaaagaaacgcgttcgcgaaacccaggaactcgaacacgaaaccattgctctcatggagcgtgagcgcgacgacatggctgttactggacaggatatcggcgaacagaatcaaattcgagaggaatgggatcagaaaatcgagctacttcgaaccacattcgagaaagctaggacagcgtcagaacggaaacgagaacccccacctgcatgggccgtcgatgatataacctttgacataatggttgatcctgttatgacgaagactggcaaatcttacgagagagcttcgatcgttgaggccattaagcgccagccgctcgatcccatcaccagagaacctctccgatttagtgatctacgtccgaatttagcactaaaggaggcatgcgaggaatacatcaaaaacaatggctgggcggtggactggtag

SEQ ID NO: 28382 - protein, 275 aa, Muscodor strobelii
  misc_feature: SGI Peptide ID NO. 569737
  misc_feature (42)..(75): Pfam Id: PF00515 Pfam Desc: Tetratricopeptide repeat
  misc_feature (205)..(272): Pfam Id: PF04564 Pfam Desc: U-box domain
  misc_feature (206)..(272): Pfam Id: PF04564 Pfam Desc: U-box domain
  misc_feature (8)..(275): NCBI GI: 46136313 Blast Desc: FG09672.1 [Gibberella zeae PH-1]
  misc_feature (7)..(275): NCBI GI: 256727364 Blast Desc: NECHADRAFT_90790 [Nectria haematococca mpVI 77-13-4]
  misc_feature (11)..(275): NCBI GI: 171691296 Blast Desc: protein product [Podospora anserina] gi|170945596|emb|CAP71709.1| protein product [Podospora anserina]
  misc_feature (1)..(275): NCBI GI: 39945830 Blast Desc: MGG_08035 [Magnaporthe grisea 70-15] gi|145019271|gb|EDK03499.1| MGG_08035 [Magnaporthe grisea 70-15]
  misc_feature (10)..(275): NCBI GI: 116195294 Blast Desc: CHGG_04245 [Chaetomium globosum CBS 148.51] gi|88180158|gb|EAQ87626.1| CHGG_04245 [Chaetomium globosum CBS 148.51]
  misc_feature (4)..(275): NCBI GI: 40882163 Blast Desc: related to CHIP protein (carboxyl terminus of Hsc70-interacting protein) [Neurospora crassa]
  misc_feature (50)..(275): NCBI GI: 261352815 Blast Desc: conserved [Verticillium albo-atrum VaMs.102]
  misc_feature (55)..(275): NCBI GI: 164429408 Blast Desc: NCU10270 [Neurospora crassa OR74A] gi|157073467|gb|EDO65444.1| [Neurospora crassa OR74A]
  misc_feature (1)..(275): NCBI GI: 156032557 Blast Desc: SS1G_13976 [Sclerotinia sclerotiorum 1980] gi|154699378|gb|EDN99116.1| SS1G_13976 [Sclerotinia sclerotiorum 1980]
  misc_feature (1)..(275): NCBI GI: 154292417 Blast Desc: BC1G_14527 [Botryotinia fuckeliana B05.10] gi|150846113|gb|EDN21306.1| BC1G_14527 [Botryotinia fuckeliana B05.10]
  misc_feature: Useful for introducing or modulating the production of volatile compounds
MPQNAEEAIRLKTEGNGFFTAGNFISAESLYSKAIIADDTNASLYTNRAMARIKLNLYDSAISDCRACLKLDENSMKGTFILSQCLLAIHDYDGALETGLRAHRLGSATNDKSLPNLTQQVLRCKKEIWEAREKKRVRETQELEHETIALMERERDDMAVTGQDIGEQNQIREEWDQKIELLRTTFEKARTASERKREPPPAWAVDDITFDIMVDPVMTKTGKSYERASIVEAIKRQPLDPITREPLRFSDLRPNLALKEACEEYIKNNGWAVDW

SEQ ID NO: 28383 - DNA, 5232 bp, Muscodor strobelii; identical to SEQ ID NO: 28380
  misc_feature: SGI EST ID NO. CUFF.67208.0
  misc_feature: Variant of the nucleotide sequence at SEQ ID NO 28381

SEQ ID NO: 28384 - DNA, 1332 bp, Muscodor strobelii
  misc_feature: SGI cDNA ID NO. 569738
  misc_feature: Encodes the peptide sequence at SEQ ID NO 28385
atgattatcaagtatcacgacgagccggggctggaggatagtactgtcatggactcgccaagcgtaccgttcggtcgcacaatgcgagatgctcatttcgcattctctccggactatacgccgttaaaccatggttctttcggcacgtatccgaagagcgtaggtgatgctcttatacaggtaacggcggaggccgaagcagctcccgataagttcatcagtcttgactggccggcgcggctcaaagagtcgcgcggacttacggccagtctgctaaactgtgctactgaagacctggtgcttgtaccgaatgccacgacggggacagacacgattctgaagaatctggtatggaaaaagggtgacgtgatcctgatgtatgaggttgtttacgattcagtgcgagctggtgtttcttatctggaagacatgtttggagtgttagtggaaatggtgccaatccgtttccccctgtcagatgatgcgcttatccaaactatggtcgatgccatccgtgaagtcaacgcccgacctggagaacgagttcggctagctatcatagatactattgttagtatgcctggaattcgcatcccattcgagcggcttgttcctgctttgcaagcggaaggtccccttgtacatgtcgacggcgctcatggaattgggcacatcgatattgatattgggaaacttaatccggatttcttcgttaccaatctgcataagtggctctttgtgccgcgaggttgcgcagcgctctatgtagcgaagaagcaccagaacttgatacggacgagtttgcccaccagtcatctttatcgaaagcccggcgatgagcgggacctattcgtcgagctatttgactttactggaaccgccaacacgacgaactatctgtgtgttaaagctgctcttgattttcgatctcaaatttgtggaggtgaagcttcaattcaggcctggaccaagcaagttgcgtgggaaggcgccgacgctgccgctaccgtcttttctacagatgtaatggattttccaggttcttgtatacgagactgcaatctgcataatgtgcgtcttccagtcaagcttgtagaggaagaagagtcaacggacggaatacctgtggacgatgctgcacaggtagtgctatggatgaagattgtgggcgttagagaaagtggaatgtactttcaaaccgttgcttataggggttacatgtattggcgtctgagcggacaaatctacgtcgatgtggatgacttccgtcggggtgctgaagtgttgaaagacctctgcgagcgggctatgaaaggagagtatcgtgcctag

SEQ ID NO: 28385 - protein, 443 aa, Muscodor strobelii
  misc_feature: SGI Peptide ID NO. 569738
  misc_feature (49)..(401): Pfam Id: PF00266 Pfam Desc: Aminotransferase class-V
  misc_feature (179)..(261): Pfam Id: PF00266 Pfam Desc: Aminotransferase class-V
  misc_feature (18)..(441): NCBI GI: 242789392 Blast Desc: aminotransferase family protein (LolT), [Talaromyces stipitatus ATCC 10500] gi|218717938|gb|EED17358.1| aminotransferase family protein (LolT), [Talaromyces stipitatus
  misc_feature (17)..(438): NCBI GI: 146322966 Blast Desc: aminotransferase family protein (LolT) [Aspergillus fumigatus Af293] gi|129558549|gb|EBA27496.1| aminotransferase family protein (LolT), [Aspergillus fumigatus Af293]
  misc_feature (17)..(438): NCBI GI: 159129720 Blast Desc: aminotransferase family protein, [Aspergillus fumigatus A1163]
  misc_feature (24)..(441): NCBI GI: 212534126 Blast Desc: aminotransferase family protein (LolT), [Penicillium marneffei ATCC 18224] gi|210069618|gb|EEA23708.1| aminotransferase family protein (LolT), [Penicillium marneffei
  misc_feature (17)..(438): NCBI GI: 119481521 Blast Desc: aminotransferase, [Neosartorya fischeri NRRL 181] gi|119408943|gb|EAW18892.1| aminotransferase, [Neosartorya fischeri NRRL 181]
  misc_feature (23)..(440): NCBI GI: 156046689 Blast Desc: SS1G_09445 [Sclerotinia sclerotiorum 1980] gi|154693840|gb|EDN93578.1| SS1G_09445 [Sclerotinia sclerotiorum 1980]
  misc_feature (23)..(440): NCBI GI: 154322342 Blast Desc: BC1G_01318 [Botryotinia fuckeliana B05.10] gi|150850565|gb|EDN25758.1| BC1G_01318 [Botryotinia fuckeliana B05.10]
  misc_feature (17)..(441): NCBI GI: 145236278 Blast Desc: protein product [Aspergillus niger] gi|134075239|emb|CAK44880.1| protein product [Aspergillus niger]
  misc_feature (19)..(433): NCBI GI: 115399430 Blast Desc: conserved [Aspergillus terreus NIH2624] gi|114192187|gb|EAU33887.1| conserved [Aspergillus terreus NIH2624]
  misc_feature (17)..(443): NCBI GI: 238499149 Blast Desc: cysteine desulfurylase, [Aspergillus flavus NRRL3357] gi|220692562|gb|EED48908.1| cysteine desulfurylase, [Aspergillus flavus NRRL3357]
  misc_feature (32)..(330): SWISSPROT Homolog: EC 5.1.1.17 Isopenicillin-N epimerase
MIIKYHDEPGLEDSTVMDSPSVPFGRTMRDAHFAFSPDYTPLNHGSFGTYPKSVGDALIQVTAEAEAAPDKFISLDWPARLKESRGLTASLLNCATEDLVLVPNATTGTDTILKNLVWKKGDVILMYEVVYDSVRAGVSYLEDMFGVLVEMVPIRFPLSDDALIQTMVDAIREVNARPGERVRLAIIDTIVSMPGIRIPFERLVPALQAEGPLVHVDGAHGIGHIDIDIGKLNPDFFVTNLHKWLFVPRGCAALYVAKKHQNLIRTSLPTSHLYRKPGDERDLFVELFDFTGTANTTNYLCVKAALDFRSQICGGEASIQAWTKQVAWEGADAAATVFSTDVMDFPGSCIRDCNLHNVRLPVKLVEEEESTDGIPVDDAAQVVLWMKIVGVRESGMYFQTVAYRGYMYWRLSGQIYVDVDDFRRGAEVLKDLCERAMKGEYRA

SEQ ID NO: 28386 - DNA, 1973 bp, Muscodor strobelii
  misc_feature: SGI EST ID NO. CUFF.67208.3
  misc_feature: Variant of the nucleotide sequence at SEQ ID NO 28384
cggagacgcaggtgcacttctccacgtgccaccaggcgtgggtaaccgctgcgcagcggcaggattcctgttgtggtccataataacgataggttagagacaagcataaactccacgattgaggcctgtcttttatccgaaagcttcgagacactaattgactaactgctatatttcgtaatcaattggatctgccttcgacctagaccgagcgggcagaagaacggagctgagagttgtgtcagcacctgagtcaaatttcactattgcgatagtatataattggtttacgagatccgttaatttagttgaatacgcttgtgcttcgaaataatgattatcaagtatcacgacgagccggggctggaggatagtactgtcatggactcgccaagcgtaccgttcggtcgcacaatgcgagatgctcatttcgcattctctccggactatacgccgttaaaccatggttctttcggcacgtatccgaagagcgtaggtgatgctcttatacaggtaacggcggaggccgaagcagctcccgataagttcatcagtcttgactggccggcgcggctcaaagagtcgcgcggacttacggccagtctgctaaactgtgctactgaagacctggtgcttgtaccgaatgccacgacggggacagacacgattctgaagaatctggtatggaaaaagggtgacgtgatcctgatgtatgaggttgtttacgattcagtgcgagctggtgtttcttatctggaagacatgtttggagtgttagtggaaatggtgccaatccgtttccccctgtcagatgatgcgcttatccaaactatggtcgatgccatccgtgaagtcaacgcccgacctggagaacgagttcggctagctatcatagatactattgttagtatgcctggaattcgcatcccattcgagcggcttgttcctgctttgcaagcggaaggtccccttgtacatgtcgacggcgctcatggaattgggcacatcgatattgatattgggaaacttaatccggatttcttcgttaccaatctgcataagtggctctttgtgccgcgaggttgcgcagcgctctatgtagcgaagaagcaccagaacttgatacggacgagtttgcccaccagtcatctttatcgaaagcccggcgatgagcgggacctattcgtcgagctatttgactttactggaaccgccaacacgacgaactatctgtgtgttaaagctgctcttgattttcgatctcaaatttgtggaggtgaagcttcaattcaggcctggaccaagcaagttgcgtgggaaggcgccgacgctgccgctaccgtcttttctacagatgtaatggattttccaggttcttgtatacgagactgcaatctgcataatgtgcgtcttccagtcaagcttgtagaggaagaagagtcaacggacggaatacctgtggacgatgctgcacaggtagtgctatggatgaagattgtgggcgttagagaaagtggaatgtactttcaaaccgttgcttataggggttacatgtattggcgtctgagcggacaaatctacgtcgatgtggatgacttccgtcggggtgctgaagtgttgaaagacctctgcgagcgggctatgaaaggagagtatcgtgcctagagttgcgcatgcaagaatctatttcaagagtctcgccgagccgtcaatgtctaccagttcagtattcccagatgaataatcagatcttgagtctatcgcgtgtcattttcattctataataacgtaaaagagacagagtgaaacacggtccatactaatcgttccatggtcactgtcacttgcggagttctctgccgaagtccattctgctcacggactcatacggagcacacactgccaaggctctcgtcattcccggcgtcaggaattgcaacccaaacacaaaacttgcgttcgtccacccgaac

SEQ ID NO: 28387 - DNA, 1347 bp, Muscodor strobelii
  misc_feature: SGI cDNA ID NO. 569739
  misc_feature: Elevated expression when VOC is produced
  misc_feature: Encodes the peptide sequence at SEQ ID NO 28388
atgattatcaagtatcacgacgagccggggctggaggatagtactgtcatggactcgccaagcgtaccgttcggtcgcacaatgcgagatgctcatttcgcattctctccggactatacgccgttaaaccatggttctttcggcacgtatccgaagagcgtaggtgatgctcttatacaggtaacggcggaggccgaagcagctcccgataagttcatcagtcttgactggccggcgcggctcaaagagtcgcgcggacttacggccagtctgctaaactgtgctactgaagacctggtgcttgtaccgaatgccacgacggggacagacacgattctgaagaatctggtatggaaaaagggtgacgtgatcctgatgtatgaggttgtttacgattcagtgcgagctggtgtttcttatctggaagacatgtttggagtgttagtggaaatggtgccaatccgtttccccctgtcagatgatgcgcttatccaaactatggtcgatgccatccgtgaagtcaacgcccgacctggagaacgagttcggctagctatcatagatactattgttagtatgcctggaattcgcatcccattcgagcggcttgttcctgctttgcaagcggaaggtccccttgtacatgtcgacggcgctcatggaattgggcacatcgatattgatattgggaaacttaatccggatttcttcgttaccaatctgcataagtggctctttgtgccgcgaggttgcgcagcgctctatgtagcgaagaagcaccagaacttgatacggacgagtttgcccaccagtcatctttatcgaaagcccggcgatgagcgggacctattcgtcgagctatttgactttactggaaccgccaacacgacgaactatctgtgtgttaaagtttgcaacgtgtcagctgctcttgattttcgatctcaaatttgtggaggtgaagcttcaattcaggcctggaccaagcaagttgcgtgggaaggcgccgacgctgccgctaccgtcttttctacagatgtaatggattttccaggttcttgtatacgagactgcaatctgcataatgtgcgtcttccagtcaagcttgtagaggaagaagagtcaacggacggaatacctgtggacgatgctgcacaggtagtgctatggatgaagattgtgggcgttagagaaagtggaatgtactttcaaaccgttgcttataggggttacatgtattggcgtctgagcggacaaatctacgtcgatgtggatgacttccgtcggggtgctgaagtgttgaaagacctctgcgagcgggctatgaaaggagagtatcgtgcctag

SEQ ID NO: 28388 - protein, 448 aa, Muscodor strobelii
  misc_feature: SGI Peptide ID NO. 569739
  misc_feature (49)..(406): Pfam Id: PF00266 Pfam Desc: Aminotransferase class-V
  misc_feature (179)..(261): Pfam Id: PF00266 Pfam Desc: Aminotransferase class-V
  misc_feature (18)..(446): NCBI GI: 242789392 Blast Desc: aminotransferase family protein (LolT), [Talaromyces stipitatus ATCC 10500] gi|218717938|gb|EED17358.1| aminotransferase family protein (LolT), [Talaromyces stipitatus
  misc_feature (17)..(443): NCBI GI: 146322966 Blast Desc: aminotransferase family protein (LolT) [Aspergillus fumigatus Af293] gi|129558549|gb|EBA27496.1| aminotransferase family protein (LolT), [Aspergillus fumigatus Af293]
  misc_feature (17)..(443): NCBI GI: 159129720 Blast Desc: aminotransferase family protein, [Aspergillus fumigatus A1163]
  misc_feature (24)..(446): NCBI GI: 212534126 Blast Desc: aminotransferase family protein (LolT), [Penicillium marneffei ATCC 18224] gi|210069618|gb|EEA23708.1| aminotransferase family protein (LolT), [Penicillium marneffei
  misc_feature (17)..(443): NCBI GI: 119481521 Blast Desc: aminotransferase, [Neosartorya fischeri NRRL 181] gi|119408943|gb|EAW18892.1| aminotransferase, [Neosartorya fischeri NRRL 181]
  misc_feature (23)..(445): NCBI GI: 156046689 Blast Desc: SS1G_09445 [Sclerotinia sclerotiorum 1980] gi|154693840|gb|EDN93578.1| SS1G_09445 [Sclerotinia sclerotiorum 1980]
  misc_feature (23)..(445): NCBI GI: 154322342 Blast Desc: BC1G_01318 [Botryotinia fuckeliana B05.10] gi|150850565|gb|EDN25758.1| BC1G_01318 [Botryotinia fuckeliana B05.10]
  misc_feature (17)..(446): NCBI GI: 145236278 Blast Desc: protein product [Aspergillus niger] gi|134075239|emb|CAK44880.1| protein product [Aspergillus niger]
  misc_feature (19)..(438): NCBI GI: 115399430 Blast Desc: conserved [Aspergillus terreus NIH2624] gi|114192187|gb|EAU33887.1| conserved [Aspergillus terreus NIH2624]
  misc_feature (17)..(448): NCBI GI: 238499149 Blast Desc: cysteine desulfurylase, [Aspergillus flavus NRRL3357] gi|220692562|gb|EED48908.1| cysteine desulfurylase, [Aspergillus flavus NRRL3357]
  misc_feature (32)..(335): SWISSPROT Homolog: EC 5.1.1.17 Isopenicillin-N epimerase
  misc_feature: Useful for introducing or modulating the production of volatile compounds
MIIKYHDEPGLEDSTVMDSPSVPFGRTMRDAHFAFSPDYTPLNHGSFGTYPKSVGDALIQVTAEAEAAPDKFISLDWPARLKESRGLTASLLNCATEDLVLVPNATTGTDTILKNLVWKKGDVILMYEVVYDSVRAGVSYLEDMFGVLVEMVPIRFPLSDDALIQTMVDAIREVNARPGERVRLAIIDTIVSMPGIRIPFERLVPALQAEGPLVHVDGAHGIGHIDIDIGKLNPDFFVTNLHKWLFVPRGCAALYVAKKHQNLIRTSLPTSHLYRKPGDERDLFVELFDFTGTANTTNYLCVKVCNVSAALDFRSQICGGEASIQAWTKQVAWEGADAAATVFSTDVMDFPGSCIRDCNLHNVRLPVKLVEEEESTDGIPVDDAAQVVLWMKIVGVRESGMYFQTVAYRGYMYWRLSGQIYVDVDDFRRGAEVLKDLCERAMKGEYRA

SEQ ID NO: 28389 - DNA, 1973 bp, Muscodor strobelii; identical to SEQ ID NO: 28386
  misc_feature: SGI EST ID NO. CUFF.67208.3
  misc_feature: Variant of the nucleotide sequence at SEQ ID NO 28387

SEQ ID NO: 28390 - DNA, 1875 bp, Muscodor strobelii
  misc_feature: SGI cDNA ID NO. 569740
  misc_feature: Elevated expression when VOC is produced
  misc_feature: Encodes the peptide sequence at SEQ ID NO 28391
atggtcttcgaaacgtcaaatactcgcagaaggtatagcttactggacttggttgttactttgggtacgcttgactctggtggctatcatcggattcaactcggcggaaaccgcgccgtctccaatatcctgcaggaattgacgtcctcgttagaaaggggcaacaaagtggctgttattgctccctcaattatgagcgagacccctttggaacgtattcggagatacgtaacacataagttctgggacggcttgaccaggcgtcatgacgccaccgtaatcgaaggggcgcttaaagacacgaaactccaaggatcggtcagtcaacacattatatacattcccgccacagctgagagacctgatctcgacttgaagattacttccctacctactaagtttacggaagacgtttatagaactttgtttgagaaaccaggtgtcctcgccttagacaccgaagaacatatagactctgttagtggcgtgacagagacccgacctgttccattcatcgttcccggaggacgcttcaacgagttctttggctgggatagctatttcgttggcattgggctcctggaggacggccgaacggacctcgtcaaaggcatcctgaagaattgggtgtttgaaattcaacattatggcttgataccgaatgccaaccgatcttatctaatgttacgttctcaaccgcctttcttaactgaccttgcacttcgactctacgttaaaacctcagacgaacttggcgctaaggagcttctgagagtgtgtatacaggcggccatcaaggagtatcacaaagtctggacgagtgctccacgtttagatcctatcacggggctatcaaagtactcgccggttggcgggtttggaatcccgaacgaagtcgaaccgggccatttcgactcatttttgcggccgcttgccgagcgccgcggtttaactattcaggaatacaccgagaaattcaacaacaagcaaatcgaagaaccagaattagacgagtaccttcagcacgacagaggagtgcgagaatcgggccacgatacgtcttcacgcttagtcgggcgggccgccaatctggctatcatggacttgaatttctgtctctacaagtatgagacggatattgcgcgcgcaattgaacagtacttcgacggcaaactagatattgcgcctaagtttcacttagacagctctgagacagacgcatcaccccaatcctggaaagaaagagctgagaagcgacgagctgctgtggataaatatctgtggaacgaagaacgagggtcgtattgtgattatgacgttgttcagaagtcacagatctcagagactgcggtgacatgtctttgggccttgtggtgcggcattgcgagccctcaccaagcagagcttattgtcaagcacgctttgccacaattcgagtttcgcggtggacttgcctcaagcaacatagcgattgtcgggaatgatatgaggaggcaatgggactacccttcagcatgggcaccacatcaggttcatgcttggcagggtcttcgggattatggttatgagaaagacgcagcccgacttgcctatcgctggctctacatgattctgaaagtctttgtggactacaatggagcgatttgcgagaaatacgacgttacgcgggtcaaagatcctcatcgaaattatgccgaatatggcaatcagggcactctgtttgtgggatatccgcgtgaagggttcgggtggacgaacgcaagttttgtgtttgggttgcaattcctgacgccgggaatgacgagagccttggcagtgtgtgctccgtatgagtccgtgagcagaatggacttcggcagagaactccgcaagtga

SEQ ID NO: 28391 - protein, 624 aa, Muscodor strobelii
  misc_feature: SGI Peptide ID NO. 569740
  misc_feature (50)..(597): Pfam Id: PF01204 Pfam Desc: Trehalase
  misc_feature (169)..(597): Pfam Id: PF01204 Pfam Desc: Trehalase
  misc_feature (15)..(615): NCBI GI: 225682451 Blast Desc: neutral trehalase [Paracoccidioides brasiliensis Pb03]
  misc_feature (18)..(615): NCBI GI: 226289850 Blast Desc: neutral trehalase [Paracoccidioides brasiliensis Pb18]
  misc_feature (18)..(612): NCBI GI: 119195239 Blast Desc: CIMG_01994 [Coccidioides immitis RS]
  misc_feature (18)..(615): NCBI GI: 171693795 Blast Desc: protein product [Podospora anserina] gi|170946846|emb|CAP73650.1| protein product [Podospora anserina]
  misc_feature (18)..(612): NCBI GI: 240104979 Blast Desc: Neutral trehalase, [Coccidioides posadasii C735 delta SOWgp]
  misc_feature (18)..(615): NCBI GI: 258566403 Blast Desc: neutral trehalase [Uncinocarpus reesii 1704] gi|237907647|gb|EEP82048.1| neutral trehalase [Uncinocarpus reesii 1704]
  misc_feature (18)..(612): NCBI GI: 255947282 Blast Desc: Pc22g03670 [Penicillium chrysogenum Wisconsin 54-1255] gi|211591425|emb|CAP97655.1| Pc22g03670 [Penicillium chrysogenum Wisconsin 54-1255]
  misc_feature (18)..(615): NCBI GI: 119499876 Blast Desc: alpha,alpha-trehalase [Neosartorya fischeri NRRL 181] gi|119414860|gb|EAW24798.1| alpha,alpha-trehalase [Neosartorya fischeri NRRL 181]
  misc_feature (18)..(615): NCBI GI: 70993262 Blast Desc: alpha,alpha-trehalase TreB/Nth1 [Aspergillus fumigatus Af293] gi|66849112|gb|EAL89440.1| alpha,alpha-trehalase TreB/Nth1 [Aspergillus fumigatus Af293]
  misc_feature (18)..(612): NCBI GI: 238504276 Blast Desc: alpha,alpha-trehalase TreB/Nth1 [Aspergillus flavus NRRL3357] gi|220690840|gb|EED47189.1| alpha,alpha-trehalase TreB/Nth1 [Aspergillus flavus NRRL3357]
  misc_feature (27)..(615): SWISSPROT Homolog: EC 3.2.1.28 Alpha,alpha-trehalase
  misc_feature: Useful for introducing or modulating the production of volatile compounds
MVFETSNTRRRYSLLDLVVTLGTLDSGGYHRIQLGGNRAVSNILQELTSSLERGNKVAVIAPSIMSETPLERIRRYVTHKFWDGLTRRHDATVIEGALKDTKLQGSVSQHIIYIPATAERPDLDLKITSLPTKFTEDVYRTLFEKPGVLALDTEEHIDSVSGVTETRPVPFIVPGGRFNEFFGWDSYFVGIGLLEDGRTDLVKGILKNWVFEIQHYGLIPNANRSYLMLRSQPPFLTDLALRLYVKTSDELGAKELLRVCIQAAIKEYHKVWTSAPRLDPITGLSKYSPVGGFGIPNEVEPGHFDSFLRPLAERRGLTIQEYTEKFNNKQIEEPELDEYLQHDRGVRESGHDTSSRLVGRAANLAIMDLNFCLYKYETDIARAIEQYFDGKLDIAPKFHLDSSETDASPQSWKERAEKRRAAVDKYLWNEERGSYCDYDVVQKSQISETAVTCLWALWCGIASPHQAELIVKHALPQFEFRGGLASSNIAIVGNDMRRQWDYPSAWAPHQVHAWQGLRDYGYEKDAARLAYRWLYMILKVFVDYNGAICEKYDVTRVKDPHRNYAEYGNQGTLFVGYPREGFGWTNASFVFGLQFLTPGMTRALAVCAPYESVSRMDFGRELRK

SEQ ID NO: 28392 - DNA, 2240 bp, Muscodor strobelii
  misc_feature: SGI EST ID NO. CUFF.67209.5
  misc_feature: Variant of the nucleotide sequence at SEQ ID NO 28390
gtagactattataatggcattgcagcacagagacctgatctcgacttgaagattacttccctacctactaagtttacggaagacgtttatagaactttgtttgagaaaccaggtgtcctcgccttagacaccgaagaacatatagactctgttagtggcgtgacagagacccgacctgttccattcatcgttcccggaggacgcttcaacgagttctttggctgggatagctatttcgttggcattgggctcctggaggacggccgaacggacctcgtcaaaggcatcctgaagaattgggtgtttgaaattcaacattatggcttgataccgaatgccaaccgatcttatctaatgttacgttctcaaccgcctttcttaactgaccttgcacttcgactctacgttaaaacctcagacgaacttggcgctaaggagcttctgagagtgtgtatacaggcggccatcaaggagtatcacaaagtctggacgagtgctccacgtttagatcctatcacggggctatcaaagtactcgccggttggcgggtttggaatcccgaacgaagtcgaaccgggccatttcgactcatttttgcggccgcttgccgagcgccgcggtttaactattcaggaatacaccgagaaattcaacaacaagcaaatcgaagaaccagaattagacgagtaccttcagcacgacagaggagtgcgagaatcgggccacgatacgtcttcacgcttagtcgggcgggccgccaatctggctatcatggacttgaatttctgtctctacaagtatgagacggatattgcgcgcgcaattgaacagtacttcgacggcaaactagatattgcgcctaagtttcacttagacagctctgagacagacgcatcaccccaatcctggaaagaaagagctgagaagcgacgagctgctgtggataaatatctgtggaacgaagaacgagggtcgtattgtgattatgacgttgttcagaagtcacagatctcagagactgcggtgacatgtctttgggccttgtggtgcggcattgcgagccctcaccaagcagagcttattgtcaagcacgctttgccacaattcgagtttcgcggtggacttgcctcaagcaacatagcgattgtcgggaatgatatgaggaggcaatgggactacccttcagcatgggcaccacatcaggttcatgcttggcagggtcttcgggattatggttatgagaaagacgcagcccgacttgcctatcgctggctctacatgattctgaaagtctttgtggactacaatggagcgatttgcgagaaatacgacgttacgcgggtcaaagatcctcatcgaaattatgccgaatatggcaatcagggcactctgtttgtgggatatccgcgtgaagggttcgggtggacgaacgcaagttttgtgtttgggttgcaattcctgacgccgggaatgacgagagccttggcagtgtgtgctccgtatgagtccgtgagcagaatggacttcggcagagaactccgcaagtgacagtgaccatggaacgattagtatggaccgtgtttcactctgtctcttttacgttattatagaatgaaaatgacacgcgatagactcaagatctgattattcatctgggaatactgaactggtagacattgacggctcggcgagactcttgaaatagattcttgcatgcgcaactctaggcacgatactctcctttcatagcccgctcgcagaggtctttcaacacttcagcaccccgacggaagtcatccacatcgacgtagatttgtccgctcagacgccaatacatgtaacccctataagcaacggtttgaaagtacattccactttctctaacgcccacaatcttcatccatagcactacctgtgcagcatcgtccacaggtattccgtccgttgactcttcttcctctacaagcttgactggaagacgcacattatgcagattgcagtctcgtatacaagaacctggaaaatccattacatctgtagaaaagacggtagcggcagcgtcggcgccttcccacgcaacttgcttggtccaggcctgaattgaagcttcacctccacaaatttgagatcgaaaatcaagagcagctgacacgttgcaaactgattagctaatcattcaggatagccgtcaaggcaaactcgtcaggtgaatgaagtgcttgcctttaacacacagatag

SEQ ID NO: 28393 - DNA, 555 bp, Muscodor strobelii
  misc_feature: SGI cDNA ID NO. 569741
  misc_feature: Encodes the peptide sequence at SEQ ID NO 28394
atgacatcctccacgcgctctgtgctagacaaagtttatttggtctactttctcatccacattcccatcctcttctgcgtggacctcgtccctctctacccacaaactctctgggtgcccaaagaagcaccgcttcactttctgggacagctgcgcgagtactacatagaaaactacaacgaccaattcttccttccaccacccgcagagatccccagtttcttccctctctacgcctttctcgagctggtctttcaccttccggtctccgtatgggctgtcggcacactctggaatcgcggccccaagggactctccggcagcgccgaaatcctgtttcttgtttacggtgttgagactgccctgactactgctacctgcatgtacgatgctgcgctctgggacccggctgttgtcaccgtgtcgcagaagattaccatcgttgccgggctttacgggtcgtattttgctctggcgatgctgctcactgtcgacatgtacgcgaggctcttgaagcgtgtcaacgctgtggatgccgcgaagaagacgcagtga

SEQ ID NO: 28394 - protein, 184 aa, Muscodor strobelii
  misc_feature: SGI Peptide ID NO. 569741
  misc_feature (1)..(184): NCBI GI: 39940644 Blast Desc: MGG_04918 [Magnaporthe grisea 70-15] gi|145010846|gb|EDJ95502.1| MGG_04918 [Magnaporthe grisea 70-15]
  misc_feature (9)..(182): NCBI GI: 154296031 Blast Desc: [Botryotinia fuckeliana B05.10] gi|150843706|gb|EDN18899.1| [Botryotinia fuckeliana B05.10]
  misc_feature (10)..(174): NCBI GI: 115399838 Blast Desc: [Aspergillus terreus NIH2624] gi|114191174|gb|EAU32874.1| [Aspergillus terreus NIH2624]
  misc_feature (1)..(184): NCBI GI: 85068528 Blast Desc: NCU05167 [Neurospora crassa OR74A] gi|28923453|gb|EAA32635.1| conserved [Neurospora crassa OR74A]
  misc_feature (4)..(175): NCBI GI: 226291682 Blast Desc: [Paracoccidioides brasiliensis Pb18]
  misc_feature (1)..(184): NCBI GI: 171683665 Blast Desc: protein product [Podospora anserina] gi|170941792|emb|CAP67446.1| protein product [Podospora anserina]
  misc_feature (10)..(174): NCBI GI: 145237176 Blast Desc: An07g01480 [Aspergillus niger] gi|134075701|emb|CAK96593.1| protein product [Aspergillus niger]
  misc_feature (1)..(184): NCBI GI: 116194278 Blast Desc: CHGG_03737 [Chaetomium globosum CBS 148.51] gi|88179650|gb|EAQ87118.1| CHGG_03737 [Chaetomium globosum CBS 148.51]
  misc_feature (10)..(174): NCBI GI: 238482759 Blast Desc: integral membrane protein, [Aspergillus flavus NRRL3357] gi|220700668|gb|EED57006.1| integral membrane protein, [Aspergillus flavus NRRL3357]
  misc_feature (10)..(150): NCBI GI: 121711651 Blast Desc: integral membrane protein, [Aspergillus clavatus NRRL 1] gi|119401592|gb|EAW12015.1| integral membrane protein, [Aspergillus clavatus NRRL 1]
MTSSTRSVLDKVYLVYFLIHIPILFCVDLVPLYPQTLWVPKEAPLHFLGQLREYYIENYNDQFFLPPPAEIPSFFPLYAFLELVFHLPVSVWAVGTLWNRGPKGLSGSAEILFLVYGVETALTTATCMYDAALWDPAVVTVSQKITIVAGLYGSYFALAMLLTVDMYARLLKRVNAVDAAKKTQ

SEQ ID NO: 28395 - DNA, 2202 bp, Muscodor strobelii
  misc_feature: SGI EST ID NO. CUFF.67034.0
  misc_feature: Variant of the nucleotide sequence at SEQ ID NO 28393
catcatacctctaggacaaagtcaaaggtgcacacgttcgctccaaaacttctcttatcgttgtatataaagaccaagtttattcgcatcccagtcacattatcgattcgccatgacatcctccacgcgctctgtgctagacaaagtttatttggtctactttctcatccacattcccatcctcttctgcgtggacctcgtccctctctacccacaaactctctgggtgcccaaagaagcaccgcttcactttctgggacagctgcgcgagtactacatagaaaactacaacgaccaattcttccttccaccacccgcagagatccccagtttcttccctctctacgcctttctcgagctggtctttcaccttccggtctccgtatgggctgtcggcacactctggaatcgcggccccaagggactctccggcagcgccgaaatcctgtttcttgtttacggtgttgagactgccctgactactgctacctgcatgtacgatgctgcgctctgggacccggctgttgtcaccgtgtcgcagaagattaccatcgttgccgggctttacgggtcgtattttgctctggcgatgctgctcactgtcgacatgtacgcgaggctcttgaagcgtgtcaacgctgtggatgccgcgaagaagacgcagtgattagataggggaggagataatgatgtatacatatgctggtgtacgtctgtattcggaggatttcataatgtaaatagtacaccaaacacgtattcttccatgcatgtcaaccgaatcggctccgtggtttggcttgcttttttaaaaaaagaattctccgaacccattgcccagaacgcctctacacgtacagcattacatcttgggacatgggtcggaacatgacacatgctcctacgccctcgtgatctatcgcaaaagatatgtacaagaacactccttccttcccatctttcatagctctgtattccgcattccgcctgttctctagtcccgcttcgagtatccccacccattgccaaccccagcactcttcccattcagtccatatcccaagggcgtagcgcctcccagccccctaccgcgcagtctctgaggtaggatgacaccgaagaagtaagcgccggagccgagaacacccgctatgaaagatacgagggcgtagaatacggtgctcgcgtagatatgtcctcccataccctgccagtcgactttgccctcagtcttggggagcgcgggcgtggggaaccagcggacggagaagctgagcggcagcgggtcgccaataacgagacgtcgcgtttcgcttccctccatgtggctcagggggctcgtgctgtaggcggcgccgctgtctagcacgccgctgtcatgggggtgtatgtggtgctttggggtgctgtggagcaggacgttgaggtgggtgctgatgtgcatgtggctgagttgcagagtgccggcgagggcgaagacgagggggatgtactcgcgttcgaagggcttctcgccgacggcctcgacgtgggcggggggtctggaaggcaggcggcaggcgagaggcgcgtcgttgtggatgtagaactcgagcaggtggaagaaggggtcgtcgatcatggggatggtgcagttgagctccgtctcgatgccgtagtggaactcgagcggcttgctggtctcgttgcagacggggaaggggatccattggatctcgtcgcgggcgtcttggatatgctccccggtctctatgctcctgttcatgcactcgacgctgatgggggcgccatagtggtacgacgggaggatgccctcctgcaacggtgttttggcggcgacggatctagtgagggagaggaaggcgccgacggtcagaactaggcggccgaccgagggcatggttcgaattgggtcgacagtcaagtcgacggtgaggttcgtgttgcgcaagggacagggggctgtgccggttgtagatatcgatactatctagacactatctcaactaacgaatgaatgaatgaagccactacgagtcaaggcggcagtcgggacatgtcgttccttacggcaatcaggcgtcgacccaaagactaggcagcctataaagcgacgatgtgattggaattcgaacgcgatacctgtccaatctgtctagattatcattatcattttttaatgtcgacacctgtcaaatggcg

SEQ ID NO: 28396 - DNA, 906 bp, Muscodor strobelii
  misc_feature: SGI cDNA ID NO. 569742
  misc_feature: Reduced expression when VOC is produced
  misc_feature: Encodes the peptide sequence at SEQ ID NO 28397
atgccctcggtcggccgcctagttctgaccgtcggcgccttcctctccctcactagatccgtcgccgccaaaacaccgttgcaggagggcatcctcccgtcgtaccactatggcgcccccatcagcgtcgagtgcatgaacaggagcatagagaccggggagcatatccaagacgcccgcgacgagatccaatggatccccttccccgtctgcaacgagaccagcaagccgctcgagttccactacggcatcgagacggagctcaactgcaccatccccatgatcgacgaccccttcttccacctgctcgagttctacatccacaacgacgcgcctctcgcctgccgcctgccttccagaccccccgcccacgtcgaggccgtcggcgagaagcccttcgaacgcgagtacatccccctcgtcttcgccctcgccggcactctgcaactcagccacatgcacatcagcacccacctcaacgtcctgctccacagcaccccaaagcaccacatacacccccatgacagcggcgtgctagacagcggcgccgcctacagcacgagccccctgagccacatggagggaagcgaaacgcgacgtctcgttattggcgacccgctgccgctcagcttctccgtccgctggttccccacgcccgcgctccccaagactgagggcaaagtcgactggcagggtatgggaggacatatctacgcgagcaccgtattctacgccctcgtatctttcatagcgggtgttctcggctccggcgcttacttcttcggtgtcatcctacctcagagactgcgcggtagggggctgggaggcgctacgcccttgggatatggactgaatgggaagagtgctggggttggcaatgggtggggatactcgaagcgggactag

SEQ ID NO: 28397 - protein, 301 aa, Muscodor strobelii
  misc_feature: SGI Peptide ID NO. 569742
  misc_feature (1)..(300): NCBI GI: 116194280 Blast Desc: CHGG_03738 [Chaetomium globosum CBS 148.51] gi|88179651|gb|EAQ87119.1| CHGG_03738 [Chaetomium globosum CBS 148.51]
  misc_feature (32)..(298): NCBI GI: 39940642 Blast Desc: MGG_04919 [Magnaporthe grisea 70-15] gi|145010845|gb|EDJ95501.1| MGG_04919 [Magnaporthe grisea 70-15]
  misc_feature (8)..(299): NCBI GI: 46122591 Blast Desc: FG05673.1 [Gibberella zeae PH-1]
  misc_feature (14)..(301): NCBI GI: 256729804 Blast Desc: [Nectria haematococca mpVI 77-13-4]
  misc_feature (32)..(293): NCBI GI: 85068528 Blast Desc: NCU05167 [Neurospora crassa OR74A] gi|28923453|gb|EAA32635.1| conserved [Neurospora crassa OR74A]
  misc_feature (20)..(284): NCBI GI: 171683667 Blast Desc: protein product [Podospora anserina] gi|170941793|emb|CAP67447.1| protein product [Podospora anserina]
  misc_feature (35)..(270): NCBI GI: 189210477 Blast Desc: conserved [Pyrenophora tritici-repentis Pt-1C-BFP] gi|187977663|gb|EDU44289.1| conserved [Pyrenophora tritici-repentis Pt-1C-BFP]
  misc_feature (55)..(270): NCBI GI: 169620802 Blast Desc: SNOG_13607 [Phaeosphaeria nodorum SN15] gi|160704110|gb|EAT79054.2| SNOG_13607 [Phaeosphaeria nodorum SN15]
  misc_feature (35)..(296): NCBI GI: 119480877 Blast Desc: NFIA_085230 [Neosartorya fischeri NRRL 181] gi|119408621|gb|EAW18570.1| conserved [Neosartorya fischeri NRRL 181]
  misc_feature (33)..(215): NCBI GI: 145252676 Blast Desc: An16g05430 [Aspergillus niger] gi|134083405|emb|CAK46883.1| protein product [Aspergillus niger]
  misc_feature: Useful for introducing or modulating the production of volatile compounds
MPSVGRLVLTVGAFLSLTRSVAAKTPLQEGILPSYHYGAPISVECMNRSIETGEHIQDARDEIQWIPFPVCNETSKPLEFHYGIETELNCTIPMIDDPFFHLLEFYIHNDAPLACRLPSRPPAHVEAVGEKPFEREYIPLVFALAGTLQLSHMHISTHLNVLLHSTPKHHIHPHDSGVLDSGAAYSTSPLSHMEGSETRRLVIGDPLPLSFSVRWFPTPALPKTEGKVDWQGMGGHIYASTVFYALVSFIAGVLGSGAYFFGVILPQRLRGRGLGGATPLGYGLNGKSAGVGNGWGYSKRD

SEQ ID NO: 28398 - DNA, 2034 bp, Muscodor strobelii
  misc_feature: SGI EST ID NO. CUFF.67034.1
  misc_feature: Variant of the nucleotide sequence at SEQ ID NO 28396
caggtgtcgacattaaaaaatgataatgataatctagacagattggacaggtatcgcgttcgaattccaatcacatcgtcgctttataggctgcctagtctttgggtcgacgcctgattgccgtaaggaacgacatgtcccgactgccgccttgactcgtagtggcttcattcattcattcgttagttgagatagtgtctagatagtatcgatatctacaaccggcacagccccctgtcccttgcgcaacacgaacctcaccgtcgacttgactgtcgacccaattcgaaccatgccctcggtcggccgcctagttctgaccgtcggcgccttcctctccctcactagatccgtcgccgccaaaacaccgttgcaggagggcatcctcccgtcgtaccactatggcgcccccatcagcgtcgagtgcatgaacaggagcatagagaccggggagcatatccaagacgcccgcgacgagatccaatggatccccttccccgtctgcaacgagaccagcaagccgctcgagttccactacggcatcgagacggagctcaactgcaccatccccatgatcgacgaccccttcttccacctgctcgagttctacatccacaacgacgcgcctctcgcctgccgcctgccttccagaccccccgcccacgtcgaggccgtcggcgagaagcccttcgaacgcgagtacatccccctcgtcttcgccctcgccggcactctgcaactcagccacatgcacatcagcacccacctcaacgtcctgctccacagcaccccaaagcaccacatacacccccatgacagcggcgtgctagacagcggcgccgcctacagcacgagccccctgagccacatggagggaagcgaaacgcgacgtctcgttattggcgacccgctgccgctcagcttctccgtccgctggttccccacgcccgcgctccccaagactgagggcaaagtcgactggcagggtatgggaggacatatctacgcgagcaccgtattctacgccctcgtatctttcatagcgggtgttctcggctccggcgcttacttcttcggtgtcatcctacctcagagactgcgcggtagggggctgggaggcgctacgcccttgggatatggactgaatgggaagagtgctggggttggcaatgggtggggatactcgaagcgggactagagaacaggcggaatgcggaatacagagctatgaaagatgggaaggaaggagtgttcttgtacatatcttttgcgatagatcacgagggcgtaggagcatgtgtcatgttccgacccatgtcccaagatgtaatgctgtacgtgtagaggcgttctgggcaatgggttcggagaattctttttttaaaaaagcaagccaaaccacggagccgattcggttgacatgcatggaagaatacgtgtttggtgtactatttacattatgaaatcctccgaatacagacgtacaccagcatatgtatacatcattatctcctcccctatctaatcactgcgtcttcttcgcggcatccacagcgttgacacgcttcaagagcctcgcgtacatgtcgacagtgagcagcatcgccagagcaaaatacgacccgtaaagcccggcaacgatggtaatcttctgcgacacggtgacaacagccgggtcccagagcgcagcatcgtacatgcaggtagcagtagtcagggcagtctcaacaccgtaaacaagaaacaggatttcggcgctgccggagagtcccttggggccgcgattccagagtgtgccgacagcccatacggagaccggaaggtgaaagaccagctcgagaaaggcgtagagagggaagaaactggggatctctgcgggtggtggaaggaagaattggtcgttgtagttttctatgtagtactcgcgcagctgtcccagaaagtgaagcggtgcttctttgggcacccagagagtttgtgggtagagagggacgaggtccacgcctattcaatggttagctgggtgatctatga

SEQ ID NO: 28399 - DNA, 909 bp, Muscodor strobelii
  misc_feature: SGI cDNA ID NO. 569743
  misc_feature: Reduced expression when VOC is produced
  misc_feature: Encodes the peptide sequence at SEQ ID NO 28400
atggcgaaagcaaagaccgaactcgataaactctacaacacctacacagaggacttcgacgaagagaagacgcagaaattcatcgctgattcggagaggattatgagagcaccggctacggtgatgctggagagagctgggcttggtaaggagacgaaaatgccgtttagacttctggatcatggctgtgggactggggttgttgctgcgagcctacatgatcatgtggataaaagggtgttgggagatagtacgatgctttgtgcggattttaatgagagttttgttaagaagttgaggtggcgtgtgggcaagatgggatgggatggtgttgagatgagggttttggatgctcagaactctggtcttcctgatgagacgttctcgcacgtcacgctgaatttcgctatgcatgttataccggatcctgaggccgtggttcgagaggcaatgcgagttcttcaaccaggcggcatcttcgccttcacagtctggcacaaagccaatttgggatgggtccccgacctccggtcaagcttcgaggcgctgcctttcgacgcaccgcttcctgatcctgtgcccatggctgctaatgggaaaccggagtgggtggacccagagactgttcaacagccactgttgagatacgggtttgaggatgttagggtgggaacggatgtccatgtgcagaggattgaagacgctgcggattatgtaaggatctttgggatgatgaaaaattggatggtcagtgcgtattggagtgaggagagtaaggctcgggagatggtgaaggatggtggccttgatgcgcatattgagaagcatttgcgtgagaagtatgagggaaagggatgggatttgacttggacttatatcactgttacttgtcggaagccaaaggagtga

SEQ ID NO: 28400 - protein, 302 aa, Muscodor strobelii
  misc_feature: SGI Peptide ID NO. 569743
  misc_feature (59)..(162): Pfam Id: PF08241 Pfam Desc: Methyltransferase domain
  misc_feature (16)..(226): Pfam Id: PF01209 Pfam Desc: ubiE/COQ5 methyltransferase family
  misc_feature (59)..(160): Pfam Id: PF08242 Pfam Desc: Methyltransferase domain
  misc_feature (55)..(160): Pfam Id: PF01209 Pfam Desc: ubiE/COQ5 methyltransferase family
  misc_feature (27)..(301): NCBI GI: 256724081 Blast Desc: NECHADRAFT_51474 [Nectria haematococca mpVI 77-13-4]
  misc_feature (2)..(298): NCBI GI: 256729805 Blast Desc: NECHADRAFT_95408 [Nectria haematococca mpVI 77-13-4]
  misc_feature (8)..(298): NCBI GI: 46122589 Blast Desc: FG05672.1 [Gibberella zeae PH-1]
  misc_feature (2)..(300): NCBI GI: 116195340 Blast Desc: CHGG_04268 [Chaetomium globosum CBS 148.51] gi|88180181|gb|EAQ87649.1| CHGG_04268 [Chaetomium globosum CBS 148.51]
  misc_feature (3)..(300): NCBI GI: 171691316 Blast Desc: protein product [Podospora anserina] gi|170945606|emb|CAP71719.1| protein product [Podospora anserina]
  misc_feature (31)..(285): NCBI GI: 121715588 Blast Desc: UbiE/COQ5 family methyltransferase, [Aspergillus clavatus NRRL 1] gi|119403560|gb|EAW13977.1| UbiE/COQ5 family methyltransferase, [Aspergillus clavatus NRRL 1]
  misc_feature (26)..(301): NCBI GI: 119194979 Blast Desc: [Coccidioides immitis RS]
  misc_feature (14)..(299): NCBI GI: 255955603 Blast Desc: Pc21g15440 [Penicillium chrysogenum Wisconsin 54-1255] gi|211590265|emb|CAP96441.1| Pc21g15440 [Penicillium chrysogenum Wisconsin 54-1255]
  misc_feature (31)..(285): NCBI GI: 119481109 Blast Desc: UbiE/COQ5 family methyltransferase, [Neosartorya fischeri NRRL 181] gi|119408737|gb|EAW18686.1| UbiE/COQ5 family methyltransferase, [Neosartorya fischeri NRRL 181]
  misc_feature (33)..(300): NCBI GI: 146323933 Blast Desc: AFUA_4G14510 [Aspergillus fumigatus Af293] gi|129557463|gb|EAL89344.2| AFUA_4G14510 [Aspergillus fumigatus Af293] gi|159125719|gb|EDP50836.1| AFUB_071760 [Aspergillus
  misc_feature: Useful for introducing or modulating the production of volatile compounds
MAKAKTELDKLYNTYTEDFDEEKTQKFIADSERIMRAPATVMLERAGLGKETKMPFRLLDHGCGTGVVAASLHDHVDKRVLGDSTMLCADFNESFVKKLRWRVGKMGWDGVEMRVLDAQNSGLPDETFSHVTLNFAMHVIPDPEAVVREAMRVLQPGGIFAFTVWHKANLGWVPDLRSSFEALPFDAPLPDPVPMAANGKPEWVDPETVQQPLLRYGFEDVRVGTDVHVQRIEDAADYVRIFGMMKNWMVSAYWSEESKAREMVKDGGLDAHIEKHLREKYEGKGWDLTWTYITVTCRKPKE

SEQ ID NO: 28401 - DNA, 1088 bp, Muscodor strobelii
  misc_feature: SGI EST ID NO. CUFF.67020.0
  misc_feature: Variant of the nucleotide sequence at SEQ ID NO 28399
cagacactcagacactaaataaacagtcatttaagcatctctctcactatctatcattccgtgtttactcaccaacttgaacccagaaactcccaaaatggcgaaagcaaagaccgaactcgataaactctacaacacctacacagaggacttcgacgaagagaagacgcagaaattcatcgctgattcggagaggattatgagagcaccggctacggtgatgctggagagagctgggcttggtaaggagacgaaaatgccgtttagacttctggatcatggctgtgggactggggttgttgctgcgagcctacatgatcatgtggataaaagggtgttgggagatagtacgatgctttgtgcggattttaatgagagttttgttaagaagttgaggtggcgtgtgggcaagatgggatgggatggtgttgagatgagggttttggatgctcagaactctggtcttcctgatgagacgttctcgcacgtcacgctgaatttcgctatgcatgttataccggatcctgaggccgtggttcgagaggcaatgcgagttcttcaaccaggcggcatcttcgccttcacagtctggcacaaagccaatttgggatgggtccccgacctccggtcaagcttcgaggcgctgcctttcgacgcaccgcttcctgatcctgtgcccatggctgctaatgggaaaccggagtgggtggacccagagactgttcaacagccactgttgagatacgggtttgaggatgttagggtgggaacggatgtccatgtgcagaggattgaagacgctgcggattatgtaaggatctttgggatgatgaaaaattggatggtcagtgcgtattggagtgaggagagtaaggctcgggagatggtgaaggatggtggccttgatgcgcatattgagaagcatttgcgtgagaagtatgagggaaagggatgggatttgacttggacttatatcactgttacttgtcggaagccaaaggagtgagtataagatgggactctgctattaactgttcaatggccaaatagcatatgtttagaatacgacttgagttttgtatccgtat

SEQ ID NO: 28402 - DNA, 4239 bp, Muscodor strobelii
  misc_feature: SGI cDNA ID NO. 569744
  misc_feature: Reduced expression when VOC is produced
  misc_feature: Encodes the peptide sequence at SEQ ID NO 28403
atgtcggcctttgctcagaccccatctcatgccttgcccggtgcatttctgaacacacctgctgttgcgtcgcgctttggcgccgcatcgcagcaggatcccgtgcgtcgtcgactcttcaaccagccctcaacctcgtcaggcgcgcagcctgccatctttggccaggactcatcactcgctctgacccagcccgcatcgacctcggtcaacaacggcgccctcacccaatcctcgcagagtgtggcggcggcagctccccagcctccactggccaaagcggccgccttcgtcaacaatgcgctcaacatagatcagctctaccctgagcttgatgcttactgcagacagatctcatctgattacgacataacccatatcgattctccctgggctcccttccaaaagacccacaagtatgacatccctcagagcgtcctcgagcagttcaaccgagcagaggtctcgaccaagatgggtttatttgctgagctcaaccacgcctgggtgactatagacaactgcttgtatctctgggactacacacatccgaatccagaacttattggttacgaggagagtcagcacagcctgactgccgtcaagctggtggcaccgaagccaggcgtctttaatgaagtcatcagtcatattcttgttgttgccagcacatcagagatcgtcctgctaggagtcgccgcccactcggcccccaatggatcgagaaccgtggagctctaccagacaaagatggccctgcccttgcgaggaaccggcgccagccacattgccagctcggcaaacgggcgcatcttctttgccagccgctctgacaacgacatctacgagctatactaccaacaagaggagaaatggttctctagtaggactggcaagatcaatcacacatcccaaggctggggcgccgttgttgctacgccgagtaacattctctggaacaagtcggcgactgagcacgtggaagacattgttgtggatgatagtcgcaatttgctatatgcattgtctagtacgtcgacggtgcggacgtaccaccttcaggcaccagatcggctggccaaggccatcgagaagacgaaagacgagttcctccgggatattgcccatgccttgagcggcggatctcctctgctcaataatcgaatggagatcatatctattagccctgtctccgccacggaagataataaggtgcatctgatggctctgactaacactggctgtcgtttgttcgtgagtgctacgagcgcctcatcctacatgatgaactccactggtccccctcagagcatgcaggtgcaatgcatcaaatttcctcccagcgaggctggatcgcggaggtcgcggggagacccgttcaatgatcccagcgaccagatcaacgtccagtccactgccttacagacgagtcgcctgggaattcgttttccacctgggtactttttggatttcgttaccaagcccgatcaacccaccattgattacttgttcgtctccgcgcccgatactggtcgaataaagaacaacaatcgcgcgcaacaacaaccaaggtaccatgagcaaggcagctgggtagaaataaacagcaaggcagaagacgttggtctaattacaaagccatttgccgctacttcccaacctaaggggttcgggaacgagcttgctgtccagttcgataaccccaacggcagcgaatttgcgattctcactaatgatggggtccacgtcattcgacgtcgcaggcttgtagatctctttgcatcggctattaggactactgccggggaagaaggtctcaaagctgaggtcaacaagtttcaaaatgcttatggccgcgtagagaccattaccgctgcgctcgcagtcgcttgtcggcaaggagacagtggtcgattcagcgtcggacgcagcgctatcgaccaatccacgcttgaccgtgcgaagcaagtctttatcaactttggtggtaatcccactctccctgaacaagacggacaacctgcaaccgtggagatggtccgcccttcttcccgccatggcgccatcacattatatctcagcagagttatccgttctctgtggaagtcaaaagttgtctctgtcagtgtgagtggcgctggtggcctcgctgttggcagtcctgtccctcagcccaaattgagagaggtgcaagatagtgttattgctcttagatccttcctcaatgacaacaggtcattcatccaaggtctatccgggcccgcagatctacgacgagctggaactaagcaagaggagcttgctttccaaggcgaacaccaggccatgcatgccgtcgaggtgctcatgaccgatatcacggaaggtatttccttcgtaaccacattgtttgaagagagggtcgtcgacatctatgctcgacttgacgacgcggctcgattggagcttcaggaactcacatatgaacgacttttctcccagagctctggcaaggaactggccaaagttcttgtcaaagccattgttaaccgcaatattgaaaatggttccaatgtggagacggttgcggatgccttgcgaaggaaatgcggaagcttctgcagtgcagacgacgtagtcatcttcaaagcgcaagagcaattgaagaaggcctctgaaccgtctctaaacccaactacctcccgaacccttctctatgaaagtctcaagcactttcaaaaggttgcaagtagtctcacacatgccaatctcgagtccgcaattcagcagtatgttgccctgcaatactatgctggtgcgattcagctttgtctggtggttgccgatgcaaaagatcgaggtaagactgctttacaatgggtcaatgacgagaaaccggcgaacgacccgagagccaaggcattcgacgagcgtaagacatgctatgatttgattcatcgtgtgcttttagatctggatgccgcattcaaccgagagccagagaccgtggatggcagaccgaccctcattgcgactaagcacaaagaagcgtacgacgtggtcagcaactcgacggatgaagtcttccacatggacctctatgattggtatctacaacaaggatggtccgaccgtctactggagatagagtccaaatatgtaatcactttcctccggcgactctccacccaagacttggcccatgccgacttactctgtcgcttctataccatgcgtggtaattactacgaggcagccaaagtacaatacgaccttgcccaatccgacttttctattggcataaaagagcgactccatctactcagcagagcgaagaccaatgcgagtgtgatgacgcctggtgtgagtcgccaagaacagcaacttctgagtcacggagtcaccgagctcttagacgtcgcacacattcaagacgatttgctagagagactaagattagacgagcggattcctcctgagaacctggatgatatcgaaaccacttgtgacggcaagattcttcctctgactgacttattcaataagtatgcggaccaagctgaatacttcgacttgtgtttgatcatcttccatgttgccgacttccgaaatcccacgactatctctcaaacgtggggaaagctcattgagcaaacgcatgagaaggtggccgagcaatgggccgtttacaatagtcaaaagggagcagcaaggccagcagacacaccaccacagccccatgagatgcttttcactcaaattgaggatatttgccaccgctctagtaatgattccttcatctttccggtgccgaccctgatgccagagctttgtcgttatgctcttgaaaatggacaggatgggcggatgggcgctgacgtcaactggccggtccaaatatttcttcatctgggcgtaagccatgacttagttgtacgagtgcttgaatccatgtttgaagcacaagaaataccattccgagcaagcggccggacgcgagtggtagaatggatctgcaatgctgtgagccaatgggttcgtaccattgatagacatgggcggccagaatcgagattagagccatgggtgggcgagctcatggctgagtgtgatagctgggctacggctaacgttcgcagcactaatgagggtggtgcagaccctcgtgatattgcgcgtgtggtcagggatctgaaaagatcagttgatggcttagtaatggcacccgtgaacgggaacaggagtattggcttcttctaa

SEQ ID NO: 28403 - protein, 1412 aa, Muscodor strobelii
  misc_feature: SGI Peptide ID NO. 569744
  misc_feature (81)..(1378): Pfam Id: PF03177 Pfam Desc: Non-repetitive/WGA-negative nucleoporin
  misc_feature (683)..(1210): Pfam Id: PF03177 Pfam Desc: Non-repetitive/WGA-negative nucleoporin
  misc_feature (81)..(423): Pfam Id: PF03177 Pfam Desc: Non-repetitive/WGA-negative nucleoporin
  misc_feature (1)..(1398): NCBI GI: 46122587 Blast Desc: FG05671.1 [Gibberella zeae PH-1]
  misc_feature (1)..(1398): NCBI GI: 256729806 Blast Desc: [Nectria haematococca mpVI 77-13-4]
  misc_feature (7)..(1399): NCBI GI: 116195280 Blast Desc: CHGG_04238 [Chaetomium globosum CBS 148.51] gi|88180151|gb|EAQ87619.1| CHGG_04238 [Chaetomium globosum CBS 148.51]
  misc_feature (6)..(1396): NCBI GI: 39940290 Blast Desc: MGG_05095 [Magnaporthe grisea 70-15] gi|145010650|gb|EDJ95306.1| MGG_05095 [Magnaporthe grisea 70-15]
  misc_feature (7)..(1406): NCBI GI: 85083040 Blast Desc: NCU11296 [Neurospora crassa OR74A] gi|28918116|gb|EAA27796.1| conserved [Neurospora crassa OR74A]
  misc_feature (7)..(1399): NCBI GI: 171691280 Blast Desc: protein product [Podospora anserina] gi|170945588|emb|CAP71701.1| protein product [Podospora anserina]
  misc_feature (3)..(1347): NCBI GI: 156032631 Blast Desc: SS1G_14013 [Sclerotinia sclerotiorum 1980] gi|154699415|gb|EDN99153.1| SS1G_14013 [Sclerotinia sclerotiorum 1980]
  misc_feature (1)..(1346): NCBI GI: 225559150 Blast Desc: nucleoporin Nup157/170 [Ajellomyces capsulatus G186AR]
  misc_feature (90)..(1346): NCBI GI: 261204371 Blast Desc: non-repetitive nucleoporin [Ajellomyces dermatitidis SLH14081] gi|239587184|gb|EEQ69827.1| non-repetitive nucleoporin [Ajellomyces dermatitidis SLH14081]
  misc_feature (1)..(1346): NCBI GI: 226291683 Blast Desc: nucleoporin Nup157/170 [Paracoccidioides brasiliensis Pb18]
  misc_feature: Useful for introducing or modulating the production of volatile compounds
MSAFAQTPSHALPGAFLNTPAVASRFGAASQQDPVRRRLFNQPSTSSGAQPAIFGQDSSLALTQPASTSVNNGALTQSSQSVAAAAPQPPLAKAAAFVNNALNIDQLYPELDAYCRQISSDYDITHIDSPWAPFQKTHKYDIPQSVLEQFNRAEVSTKMGLFAELNHAWVTIDNCLYLWDYTHPNPELIGYEESQHSLTAVKLVAPKPGVFNEVISHILVVASTSEIVLLGVAAHSAPNGSRTVELYQTKMALPLRGTGASHIASSANGRIFFASRSDNDIYELYYQQEEKWFSSRTGKINHTSQGWGAVVATPSNILWNKSATEHVEDIVVDDSRNLLYALSSTSTVRTYHLQAPDRLAKAIEKTKDEFLRDIAHALSGGSPLLNNRMEIISISPVSATEDNKVHLMALTNTGCRLFVSATSASSYMMNSTGPPQSMQVQCIKFPPSEAGSRRSRGDPFNDPSDQINVQSTALQTSRLGIRFPPGYFLDFVTKPDQPTIDYLFVSAPDTGRIKNNNRAQQQPRYHEQGSWVEINSKAEDVGLITKPFAATSQPKGFGNELAVQFDNPNGSEFAILTNDGVHVIRRRRLVDLFASAIRTTAGEEGLKAEVNKFQNAYGRVETITAALAVACRQGDSGRFSVGRSAIDQSTLDRAKQVFINFGGNPTLPEQDGQPATVEMVRPSSRHGAITLYLSRVIRSLWKSKVVSVSVSGAGGLAVGSPVPQPKLREVQDSVIALRSFLNDNRSFIQGLSGPADLRRAGTKQEELAFQGEHQAMHAVEVLMTDITEGISFVTTLFEERVVDIYARLDDAARLELQELTYERLFSQSSGKELAKVLVKAIVNRNIENGSNVETVADALRRKCGSFCSADDVVIFKAQEQLKKASEPSLNPTTSRTLLYESLKHFQKVASSLTHANLESAIQQYVALQYYAGAIQLCLVVADAKDRGKTALQWVNDEKPANDPRAKAFDERKTCYDLIHRVLLDLDAAFNREPETVDGRPTLIATKHKEAYDVVSNSTDEVFHMDLYDWYLQQGWSDRLLEIESKYVITFLRRLSTQDLAHADLLCRFYTMRGNYYEAAKVQYDLAQSDFSIGIKERLHLLSRAKTNASVMTPGVSRQEQQLLSHGVTELLDVAHIQDDLLERLRLDERIPPENLDDIETTCDGKILPLTDLFNKYADQAEYFDLCLIIFHVADFRNPTTISQTWGKLIEQTHEKVAEQWAVYNSQKGAARPADTPPQPHEMLFTQIEDICHRSSNDSFIFPVPTLMPELCRYALENGQDGRMGADVNWPVQIFLHLGVSHDLVVRVLESMFEAQEIPFRASGRTRVVEWICNAVSQWVRTIDRHGRPESRLEPWVGELMAECDSWATANVRSTNEGGADPRDIARVVRDLKRSVDGLVMAPVNGNRSIGFF

SEQ ID NO: 28404 - DNA, 5051 bp, Muscodor strobelii
  misc_feature: SGI EST ID NO. CUFF.67086.1
  misc_feature: Variant of the nucleotide sequence at SEQ ID NO 28402
cagaggcatcgcatcgcatcgcatcgtcaacaagcacgctcttctgagacctccaccactgtggcctgacgacggtgctgttgacgacctcgcgcaattaccctctaaatatcccatccaaccattttccgccgtccagagcacatccatcctgggacaacaatcgctcgtgccgccccgtcagcgcaaacccccgtcgtcgttccgcccgaaccatcacgactagcttcgacatctgccgttcatgatccgatagcttcactttcccgcccagctgccaatttggctggctcgctctcctcgcatccaccttctttcttcacgtggctctcagctttgaacctgagttctgagctgtgcaagtcacttgaggacttcagcttgtcagtcttgatgccgtcttgactctagactgtcacggaccttcgttgactgaacaacactggacgcacaccaccgcgccaccatgtcggcctttgctcagaccccatctcatgccttgcccggtgcatttctgaacacacctgctgttgcgtcgcgctttggcgccgcatcgcagcaggatcccgtgcgtcgtcgactcttcaaccagccctcaacctcgtcaggcgcgcagcctgccatctttggccaggactcatcactcgctctgacccagcccgcatcgacctcggtcaacaacggcgccctcacccaatcctcgcagagtgtggcggcggcagctccccagcctccactggccaaagcggccgccttcgtcaacaatgcgctcaacatagatcagctctaccctgagcttgatgcttactgcagacagatctcatctgattacgacataacccatatcgattctccctgggctcccttccaaaagacccacaagtatgacatccctcagagcgtcctcgagcagttcaaccgagcagaggtctcgaccaagatgggtttatttgctgagctcaaccacgcctgggtgactatagacaactgcttgtatctctgggactacacacatccgaatccagaacttattggttacgaggagagtcagcacagcctgactgccgtcaagctggtggcaccgaagccaggcgtctttaatgaagtcatcagtcatattcttgttgttgccagcacatcagagatcgtcctgctaggagtcgccgcccactcggcccccaatggatcgagaaccgtggagctctaccagacaaagatggccctgcccttgcgaggaaccggcgccagccacattgccagctcggcaaacgggcgcatcttctttgccagccgctctgacaacgacatctacgagctatactaccaacaagaggagaaatggttctctagtaggactggcaagatcaatcacacatcccaaggctggggcgccgttgttgctacgccgagtaacattctctggaacaagtcggcgactgagcacgtggaagacattgttgtggatgatagtcgcaatttgctatatgcattgtctagtacgtcgacggtgcggacgtaccaccttcaggcaccagatcggctggccaaggccatcgagaagacgaaagacgagttcctccgggatattgcccatgccttgagcggcggatctcctctgctcaataatcgaatggagatcatatctattagccctgtctccgccacggaagataataaggtgcatctgatggctctgactaacactggctgtcgtttgttcgtgagtgctacgagcgcctcatcctacatgatgaactccactggtccccctcagagcatgcaggtgcaatgcatcaaatttcctcccagcgaggctggatcgcggaggtcgcggggagacccgttcaatgatcccagcgaccagatcaacgtccagtccactgccttacagacgagtcgcctgggaattcgttttccacctgggtactttttggatttcgttaccaagcccgatcaacccaccattgattacttgttcgtctccgcgcccgatactggtcgaataaagaacaacaatcgcgcgcaacaacaaccaaggtaccatgagcaaggcagctgggtagaaataaacagcaaggcagaagacgttggtctaattacaaagccatttgccgctacttcccaacctaaggggttcgggaacgagcttgctgtccagttcgataaccccaacggcagcgaatttgcgattctcactaatgatggggtccacgtcattcgacgtcgcaggcttgtagatctctttgcatcggctattaggactactgccggggaagaaggtctcaaagctgaggtcaacaagtttcaaaatgcttatggccgcgtagagaccattaccgctgcgctcgcagtcgcttgtcggcaaggagacagtggtcgattcagcgtcggacgcagcgctatcgaccaatccacgcttgaccgtgcgaagcaagtctttatcaactttggtggtaatcccactctccctgaacaagacggacaacctgcaaccgtggagatggtccgcccttcttcccgccatggcgccatcacattatatctcagcagagttatccgttctctgtggaagtcaaaagttgtctctgtcagtgtgagtggcgctggtggcctcgctgttggcagtcctgtccctcagcccaaattgagagaggtgcaagatagtgttattgctcttagatccttcctcaatgacaacaggtcattcatccaaggtctatccgggcccgcagatctacgacgagctggaactaagcaagaggagcttgctttccaaggcgaacaccaggccatgcatgccgtcgaggtgctcatgaccgatatcacggaaggtatttccttcgtaaccacattgtttgaagagagggtcgtcgacatctatgctcgacttgacgacgcggctcgattggagcttcaggaactcacatatgaacgacttttctcccagagctctggcaaggaactggccaaagttcttgtcaaagccattgttaaccgcaatattgaaaatggttccaatgtggagacggttgcggatgccttgcgaaggaaatgcggaagcttctgcagtgcagacgacgtagtcatcttcaaagcgcaagagcaattgaagaaggcctctgaaccgtctctaaacccaactacctcccgaacccttctctatgaaagtctcaagcactttcaaaaggttgcaagtagtctcacacatgccaatctcgagtccgcaattcagcagtatgttgccctgcaatactatgctggtgcgattcagctttgtctggtggttgccgatgcaaaagatcgaggtaagactgctttacaatgggtcaatgacgagaaaccggcgaacgacccgagagccaaggcattcgacgagcgtaagacatgctatgatttgattcatcgtgtgcttttagatctggatgccgcattcaaccgagagccagagaccgtggatggcagaccgaccctcattgcgactaagcacaaagaagcgtacgacgtggtcagcaactcgacggatgaagtcttccacatggacctctatgattggtatctacaacaaggatggtccgaccgtctactggagatagagtccaaatatgtaatcactttcctccggcgactctccacccaagacttggcccatgccgacttactctgtcgcttctataccatgcgtggtaattactacgaggcagccaaagtacaatacgaccttgcccaatccgacttttctattggcataaaagagcgactccatctactcagcagagcgaagaccaatgcgagtgtgatgacgcctggtgtgagtcgccaagaacagcaacttctgagtcacggagtcaccgagctcttagacgtcgcacacattcaagacgatttgctagagagactaagattagacgagcggattcctcctgagaacctggatgatatcgaaaccacttgtgacggcaagattcttcctctgactgacttattcaataagtatgcggaccaagctgaatacttcgacttgtgtttgatcatcttccatgttgccgacttccgaaatcccacgactatctctcaaacgtggggaaagctcattgagcaaacgcatgagaaggtggccgagcaatgggccgtttacaatagtcaaaagggagcagcaaggccagcagacacaccaccacagccccatgagatgcttttcactcaaattgaggatatttgccaccgctctagtaatgattccttcatctttccggtgccgaccctgatgccagagctttgtcgttatgctcttgaaaatggacaggatgggcggatgggcgctgacgtcaactggccggtccaaatatttcttcatctgggcgtaagccatgacttagttgtacgagtgcttgaatccatgtttgaagcacaagaaataccattccgagcaagcggccggacgcgagtggtagaatggatctgcaatgctgtgagccaatgggttcgtaccattgatagacatgggcggccagaatcgagattagagccatgggtgggcgagctcatggctgagtgtgatagctgggctacggctaacgttcgcagcactaatgagggtggtgcagaccctcgtgatattgcgcgtgtggtcagggatctgaaaagatcagttgatggcttagtaatggcacccgtgaacgggaacaggagtattggcttcttctaaaaagacttgtaatatgttacccagattcggcgaagctcgtggcacaggaataagagatgttggcgttgtcggtatgcatgttctgctagtttgaagcacttggagatttgacaagaagatcagcggcatgaagcatacatggcggttcggacattgagagaaatgttaaatataccacgtctgaatagcattgcgattctgcgaccaccgagaaacggtatcacggctgtgtaatgctgtgagtgatccaaccctgtctttcaggaatatgctattctctattttccccgccccttaaacgtagaaccacagcaagtaagctcgaactatgttgcctttactgtcg

SEQ ID NO: 28405 - DNA, 987 bp, Muscodor strobelii
  misc_feature: SGI cDNA ID NO. 569745
  misc_feature: Encodes the peptide sequence at SEQ ID NO 28406
atggaatccgttcagaacgccaccgcgggcgtatcgccagcagtgcaactcggcctcgctgccgtgggtgccctgtggatcggctccacggctcttagcatcttccgcttcgtgatgagcacgttcgttctgagtggcgtgaacctacgaaaatatggcaaaaagggcacatgggcaattatcacaggcgcgtctgatggcctgggcaaggagtatgccacccaactcgcccgcaaaggtttcaacctcgtcctagtatcccgcactctgtccaagctcgaagcgctagcaaaggaactctcgggagtcgaaaccaaagtcctcgacatggactttgcggccgacaagacctccgactacgaacgactagctaagctggtcgacggcctcgacgttggtatcctcatcaacaacgtcggccagagccacagcatcccggttccgttcacccagaccgatagcgaggaaatggagaatatcatcacaatcaattgcaagggcaccctgaaagttacacggatcgtggcccccggcatgcagagccggaagcgtggtctgattcttaccatgggcagcttcggtggctggatgcctatgcccttcctagccacgtactcgggcagcaaggcgttcctgcagttttggtctaccgccctggctgccgaactcaaacctgataacgtggatgtacagctcgtgctgagctacctggtcaccacggccatgagcaaagtgcgccgcccaactgctatagtccccaatcccaggcagttcatccgtgcagctcttgggaagatcgggtctggcagctggcaggccactgggtacacttacacaccgttctggagccatgcccttatggcgtactttgttgagagcacgattggcattggtagctacatcgggttgaagttcaaccgctccatgcatgtcgatatccgcaaccgggccctaagaaaggcggcacgtgaggcgaagaagaattaa

SEQ ID NO: 28406 - protein, 328 aa, Muscodor strobelii
  misc_feature: SGI Peptide ID NO. 569745
  misc_feature (57)..(224): Pfam Id: PF00106 Pfam Desc: short chain dehydrogenase
  misc_feature (1)..(327): NCBI GI: 39940288 Blast Desc: MGG_05096 [Magnaporthe grisea 70-15] gi|218526568|sp|A4QTE3.1|MKAR_MAGGR RecName: Full=3-ketoacyl-CoA reductase; Short=3-ketoreductase; Short=KAR; AltName: MGG_05096
  misc_feature (1)..(328): NCBI GI: 85083036 Blast Desc: NCU11297 [Neurospora crassa OR74A] gi|74628423|sp|Q7RYE5.1|MKAR_NEUCR RecName: Full=3-ketoacyl-CoA reductase; Short=3-ketoreductase; Short=KAR; AltName: NCU11297
  misc_feature (10)..(328): NCBI GI: 218526905 Blast Desc: NCU11297 [Neurospora crassa OR74A] gi|74628423|sp|Q7RYE5.1|MKAR_NEUCR RecName: Full=3-ketoacyl-CoA reductase; Short=3-ketoreductase; Short=KAR; AltName: NCU11297
  misc_feature (11)..(328): NCBI GI: 171691278 Blast Desc: protein product [Podospora anserina] gi|170945587|emb|CAP71700.1| protein product [Podospora anserina]
  misc_feature (14)..(327): NCBI GI: 154298612 Blast Desc: BC1G_11561 [Botryotinia fuckeliana B05.10] gi|218526564|sp|A6SG70.1|MKAR_BOTFB RecName: Full=3-ketoacyl-CoA reductase; Short=3-ketoreductase; Short=KAR; AltName: BC1G_11561
  misc_feature (11)..(328): NCBI GI: 116195282 Blast Desc: conserved [Chaetomium globosum CBS 148.51] gi|121783831|sp|Q2H1V7.1|MKAR_CHAGB RecName: Full=3-ketoacyl-CoA reductase; Short=3-ketoreductase; Short=KAR; AltName: conserved
  misc_feature (11)..(327): NCBI GI: 156032629 Blast Desc: SS1G_14012 [Sclerotinia sclerotiorum 1980] gi|218526573|sp|A7F8T1.1|MKAR_SCLS1 RecName: Full=3-ketoacyl-CoA reductase; Short=3-ketoreductase; Short=KAR; AltName: SS1G_14012
  misc_feature (1)..(313): NCBI GI: 46122585 Blast Desc: FG05670.1 [Gibberella zeae PH-1]
  misc_feature (1)..(313): NCBI GI: 256729807 Blast Desc: [Nectria haematococca mpVI 77-13-4]
  misc_feature (43)..(327): NCBI GI: 261352598 Blast Desc: estradiol 17-beta-dehydrogenase 12-B [Verticillium albo-atrum VaMs.102]
  misc_feature (56)..(310): SWISSPROT Homolog: EC 1.1.1.62 Estradiol 17-beta-dehydrogenase
MESVQNATAGVSPAVQLGLAAVGALWIGSTALSIFRFVMSTFVLSGVNLRKYGKKGTWAIITGASDGLGKEYATQLARKGFNLVLVSRTLSKLEALAKELSGVETKVLDMDFAADKTSDYERLAKLVDGLDVGILINNVGQSHSIPVPFTQTDSEEMENIITINCKGTLKVTRIVAPGMQSRKRGLILTMGSFGGWMPMPFLATYSGSKAFLQFWSTALAAELKPDNVDVQLVLSYLVTTAMSKVRRPTAIVPNPRQFIRAALGKIGSGSWQATGYTYTPFWSHALMAYFVESTIGIGSYIGLKFNRSMHVDIRNRALRKAAREAKKN

SEQ ID NO: 28407 - DNA, 1324 bp, Muscodor strobelii
  misc_feature: SGI EST ID NO. CUFF.67031.1
  misc_feature: Variant of the nucleotide sequence at SEQ ID NO 28405
ttgcattaggctacacacactttatttacggtggaggggtatcatcccagcctttcctcgaaccatctatcgactatttgcaacttgccatcttgcatttgaatcgaccaaaaatggaatccgttcagaacgccaccgcgggcgtatcgccagcagtgcaactcggcctcgctgccgtgggtgccctgtggatcggctccacggctcttagcatcttccgcttcgtgatgagcacgttcgttctgagtggcgtgaacctacgaaaatatggcaaaaagggcacatgggcaattatcacaggcgcgtctgatggcctgggcaaggagtatgccacccaactcgcccgcaaaggtttcaacctcgtcctagtatcccgcactctgtccaagctcgaagcgctagcaaaggaactctcgggagtcgaaaccaaagtcctcgacatggactttgcggccgacaagacctccgactacgaacgactagctaagctggtcgacggcctcgacgttggtatcctcatcaacaacgtcggccagagccacagcatcccggttccgttcacccagaccgatagcgaggaaatggagaatatcatcacaatcaattgcaagggcaccctgaaagttacacggatcgtggcccccggcatgcagagccggaagcgtggtctgattcttaccatgggcagcttcggtggctggatgcctatgcccttcctagccacgtactcgggcagcaaggcgttcctgcagttttggtctaccgccctggctgccgaactcaaacctgataacgtggatgtacagctcgtgctgagctacctggtcaccacggccatgagcaaagtgcgccgcccaactgctatagtccccaatcccaggcagttcatccgtgcagctcttgggaagatcgggtctggcagctggcaggccactgggtacacttacacaccgttctggagccatgcccttatggcgtactttgttgagagcacgattggcattggtagctacatcgggttgaagttcaaccgctccatgcatgtcgatatccgcaaccgggccctaagaaaggcggcacgtgaggcgaagaagaattaatatgtggcttcatatagagtagctataacatgcgtatgaagatagaaatgattatagactggtcacatccctcgtatagaggtgatgggcaagatatcaagttaggacatacagttgccagatgcagcagggtttgactgtatgggaactagccttggtagaatatcaggtataggagagatagataatattaatgggaaatgatccttctgtttaacggccaa

SEQ ID NO: 28408 - DNA, 660 bp, Muscodor strobelii
  misc_feature: SGI cDNA ID NO. 569746
  misc_feature: Encodes the peptide sequence at SEQ ID NO 28409
atggactttgcggccgacaagacctccgactacgaacgactagctaagctggtcgacggcctcgacgttggtatcctcatcaacaacgtcggccagagccacagcatcccggttccgttcacccagaccgatagcgaggaaatggagaatatcatcacaatcaattgcaagggcaccctgaaagttacacggatcgtggcccccggcatgcagagccggaagcgtggtctgattcttaccatgggcagcttcggtggctggatgcctatgcccttcctagccacgtactcgggcagcaaggcgttcctgcagttttggtctaccgccctggctgccgaactcaaacctgataacgtggatgtacagctcgtgctgagctacctggtcaccacggccatgagcaaagtgcgccgcccaactgctatagtccccaatcccaggcagttcatccgtgcagctcttgggaagatcgggtctggcagctggcaggccactgggtacacttacacaccgttctggagccatgcccttatggcgtactttgttgagagcacgattggcattggtagctacatcgggttgaagttcaaccgctccatgcatgtcgatatccgcaaccgggccctaagaaaggcggcacgtgaggcgaagaagaattaa

SEQ ID NO: 28409 - protein, 219 aa, Muscodor strobelii
  misc_feature: SGI Peptide ID NO. 569746
  misc_feature (4)..(115): Pfam Id: PF00106 Pfam Desc: short chain dehydrogenase
  misc_feature (1)..(218): NCBI GI: 39940288 Blast Desc: MGG_05096 [Magnaporthe grisea 70-15] gi|218526568|sp|A4QTE3.1|MKAR_MAGGR RecName: Full=3-ketoacyl-CoA reductase; Short=3-ketoreductase; Short=KAR; AltName: MGG_05096
  misc_feature (1)..(219): NCBI GI: 85083036 Blast Desc: NCU11297 [Neurospora crassa OR74A] gi|74628423|sp|Q7RYE5.1|MKAR_NEUCR RecName: Full=3-ketoacyl-CoA reductase; Short=3-ketoreductase; Short=KAR; AltName: NCU11297
  misc_feature (1)..(218): NCBI GI: 154298612 Blast Desc: BC1G_11561 [Botryotinia fuckeliana B05.10] gi|218526564|sp|A6SG70.1|MKAR_BOTFB RecName: Full=3-ketoacyl-CoA reductase; Short=3-ketoreductase; Short=KAR; AltName: BC1G_11561
  misc_feature (1)..(218): NCBI GI: 156032629 Blast Desc: SS1G_14012 [Sclerotinia sclerotiorum 1980] gi|218526573|sp|A7F8T1.1|MKAR_SCLS1 RecName: Full=3-ketoacyl-CoA reductase; Short=3-ketoreductase; Short=KAR; AltName: SS1G_14012
  misc_feature (1)..(218): NCBI GI: 261352598 Blast Desc: estradiol 17-beta-dehydrogenase 12-B [Verticillium albo-atrum VaMs.102]
  misc_feature (1)..(219): NCBI GI: 116195282 Blast Desc: conserved [Chaetomium globosum CBS 148.51] gi|121783831|sp|Q2H1V7.1|MKAR_CHAGB RecName: Full=3-ketoacyl-CoA reductase; Short=3-ketoreductase; Short=KAR; AltName: conserved
  misc_feature (1)..(219): NCBI GI: 218526905 Blast Desc: conserved [Chaetomium globosum CBS 148.51] gi|121783831|sp|Q2H1V7.1|MKAR_CHAGB RecName: Full=3-ketoacyl-CoA reductase; Short=3-ketoreductase; Short=KAR; AltName: conserved
  misc_feature (1)..(219): NCBI GI: 171691278 Blast Desc: protein product [Podospora anserina] gi|170945587|emb|CAP71700.1| protein product [Podospora anserina]
  misc_feature (1)..(219): NCBI GI: 169620842 Blast Desc: SNOG_13627 [Phaeosphaeria nodorum SN15] gi|121934758|sp|Q0U3N7.1|MKAR_PHANO RecName: Full=3-ketoacyl-CoA reductase; Short=3-ketoreductase; Short=KAR; AltName: SNOG_13627
  misc_feature (1)..(204): NCBI GI: 256729807 Blast Desc: [Nectria haematococca mpVI 77-13-4]
  misc_feature (2)..(201): SWISSPROT Homolog: EC 1.1.1.62 Estradiol 17-beta-dehydrogenase
MDFAADKTSDYERLAKLVDGLDVGILINNVGQSHSIPVPFTQTDSEEMENIITINCKGTLKVTRIVAPGMQSRKRGLILTMGSFGGWMPMPFLATYSGSKAFLQFWSTALAAELKPDNVDVQLVLSYLVTTAMSKVRRPTAIVPNPRQFIRAALGKIGSGSWQATGYTYTPFWSHALMAYFVESTIGIGSYIGLKFNRSMHVDIRNRALRKAAREAKKN

SEQ ID NO: 28410 - DNA, 1397 bp, Muscodor strobelii
  misc_feature: SGI EST ID NO. CUFF.67030.0
  misc_feature: Variant of the nucleotide sequence at SEQ ID NO 28408
ttgcattaggctacacacactttatttacggtggaggggtatcatcccagcctttcctcgaaccatctatcgactatttgcaacttgccatcttgcatttgaatcgaccaaaaatggaatccgttcagaacgccaccgcgggcgtatcgccagcagtgcaactcggcctcgctgccgtgggtgccctgtggatcggctccacggctcttagcatcttccgcttcgtgatgagcacgttcgttctgagtggcgtgaacgtacgtccgccgtgaacccaatcgtgtagccagttctgaaagcaaagctaacatcagttgccgatttttatagctacgaaaatatggcaaaaagggcacatgggcaattatcacaggcgcgtctgatggcctgggcaaggagtatgccacccaactcgcccgcaaaggtttcaacctcgtcctagtatcccgcactctgtccaagctcgaagcgctagcaaaggaactctcgggagtcgaaaccaaagtcctcgacatggactttgcggccgacaagacctccgactacgaacgactagctaagctggtcgacggcctcgacgttggtatcctcatcaacaacgtcggccagagccacagcatcccggttccgttcacccagaccgatagcgaggaaatggagaatatcatcacaatcaattgcaagggcaccctgaaagttacacggatcgtggcccccggcatgcagagccggaagcgtggtctgattcttaccatgggcagcttcggtggctggatgcctatgcccttcctagccacgtactcgggcagcaaggcgttcctgcagttttggtctaccgccctggctgccgaactcaaacctgataacgtggatgtacagctcgtgctgagctacctggtcaccacggccatgagcaaagtgcgccgcccaactgctatagtccccaatcccaggcagttcatccgtgcagctcttgggaagatcgggtctggcagctggcaggccactgggtacacttacacaccgttctggagccatgcccttatggcgtactttgttgagagcacgattggcattggtagctacatcgggttgaagttcaaccgctccatgcatgtcgatatccgcaaccgggccctaagaaaggcggcacgtgaggcgaagaagaattaatatgtggcttcatatagagtagctataacatgcgtatgaagatagaaatgattatagactggtcacatccctcgtatagaggtgatgggcaagatatcaagttaggacatacagttgccagatgcagcagggtttgactgtatgggaactagccttggtagaatatcaggtataggagagatagataatattaatgggaaatgatccttctgtttaacggccaa

SEQ ID NO: 28411 - DNA, 537 bp, Muscodor strobelii
  misc_feature: SGI cDNA ID NO. 569747
  misc_feature: Encodes the peptide sequence at SEQ ID NO 28412
atggccgacgtgcttgaccttgtgaaatcgtatcttcctgatgggaagggtggctatctgccatactatattttcgggctagccgtaatctccgtcggcaactctttgcagaactatctgactctgcactactcccgacgcctttacaacggccaattcgtgcccaacagcgccctgcctccgaaaaccgcgaccttcgaccccgaggactcgacgtccaagctcgtcccggccgacgacgtcaacacaaaaggtggtcgtactgttgaccaagtcacacccttagctggaagactattcggtacctacaccctcatttccgccatcgtccgcatctacgccgcctaccacctccatctagcgcccgtctaccaaatcactctgtggacttacctcgtcgctcttttccactttggatccgagttcgccgtcttccgctccgcacgtcttggtcctggcgtcatgggacccttcttctttgctacggtgggcattgtctggatggcatcacagtactcgttctatgttgaagcttaa

SEQ ID NO: 28412 - protein, 178 aa, Muscodor strobelii
  misc_feature: SGI Peptide ID NO. 569747
  misc_feature (10)..(163): Pfam Id: PF03694 Pfam Desc: Erg28 like protein
  misc_feature (92)..(163): Pfam Id: PF03694 Pfam Desc: Erg28 like protein
  misc_feature (5)..(177): NCBI GI: 18101633 Blast Desc: transmembrane domain-containing protein [Hypocrea jecorina]
  misc_feature (5)..(176): NCBI GI: 256729623 Blast Desc: [Nectria haematococca mpVI 77-13-4]
  misc_feature (5)..(177): NCBI GI: 46122583 Blast Desc: FG05669.1 [Gibberella zeae PH-1]
  misc_feature (5)..(177): NCBI GI: 116195284 Blast Desc: CHGG_04240 [Chaetomium globosum CBS 148.51] gi|88180153|gb|EAQ87621.1| CHGG_04240 [Chaetomium globosum CBS 148.51]
  misc_feature (5)..(176): NCBI GI: 171691276 Blast Desc: protein product [Podospora anserina] gi|170945586|emb|CAP71699.1| protein product [Podospora anserina]
  misc_feature (5)..(177): NCBI GI: 164429402 Blast Desc: NCU04461 [Neurospora crassa OR74A] gi|157073464|gb|EAA27794.2| conserved [Neurospora crassa OR74A]
  misc_feature (1)..(177): NCBI GI: 261352599 Blast Desc: transmembrane domain-containing protein [Verticillium albo-atrum VaMs.102]
  misc_feature (8)..(176): NCBI GI: 39940286 Blast Desc: MGG_05097 [Magnaporthe grisea 70-15] gi|145010648|gb|EDJ95304.1| MGG_05097 [Magnaporthe grisea 70-15]
  misc_feature (9)..(176): NCBI GI: 146414029 Blast Desc: PGUG_04940 [Pichia guilliermondii ATCC 6260] gi|146392684|gb|EDK40842.1| PGUG_04940 [Pichia guilliermondii ATCC 6260]
  misc_feature (3)..(177): NCBI GI: 156032627 Blast Desc: SS1G_14011 [Sclerotinia sclerotiorum 1980] gi|154699413|gb|EDN99151.1| SS1G_14011 [Sclerotinia sclerotiorum 1980]
MADVLDLVKSYLPDGKGGYLPYYIFGLAVISVGNSLQNYLTLHYSRRLYNGQFVPNSALPPKTATFDPEDSTSKLVPADDVNTKGGRTVDQVTPLAGRLFGTYTLISAIVRIYAAYHLHLAPVYQITLWTYLVALFHFGSEFAVFRSARLGPGVMGPFFFATVGIVWMASQYSFYVEA

SEQ ID NO: 28413 - DNA, 2322 bp, Muscodor strobelii
  misc_feature: SGI EST ID NO. CUFF.67064.0
  misc_feature: Variant of the nucleotide sequence at SEQ ID NO 28411
attggtgtcatacagccttcttggaatagtctaaacagcttgaatcgtcaattctttgtgccgttttcgctctgtattactcaatcttatacctatctatattctcggaattccatcttccaacatggccgacgtgcttgaccttgtgaaatcgtatcttcctgatgggaagggtggctatctgccatactatattttcgggctagccgtaatctccgtcggcaactctttgcagaactatctgactctgcactactcccgacgcctttacaacggccaattcgtgcccaacagcgccctgcctccgaaaaccgcgaccttcgaccccgaggactcgacgtccaagctcgtcccggccgacgacgtcaacacaaaaggtggtcgtactgttgaccaagtcacacccttagctggaagactattcggtacctacaccctcatttccgccatcgtccgcatctacgccgcctaccacctccatctagcgcccgtctaccaaatcactctgtggacttacctcgtcgctcttttccactttggatccgagttcgccgtcttccgctccgcacgtcttggtcctggcgtcatgggacccttcttctttgctacggtgggcattgtctggatggcatcacagtactcgttctatgttgaagcttaaggaaatgatctgggcgtgtaatgtgtctatatgaatggatcgcttcacctgtatatgatcgcacgtctctatgtcgaatcaaccatcattgaccatcgctcaagccagcttatttcggtacaattctcctccgcaatccctcaatctcgcagcagcttgttcaggggtgatatccctctgtggctcggccatcaactcgtatccgacgaggaatttgcgaaccgtagctgagcgcaaaagtggtgggtaaaagtgcatatggaaatagctgttctcgatttcctctgccgtcccgtccagcggggcctggtgaatacccgagctgtaggggaaactcgtctcgaagaggttatcgtagcgtcttgtcacctcctggatcgcttccgcatagtggaggcgctcctcgtccgtgaagtccgggaggccgcgaatgtgtcttttagcaatgatcatgacctcgaatggccaaacggcccaccacgggcatacgacgaggaacgacgcattctggtacactatgcgctcctgcttctccatctcaagcttcacgtagtcttgtaagaggtgtcgccctccgtgctcagctcgatacttagccatttgtacagcctcagctgcaggctcttcaggcaaagtacttgttgtccacacttggcagtgcgggtgggggttcgaacatcccatagcagctcccttgttctcaaatatctgcatataccgtagctgctgtgacggcttgtcaactaagctctcggcgggcgcatcgcgactcatgaaatccgatgcgacagcggcgagcgggtggttaggcgcgaggtaggtcgtgtagatgcgcgtccatgtctccacaatcggcaatgtttcttgtgcgggcatgtcggcaagagtgagatgatgcttcggtgagaatgttaggacgaagcatttgcctttcacaccttcggcgcggagcagtaacgaggagagatctacttggtgtcagacgaatcaactcttctgcattctgactgggagggttctgtcaccatcgctcgaagaagtagattcaggttcatagtcttgctgtatctctttgactgcgctgtaatcgttgacgaagacgaatgtttctttatagtcggggttgttgtcgccctgtgcgcgtgggttccgtgggcacaagtaacactgagagccaccgttattggcaacctgctcgacagttcagacttgtgttggatcactataccttgggatcatactctggtagcttattgatgccaggaccctcttgcgcgcctctagaaagatgagatataattgttagattactgtacaatattctatagaaccaatttggcgcgcactgaagacttactgccagggtctcttggttctatgtggcgacacgagaagccatgagcctcgaagaggattgtagcgcctatgagaaatgtcgtcgagaatcttgtctggcatggtgggcgatgatgcgaaagaacttgacccctcgcaagcgtgtaagtcgtcgtagcttaagatgtaaggctaaaggaaggcgcaagttcagcacacaattacagagaacagatctcgtaagaagtacagcgcggggacatatctaattcccgcaactcttcagatatgactcggcgtgtttaaatctaccttcggtcaagttg

SEQ ID NO: 28414 - DNA, 1164 bp, Muscodor strobelii
  misc_feature: SGI cDNA ID NO. 569748
  misc_feature: Reduced expression when VOC is produced
  misc_feature: Encodes the peptide sequence at SEQ ID NO 28415
atgccagacaagattctcgacgacatttctcataggcgctacaatcctcttcgaggctcatggcttctcgtgtcgccacatagaaccaagagaccctggcaaggcgcgcaagagggtcctggcatcaataagctaccagagtatgatcccaagtgttacttgtgcccacggaacccacgcgcacagggcgacaacaaccccgactataaagaaacattcgtcttcgtcaacgattacagcgcagtcaaagagatacagcaagactatgaacctgaatctacttcttcgagcgatgatctctcctcgttactgctccgcgccgaaggtgtgaaaggcaaatgcttcgtcctaacattctcaccgaagcatcatctcactcttgccgacatgcccgcacaagaaacattgccgattgtggagacatggacgcgcatctacacgacctacctcgcgcctaaccacccgctcgccgctgtcgcatcggatttcatgagtcgcgatgcgcccgccgagagcttagttgacaagccgtcacagcagctacggtatatgcagatatttgagaacaagggagctgctatgggatgttcgaacccccacccgcactgccaagtgtggacaacaagtactttgcctgaagagcctgcagctgaggctgtacaaatggctaagtatcgagctgagcacggagggcgacacctcttacaagactacgtgaagcttgagatggagaagcaggagcgcatagtgtaccagaatgcgtcgttcctcgtcgtatgcccgtggtgggccgtttggccattcgaggtcatgatcattgctaaaagacacattcgcggcctcccggacttcacggacgaggagcgcctccactatgcggaagcgatccaggaggtgacaagacgctacgataacctcttcgagacgagtttcccctacagctcgggtattcaccaggccccgctggacgggacggcagaggaaatcgagaacagctatttccatatgcacttttacccaccacttttgcgctcagctacggttcgcaaattcctcgtcggatacgagttgatggccgagccacagagggatatcacccctgaacaagctgctgcgagattgagggattgcggaggagaattgtaccgaaataagctggcttga

SEQ ID NO: 28415 - protein, 387 aa, Muscodor strobelii
  misc_feature: SGI Peptide ID NO. 569748
  misc_feature (218)..(386): Pfam Id: PF02744 Pfam Desc: Galactose-1-phosphate uridyl transferase, C-terminal domain
  misc_feature (2)..(212): Pfam Id: PF01087 Pfam Desc: Galactose-1-phosphate uridyl transferase, N-terminal domain
  misc_feature (218)..(375): Pfam Id: PF02744 Pfam Desc: Galactose-1-phosphate uridyl transferase, C-terminal domain
  misc_feature (10)..(143): Pfam Id: PF01087 Pfam Desc: Galactose-1-phosphate uridyl transferase, N-terminal domain
  misc_feature (183)..(212): Pfam Id: PF01087 Pfam Desc: Galactose-1-phosphate uridyl transferase, N-terminal domain
  misc_feature (1)..(386): NCBI GI: 116195286 Blast Desc: galactose-1-phosphate uridylyltransferase [Chaetomium globosum CBS 148.51] gi|88180154|gb|EAQ87622.1| galactose-1-phosphate uridylyltransferase [Chaetomium globosum
  misc_feature (1)..(386): NCBI GI: 85083029 Blast Desc: galactose-1-phosphate uridylyltransferase [Neurospora crassa OR74A] gi|52782823|sp|Q7RYE7.1|GAL7_NEUCR RecName: Full=Galactose-1-phosphate uridylyltransferase; Short=Gal-1-P
  misc_feature (1)..(387): NCBI GI: 30315942 Blast Desc: GAL7_TRIRE RecName: Full=Galactose-1-phosphate uridylyltransferase; Short=Gal-1-P uridylyltransferase; AltName: Full=UDP-glucose--hexose-1-phosphate uridylyltransferase
  misc_feature (1)..(386): NCBI GI: 156032621 Blast Desc: SS1G_14008 [Sclerotinia sclerotiorum 1980] gi|154699410|gb|EDN99148.1| SS1G_14008 [Sclerotinia sclerotiorum 1980]
  misc_feature (1)..(386): NCBI GI: 46122581 Blast Desc: GAL7_TRIRE Galactose-1-phosphate uridylyltransferase (Gal-1-P uridylyltransferase) (UDP-glucose--hexose-1-phosphate uridylyltransferase) [Gibberella zeae PH-1]
  misc_feature (1)..(386): NCBI GI: 256729808 Blast Desc: [Nectria haematococca mpVI 77-13-4]
  misc_feature (1)..(386): NCBI GI: 39940284 Blast Desc: MGG_05098 [Magnaporthe grisea 70-15] gi|145010647|gb|EDJ95303.1| MGG_05098 [Magnaporthe grisea 70-15]
  misc_feature (1)..(386): NCBI GI: 171691274 Blast Desc: protein product [Podospora anserina] gi|170945585|emb|CAP71698.1| protein product [Podospora anserina]
  misc_feature (3)..(386): NCBI GI: 255938945 Blast Desc: Pc15g00140 [Penicillium chrysogenum Wisconsin 54-1255] gi|211584864|emb|CAP82900.1| Pc15g00140 [Penicillium chrysogenum Wisconsin 54-1255]
  misc_feature (1)..(386): NCBI GI: 169774929 Blast Desc: [Aspergillus oryzae RIB40] gi|238496445|ref|XP_002379458.1| galactose-1-phosphate uridylyltransferase [Aspergillus flavus NRRL3357] protein product
  misc_feature (1)..(386): SWISSPROT Homolog: EC 2.7.7.12 UDP-glucose--hexose-1-phosphate uridylyltransferase
  misc_feature: Useful for introducing or modulating the production of volatile compounds
MPDKILDDISHRRYNPLRGSWLLVSPHRTKRPWQGAQEGPGINKLPEYDPKCYLCPRNPRAQGDNNPDYKETFVFVNDYSAVKEIQQDYEPESTSSSDDLSSLLLRAEGVKGKCFVLTFSPKHHLTLADMPAQETLPIVETWTRIYTTYLAPNHPLAAVASDFMSRDAPAESLVDKPSQQLRYMQIFENKGAAMGCSNPHPHCQVWTTSTLPEEPAAEAVQMAKYRAEHGGRHLLQDYVKLEMEKQERIVYQNASFLVVCPWWAVWPFEVMIIAKRHIRGLPDFTDEERLHYAEAIQEVTRRYDNLFETSFPYSSGIHQAPLDGTAEEIENSYFHMHFYPPLLRSATVRKFLVGYELMAEPQRDITPEQAAARLRDCGGELYRNKLA

SEQ ID NO: 28416 - DNA, 2194 bp, Muscodor strobelii
  misc_feature: SGI EST ID NO. CUFF.67065.1
  misc_feature: Variant of the nucleotide sequence at SEQ ID NO 28414
caacttgaccgaaggtagatttaaacacgccgagtcatatctgaagagttgcgggaattagatatgtccccgcgctgtacttcttacgagatctgttctctgtaattgtgtgctgaacttgcgccttcctttagccttacatcttaagctacgacgacttacacgcttgcgaggggtcaagttctttcgcatcatcgcccaccatgccagacaagattctcgacgacatttctcataggcgctacaatcctcttcgaggctcatggcttctcgtgtcgccacatagaaccaagagaccctggcaaggcgcgcaagagggtcctggcatcaataagctaccagagtatgatcccaagtgttacttgtgcccacggaacccacgcgcacagggcgacaacaaccccgactataaagaaacattcgtcttcgtcaacgattacagcgcagtcaaagagatacagcaagactatgaacctgaatctacttcttcgagcgatgatctctcctcgttactgctccgcgccgaaggtgtgaaaggcaaatgcttcgtcctaacattctcaccgaagcatcatctcactcttgccgacatgcccgcacaagaaacattgccgattgtggagacatggacgcgcatctacacgacctacctcgcgcctaaccacccgctcgccgctgtcgcatcggatttcatgagtcgcgatgcgcccgccgagagcttagttgacaagccgtcacagcagctacggtatatgcagatatttgagaacaagggagctgctatgggatgttcgaacccccacccgcactgccaagtgtggacaacaagtactttgcctgaagagcctgcagctgaggctgtacaaatggctaagtatcgagctgagcacggagggcgacacctcttacaagactacgtgaagcttgagatggagaagcaggagcgcatagtgtaccagaatgcgtcgttcctcgtcgtatgcccgtggtgggccgtttggccattcgaggtcatgatcattgctaaaagacacattcgcggcctcccggacttcacggacgaggagcgcctccactatgcggaagcgatccaggaggtgacaagacgctacgataacctcttcgagacgagtttcccctacagctcgggtattcaccaggccccgctggacgggacggcagaggaaatcgagaacagctatttccatatgcacttttacccaccacttttgcgctcagctacggttcgcaaattcctcgtcggatacgagttgatggccgagccacagagggatatcacccctgaacaagctgctgcgagattgagggattgcggaggagaattgtaccgaaataagctggcttgagcgatggtcaatgatggttgattcgacatagagacgtgcgatcatatacaggtgaagcgatccattcatatagacacattacacgcccagatcatttccttaagcttcaacatagaacgagtactgtgatgccatccagacaatgcccaccgtagcaaagaagaagggtcccatgacgccaggaccaagacgtgcggagcggaagacggcgaactcggatccaaagtggaaaagagcgacgaggtaagtccacagagtgatttggtagacgggcgctagatggaggtggtaggcggcgtagatgcggacgatggcggaaatgagggtgtaggtaccgaatagtcttccagctaagggtgtgacttggtcaacagtacgaccaccttttgtgttgacgtcgtcggccgggacgagcttggacgtcgagtcctcggggtcgaaggtcgcggttttcggaggcagggcgctgttgggcacgaattggccgttgtaaaggcgtcgggagtagtgcagagtcagatagttctgcaaagagttgccgacggagattacggctagcttgaagaagggagtgcaagtcagtgcgattgtccgcatgccttcaagatgtattaatgtgtcttaccccgaaaatatagtatggcagatagccacccttcccatcaggaagatacgatttcacaaggtcaagcacgtcggccatgttggaagatggaattccgagaatatagataggtataagattgagtaatacagagcgaaaacggcacaaagaattgacgattcaagctgtttagactattccaagaaggctgtatgacaccaat

SEQ ID NO: 28417 - DNA, 1167 bp, Muscodor strobelii
  misc_feature: SGI cDNA ID NO. 569749
  misc_feature: Encodes the peptide sequence at SEQ ID NO 28418
atgccagacaagattctcgacgacatttctcataggcgctacaatcctcttcgaggctcatggcttctcgtgtcgccacatagaaccaagagaccctggcaaggcgcgcaagagggtcctggcatcaataagctaccagagtatgatcccaagtgttacttgtgcccacggaacccacgcgcacagggcgacaacaaccccgactataaagaaacattcgtcttcgtcaacgattacagcgcagtcaaagagatacagcaagactatgaacctgaatctacttcttcgagcgatgtagatctctcctcgttactgctccgcgccgaaggtgtgaaaggcaaatgcttcgtcctaacattctcaccgaagcatcatctcactcttgccgacatgcccgcacaagaaacattgccgattgtggagacatggacgcgcatctacacgacctacctcgcgcctaaccacccgctcgccgctgtcgcatcggatttcatgagtcgcgatgcgcccgccgagagcttagttgacaagccgtcacagcagctacggtatatgcagatatttgagaacaagggagctgctatgggatgttcgaacccccacccgcactgccaagtgtggacaacaagtactttgcctgaagagcctgcagctgaggctgtacaaatggctaagtatcgagctgagcacggagggcgacacctcttacaagactacgtgaagcttgagatggagaagcaggagcgcatagtgtaccagaatgcgtcgttcctcgtcgtatgcccgtggtgggccgtttggccattcgaggtcatgatcattgctaaaagacacattcgcggcctcccggacttcacggacgaggagcgcctccactatgcggaagcgatccaggaggtgacaagacgctacgataacctcttcgagacgagtttcccctacagctcgggtattcaccaggccccgctggacgggacggcagaggaaatcgagaacagctatttccatatgcacttttacccaccacttttgcgctcagctacggttcgcaaattcctcgtcggatacgagttgatggccgagccacagagggatatcacccctgaacaagctgctgcgagattgagggattgcggaggagaattgtaccgaaataagctggcttga

SEQ ID NO: 28418 - protein, 388 aa, Muscodor strobelii
  misc_feature: SGI Peptide ID NO. 569749
  misc_feature (219)..(387): Pfam Id: PF02744 Pfam Desc: Galactose-1-phosphate uridyl transferase, C-terminal domain
  misc_feature (2)..(213): Pfam Id: PF01087 Pfam Desc: Galactose-1-phosphate uridyl transferase, N-terminal domain
  misc_feature (219)..(376): Pfam Id: PF02744 Pfam Desc: Galactose-1-phosphate uridyl transferase, C-terminal domain
  misc_feature (10)..(144): Pfam Id: PF01087 Pfam Desc: Galactose-1-phosphate uridyl transferase, N-terminal domain
  misc_feature (184)..(213): Pfam Id: PF01087 Pfam Desc: Galactose-1-phosphate uridyl transferase, N-terminal domain
  misc_feature (1)..(387): NCBI GI: 116195286 Blast Desc: galactose-1-phosphate uridylyltransferase [Chaetomium globosum CBS 148.51] gi|88180154|gb|EAQ87622.1| galactose-1-phosphate uridylyltransferase [Chaetomium globosum
  misc_feature (1)..(387): NCBI GI: 85083029 Blast Desc: galactose-1-phosphate uridylyltransferase [Neurospora crassa OR74A] gi|52782823|sp|Q7RYE7.1|GAL7_NEUCR RecName: Full=Galactose-1-phosphate uridylyltransferase; Short=Gal-1-P
  misc_feature (1)..(387): NCBI GI: 156032621 Blast Desc: SS1G_14008 [Sclerotinia sclerotiorum 1980] gi|154699410|gb|EDN99148.1| SS1G_14008 [Sclerotinia sclerotiorum 1980]
  misc_feature (1)..(387): NCBI GI: 46122581 Blast Desc: GAL7_TRIRE Galactose-1-phosphate uridylyltransferase (Gal-1-P uridylyltransferase) (UDP-glucose--hexose-1-phosphate uridylyltransferase) [Gibberella zeae PH-1]
  misc_feature (1)..(388): NCBI GI: 30315942 Blast Desc: GAL7_TRIRE RecName: Full=Galactose-1-phosphate uridylyltransferase; Short=Gal-1-P uridylyltransferase; AltName: Full=UDP-glucose--hexose-1-phosphate uridylyltransferase
  misc_feature (1)..(387): NCBI GI: 256729808 Blast Desc: [Nectria haematococca mpVI 77-13-4]
  misc_feature (1)..(387): NCBI GI: 39940284 Blast Desc: MGG_05098 [Magnaporthe grisea 70-15] gi|145010647|gb|EDJ95303.1| MGG_05098 [Magnaporthe grisea 70-15]
  misc_feature (1)..(387): NCBI GI: 171691274 Blast Desc: protein product [Podospora anserina] gi|170945585|emb|CAP71698.1| protein product [Podospora anserina]
  misc_feature (3)..(387): NCBI GI: 255938945 Blast Desc: Pc15g00140 [Penicillium chrysogenum Wisconsin 54-1255] gi|211584864|emb|CAP82900.1| Pc15g00140 [Penicillium chrysogenum Wisconsin 54-1255]
  misc_feature (1)..(387): NCBI GI: 169774929 Blast Desc: [Aspergillus oryzae RIB40] gi|238496445|ref|XP_002379458.1| galactose-1-phosphate uridylyltransferase [Aspergillus flavus NRRL3357] protein product
  misc_feature (1)..(387): SWISSPROT Homolog: EC 2.7.7.12 UDP-glucose--hexose-1-phosphate uridylyltransferase
MPDKILDDISHRRYNPLRGSWLLVSPHRTKRPWQGAQEGPGINKLPEYDPKCYLCPRNPRAQGDNNPDYKETFVFVNDYSAVKEIQQDYEPESTSSSDVDLSSLLLRAEGVKGKCFVLTFSPKHHLTLADMPAQETLPIVETWTRIYTTYLAPNHPLAAVASDFMSRDAPAESLVDKPSQQLRYMQIFENKGAAMGCSNPHPHCQVWTTSTLPEEPAAEAVQMAKYRAEHGGRHLLQDYVKLEMEKQERIVYQNASFLVVCPWWAVWPFEVMIIAKRHIRGLPDFTDEERLHYAEAIQEVTRRYDNLFETSFPYSSGIHQAPLDGTAEEIENSYFHMHFYPPLLRSATVRKFLVGYELMAEPQRDITPEQAAARLRDCGGELYRNKLA

SEQ ID NO: 28419 - DNA, 2194 bp, Muscodor strobelii; identical to SEQ ID NO: 28416
  misc_feature: SGI EST ID NO. CUFF.67065.1
  misc_feature: Variant of the nucleotide sequence at SEQ ID NO 28417

SEQ ID NO: 28420 - DNA, 1596 bp, Muscodor strobelii
  misc_feature: SGI cDNA ID NO. 569750
  misc_feature: Reduced expression when VOC is produced
  misc_feature: Encodes the peptide sequence at SEQ ID NO 28421
atgggcgtcattcgcaagaagaccgccactaggggaggcgagggcggcgtcaagtacgtctgtgacgtctgctccgctgacatcacctcgaccgtccgcatcagatgcgctcatagcgcctgcaacgagtacgacctctgcgtgcaatgtttctccagcggcgcctccagcggctctcaccaacccgccacacatccctaccgcgtcatcgagcagaactccatccccatcttcgaccaggactggggtgctgacgaagaactgctcctactcgagggatgcgaaatctacggtctgggttcatgggcagatatcgccgaccacattggaggttatcgccacaaggatgaagttcgtgaccactaccttaaagtctacgtcgactcacctgccttcccgctcccgaaacgatgtcgcccggatgacatggaattagcagaggagatttcgcgcgaggaattccaggcacgcaagaagcggcgcatcgaggaacggcgcgaagctcagaggaatgcgccacccatgcccgccaagacaaagcctacggccagtgtgccctcctgtcacgagattcaaggatatatgccggggcgtttggaattcgagacggaatacgccaacgaggctgaggaagctgtccagttgatgcagttcgaccccggtgatggtataaatcctcgcaccggcgagcttgagcccgagatggagttgaagctaaccgtcatggatatctacaattgccgcttgactcagcgtgtagatcggaagaaggtcatcttcgagcacaatcttctagactacagggaaaacacgaaactagagaagaagcgaacaaaggaggaacgagatcttgtaaacaaggcgaaaccctttgcacgcatgatgaaccacgacgacttcgagggtttctgccaaggcctcctagatgagctgaacttgcgccaagcgatcagccagttacaagaatggcgaaatctcaagattggagatttgcgaagcggcgagaagtatgaacaggacaaggcgtcgcgcattcagaagtccatacctatgggatccatggaccgcgaaaggctagcctcaggagcacgctccaagcagcctgtacagcctgagcccccgagcggcgcggctcttttagtagcgccggagctccccttccgaccgagtccaagcagcaatggcactacaggccagggaacgctagaagtgtctacgaatggcgagtccaatactctcagcaatggcaatacgattgaggcggcgcccaatggtattgttcagaacggatcgtccacgccggctcggcagaaattcgtctcacagcctatctcgggagtgcaacggctggcgctcagcgaggacaatgctcccgaccaccatctcctgactcctgaagagctggagctgtgtgaagtgtcgaggatacaaccgaagccctatctgatgatcaaagagcaggtgctcaaggaagctctcaaaggcaatggaagcctcaagaagaagcaagtcaaggagatatgtcgattggactctcagaaaggaggaaggatctttgatttcttcatcaattcgggctggattgctaaggcctag

SEQ ID NO: 28421 - protein, 531 aa, Muscodor strobelii
  misc_feature: SGI Peptide ID NO. 569750
  misc_feature (79)..(126): Pfam Id: PF00249 Pfam Desc: Myb-like DNA-binding domain
  misc_feature (444)..(530): Pfam Id: PF04433 Pfam Desc: SWIRM domain
  misc_feature (15)..(62): Pfam Id: PF00569 Pfam Desc: Zinc finger, ZZ type
  misc_feature (455)..(530): Pfam Id: PF04433 Pfam Desc: SWIRM domain
  misc_feature (1)..(531): NCBI GI: 40882161 Blast Desc: related to transcription adaptor ADA2 [Neurospora crassa]
  misc_feature (1)..(531): NCBI GI: 171691272 Blast Desc: protein product [Podospora anserina] gi|170945584|emb|CAP71697.1| protein product [Podospora anserina]
  misc_feature (1)..(531): NCBI GI: 256729624 Blast Desc: histone acetyltransferase complex protein [Nectria haematococca mpVI 77-13-4]
  misc_feature (1)..(531): NCBI GI: 261352601 Blast Desc: transcriptional adapter 2 [Verticillium albo-atrum VaMs.102]
  misc_feature (1)..(531): NCBI GI: 39940282 Blast Desc: MGG_05099 [Magnaporthe grisea 70-15] gi|145010646|gb|EDJ95302.1| MGG_05099 [Magnaporthe grisea 70-15]
  misc_feature (1)..(531): NCBI GI: 18101632 Blast Desc: transcriptional adaptor-like protein [Hypocrea jecorina]
  misc_feature (1)..(531): NCBI GI: 164429404 Blast Desc: NCU04459 [Neurospora crassa OR74A] gi|157073465|gb|EAA27792.2| NCU04459 [Neurospora crassa OR74A]
  misc_feature (1)..(531): NCBI GI: 116195288 Blast Desc: CHGG_04242 [Chaetomium globosum CBS 148.51] gi|88180155|gb|EAQ87623.1| CHGG_04242 [Chaetomium globosum CBS 148.51]
  misc_feature (1)..(531): NCBI GI: 154291243 Blast Desc: BC1G_15111 [Botryotinia fuckeliana B05.10] gi|150847014|gb|EDN22207.1| BC1G_15111 [Botryotinia fuckeliana B05.10]
  misc_feature (1)..(531): NCBI GI: 238493243 Blast Desc: SAGA complex subunit (Ada2), [Aspergillus flavus NRRL3357] gi|220696352|gb|EED52694.1| SAGA complex subunit (Ada2), [Aspergillus flavus NRRL3357]
  misc_feature: Useful for introducing or modulating the production of volatile compounds
MGVIRKKTATRGGEGGVKYVCDVCSADITSTVRIRCAHSACNEYDLCVQCFSSGASSGSHQPATHPYRVIEQNSIPIFDQDWGADEELLLLEGCEIYGLGSWADIADHIGGYRHKDEVRDHYLKVYVDSPAFPLPKRCRPDDMELAEEISREEFQARKKRRIEERREAQRNAPPMPAKTKPTASVPSCHEIQGYMPGRLEFETEYANEAEEAVQLMQFDPGDGINPRTGELEPEMELKLTVMDIYNCRLTQRVDRKKVIFEHNLLDYRENTKLEKKRTKEERDLVNKAKPFARMMNHDDFEGFCQGLLDELNLRQAISQLQEWRNLKIGDLRSGEKYEQDKASRIQKSIPMGSMDRERLASGARSKQPVQPEPPSGAALLVAPELPFRPSPSSNGTTGQGTLEVSTNGESNTLSNGNTIEAAPNGIVQNGSSTPARQKFVSQPISGVQRLALSEDNAPDHHLLTPEELELCEVSRIQPKPYLMIKEQVLKEALKGNGSLKKKQVKEICRLDSQKGGRIFDFFINSGWIAKA

SEQ ID NO: 28422 - DNA, 2679 bp, Muscodor strobelii
  misc_feature: SGI EST ID NO. CUFF.67077.1
  misc_feature: Variant of the nucleotide sequence at SEQ ID NO 28420
tgaatattgaacatggaaagtggggctcgcactccaggcgcggagcacagaagaaggtgcccccgtattttccaggttaggttagtttgcaggctgcgcaggtcgccatcacgacgccaaccaaccaatgacgagggccgcggcagctgaccgaacgttacgtctcccgggtacgagtcgccttgtgctgtttcacgcacttcctgtcgcccttcatcagctttacatctagcgacaattgcgcctttcatccagaacaccccagtttgctgcgctacggctctatctgtgcctccgcaatctgcgttgctcattttgagatcgccagccccgcgcgacctgcgcgacctacctctgtcgagggtggtccttccctgcttttgttctttcgtagctgcacatcccacgctagcccacgctggacgggtccgacgaagccatgggcgtcattcgcaagaagaccgccactaggggaggcgagggcggcgtcaagtacgtctgtgacgtctgctccgctgacatcacctcgaccgtccgcatcagatgcgctcatagcgcctgcaacgagtacgacctctgcgtgcaatgtttctccagcggcgcctccagcggctctcaccaacccgccacacatccctaccgcgtcatcgagcagaactccatccccatcttcgaccaggactggggtgctgacgaagaactgctcctactcgagggatgcgaaatctacggtctgggttcatgggcagatatcgccgaccacattggaggttatcgccacaaggatgaagttcgtgaccactaccttaaagtctacgtcgactcacctgccttcccgctcccgaaacgatgtcgcccggatgacatggaattagcagaggagatttcgcgcgaggaattccaggcacgcaagaagcggcgcatcgaggaacggcgcgaagctcagaggaatgcgccacccatgcccgccaagacaaagcctacggccagtgtgccctcctgtcacgagattcaaggatatatgccggggcgtttggaattcgagacggaatacgccaacgaggctgaggaagctgtccagttgatgcagttcgaccccggtgatggtataaatcctcgcaccggcgagcttgagcccgagatggagttgaagctaaccgtcatggatatctacaattgccgcttgactcagcgtgtagatcggaagaaggtcatcttcgagcacaatcttctagactacagggaaaacacgaaactagagaagaagcgaacaaaggaggaacgagatcttgtaaacaaggcgaaaccctttgcacgcatgatgaaccacgacgacttcgagggtttctgccaaggcctcctagatgagctgaacttgcgccaagcgatcagccagttacaagaatggcgaaatctcaagattggagatttgcgaagcggcgagaagtatgaacaggacaaggcgtcgcgcattcagaagtccatacctatgggatccatggaccgcgaaaggctagcctcaggagcacgctccaagcagcctgtacagcctgagcccccgagcggcgcggctcttttagtagcgccggagctccccttccgaccgagtccaagcagcaatggcactacaggccagggaacgctagaagtgtctacgaatggcgagtccaatactctcagcaatggcaatacgattgaggcggcgcccaatggtattgttcagaacggatcgtccacgccggctcggcagaaattcgtctcacagcctatctcgggagtgcaacggctggcgctcagcgaggacaatgctcccgaccaccatctcctgactcctgaagagctggagctgtgtgaagtgtcgaggatacaaccgaagccctatctgatgatcaaagagcaggtgctcaaggaagctctcaaaggcaatggaagcctcaagaagaagcaagtcaaggagatatgtcgattggactctcagaaaggaggaaggatctttgatttcttcatcaattcgggctggattgctaaggcctagtcagccccatcatcaccaagtcgtcatagttcgcaatttgcgactatcgaccgaggaatcattgctacccccatgctctcacaacctgctctagggctcatgcaacctgtgctacatcaacctcttgctcgaaatgcgggtatatacactggtctgagcctagcacaattcggtctccatccaccaacgccaactacaccatccaagaagagctgtgtccgatgtcgaaagcagagaaagggatgcgatcgagcggagccgaaatgctccagatgcctcaaggcgggagctcagtgcgagactcgcctgggattgggcaagtaagccgctactaggcaacagacagcgacaatgatgtatgataagagccatggtcgtattagatagaccgttaagagggtcccttttaccgctccgtgcgagcaacgacgaggatacagaggcatgaacactgcgttgtttgcgacctgttgtgtcgacgacaatgtatggcaggacatgtaattagacaggctcgtaccagatgaatcaagaccatgtccaacacacaacctggttgagttgtgctactgaatttcgtttgcctagctacacgtgaagtaggtacctaaagtttcaaggaacacaggatatgcatgcggaga

SEQ ID NO: 28423 - DNA, 1482 bp, Muscodor strobelii
  misc_feature: SGI cDNA ID NO. 569751
  misc_feature: Reduced expression when VOC is produced
  misc_feature: Encodes the peptide sequence at SEQ ID NO 28424
atgcctcgtcgaaactttctcatcccgacgctttgcatcgtctttctcgttgcgctatggaccttccgctttcctgacccgcgggagtattcctatcccaacctcgactggctcgagacggccggccgctcctcattgccaaaagtcaagtcctcgccggactcgacagactcgaccaccaccacttcttcctctaccactgcttcctcgacctcttcttccgctacctcatcctctacatcaaagtcttcgtcgtcacgcctagatccgcccatatcgcaggctgcgcccagaatcgccggtaatgacgtcgatctgtctcaacccgatgcgcccttcgtgggctggcccctgaagcgtgtctgcgacgaagccacgtgggtcgacggcctagtcttcctttgcgacaacaattctggcggcattggaaatatcagaaactacatccagacgtgtatccgctacgcgcttgaatctggcgccactggtcttgttatccccaagatccgcacccgcaacgaggaagatctcgccgaccttttcaccgactacgagcccttctcttacatgtttgacgaagatcgcttccgcgacgccttcaacgataactgtcctcaaatcaccctctacgacgagatcacagacatccccaacgtagacgaccctcccaagataaacactatcctccctaaggatttcggcaaccgagagggctgcgacttgcaggaccagaatagacacactgatcagtttggcgatacatttcgaaaatggttacaagaggagaagcacggcccgtcaccgtccaagtctacaccacggttgattcgctttaagtggggagtcctgtgggattggcagatatacagggacgggccggagttcgcttctacctttggcggtatccttagattcaacgatcaaatcttgcgccttggcaagaagaccctcgagaagatgcacgactttgcgcgcgccgatggggttaaggatggttcattccttggcgttcacttgagatcggaggctgatgctttgggattctggccctcgttcgagacccagaacgacgcatatatcaaacaggcccagaagcgcaagtttcaaacagcttatttagcgacggggaatttgaccgaagcggacaagttcatcgaaggcgccatcgagatggcgcagatgagagtcgtcaccaaaatggatcttctcgatggtgatgatttggacgagctcgagtcgctcagttgggatcaacagggcctcatcgatttcgtagtattgcttggaagtaagttcttcgttggcacgatgccgagcagcttctccgtgtatatggccatgaagcgtcatctcaagaccggcggtctctatacgcgaccatataagacgggcactgagggcgacggatattcttatcttgttggtaactacgaaaagtattgggccggatggctgttcatgtgggatggtatgtggccttga

SEQ ID NO: 28424 - protein, 493 aa, Muscodor strobelii
  misc_feature: SGI Peptide ID NO. 569751
  misc_feature (104)..(493): NCBI GI: 85090647 Blast Desc: NCU09522 [Neurospora crassa OR74A] gi|28919886|gb|EAA29281.1| [Neurospora crassa OR74A]
  misc_feature (91)..(493): NCBI GI: 171680996 Blast Desc: protein product [Podospora anserina] gi|170940456|emb|CAP65683.1| protein product [Podospora anserina]
  misc_feature (139)..(493): NCBI GI: 116191425 Blast Desc: CHGG_05430 [Chaetomium globosum CBS 148.51] gi|88181343|gb|EAQ88811.1| CHGG_05430 [Chaetomium globosum CBS 148.51]
  misc_feature (110)..(488): NCBI GI: 154302925 Blast Desc: BC1G_09206 [Botryotinia fuckeliana B05.10] gi|150855130|gb|EDN30322.1| BC1G_09206 [Botryotinia fuckeliana B05.10]
  misc_feature (110)..(454): NCBI GI: 154305074 Blast Desc: BC1G_08627 [Botryotinia fuckeliana B05.10] gi|150853790|gb|EDN28982.1| BC1G_08627 [Botryotinia fuckeliana B05.10]
  misc_feature (110)..(455): NCBI GI: 156045327 Blast Desc: SS1G_09852 [Sclerotinia sclerotiorum 1980] gi|154694247|gb|EDN93985.1| SS1G_09852 [Sclerotinia sclerotiorum 1980]
  misc_feature (113)..(451): NCBI GI: 145614594 Blast Desc: MGG_04525 [Magnaporthe grisea 70-15] gi|145021498|gb|EDK05627.1| MGG_04525 [Magnaporthe grisea 70-15]
  misc_feature (129)..(493): NCBI GI: 145601799 Blast Desc: MGG_14230 [Magnaporthe grisea 70-15] gi|145010296|gb|EDJ94952.1| MGG_14230 [Magnaporthe grisea 70-15]
  misc_feature (115)..(479): NCBI GI: 171696232 Blast Desc: protein product [Podospora anserina] gi|170948358|emb|CAP60522.1| protein product [Podospora anserina]
  misc_feature (158)..(451): NCBI GI: 156039860 Blast Desc: SS1G_12066 [Sclerotinia sclerotiorum 1980] gi|154696123|gb|EDN95861.1| SS1G_12066 [Sclerotinia sclerotiorum 1980]
  misc_feature: Useful for introducing or modulating the production of volatile compounds
MPRRNFLIPTLCIVFLVALWTFRFPDPREYSYPNLDWLETAGRSSLPKVKSSPDSTDSTTTTSSSTTASSTSSSATSSSTSKSSSSRLDPPISQAAPRIAGNDVDLSQPDAPFVGWPLKRVCDEATWVDGLVFLCDNNSGGIGNIRNYIQTCIRYALESGATGLVIPKIRTRNEEDLADLFTDYEPFSYMFDEDRFRDAFNDNCPQITLYDEITDIPNVDDPPKINTILPKDFGNREGCDLQDQNRHTDQFGDTFRKWLQEEKHGPSPSKSTPRLIRFKWGVLWDWQIYRDGPEFASTFGGILRFNDQILRLGKKTLEKMHDFARADGVKDGSFLGVHLRSEADALGFWPSFETQNDAYIKQAQKRKFQTAYLATGNLTEADKFIEGAIEMAQMRVVTKMDLLDGDDLDELESLSWDQQGLIDFVVLLGSKFFVGTMPSSFSVYMAMKRHLKTGGLYTRPYKTGTEGDGYSYLVGNYEKYWAGWLFMWDGMWP

SEQ ID NO: 28425 - DNA, 1693 bp, Muscodor strobelii
  misc_feature: SGI EST ID NO. CUFF.67040.0
  misc_feature: Variant of the nucleotide sequence at SEQ ID NO 28423
ctggtgtcatccgtgatggccttgtatggccatcgtttgcacagcagcttaggcttcatgcctcgtcgaaactttctcatcccgacgctttgcatcgtctttctcgttgcgctatggaccttccgctttcctgacccgcgggagtattcctatcccaacctcgactggctcgagacggccggccgctcctcattgccaaaagtcaagtcctcgccggactcgacagactcgaccaccaccacttcttcctctaccactgcttcctcgacctcttcttccgctacctcatcctctacatcaaagtcttcgtcgtcacgcctagatccgcccatatcgcaggctgcgcccagaatcgccggtaatgacgtcgatctgtctcaacccgatgcgcccttcgtgggctggcccctgaagcgtgtctgcgacgaagccacgtgggtcgacggcctagtcttcctttgcgacaacaattctggcggcattggaaatatcagaaactacatccagacgtgtatccgctacgcgcttgaatctggcgccactggtcttgttatccccaagatccgcacccgcaacgaggaagatctcgccgaccttttcaccgactacgagcccttctcttacatgtttgacgaagatcgcttccgcgacgccttcaacgataactgtcctcaaatcaccctctacgacgagatcacagacatccccaacgtagacgaccctcccaagataaacactatcctccctaaggatttcggcaaccgagagggctgcgacttgcaggaccagaatagacacactgatcagtttggcgatacatttcgaaaatggttacaagaggagaagcacggcccgtcaccgtccaagtctacaccacggttgattcgctttaagtggggagtcctgtgggattggcagatatacagggacgggccggagttcgcttctacctttggcggtatccttagattcaacgatcaaatcttgcgccttggcaagaagaccctcgagaagatgcacgactttgcgcgcgccgatggggttaaggatggttcattccttggcgttcacttgagatcggaggctgatgctttgggattctggccctcgttcgagacccagaacgacgcatatatcaaacaggcccagaagcgcaagtttcaaacagcttatttagcgacggggaatttgaccgaagcggacaagttcatcgaaggcgccatcgagatggcgcagatgagagtcgtcaccaaaatggatcttctcgatggtgatgatttggacgagctcgagtcgctcagttgggatcaacagggcctcatcgatttcgtagtattgcttggaagtaagttcttcgttggcacgatgccgagcagcttctccgtgtatatggccatgaagcgtcatctcaagaccggcggtctctatacgcgaccatataagacgggcactgagggcgacggatattcttatcttgttggtaactacgaaaagtattgggccggatggctgttcatgtgggatggtatgtggccttgagcgcgggctttgccaatggtgtctgcgttgacttagaatgtactctgatgtttgtatgatttatatgtatcacctactagaatagattgctagagatcatctgcaagccggagagtttgagtatacttagggagatatcgacgataacatgcca

SEQ ID NO: 28426 - DNA, 465 bp, Muscodor strobelii
  misc_feature: SGI cDNA ID NO. 569752
  misc_feature: Encodes the peptide sequence at SEQ ID NO 28427
atgttagaaaacggtgaaggaaaagaacaaactgacctcgattcatacaccagagagggtcccgagcttcgtgatctccttctggcagcaaataacagcacagccgaaaatgcctcacagtcaccaagggtagcggttgttgatgtcagagacgatgaccacgtcggtgggcacatccgcaattccatgcactttcctacgcatagtctagacgcaaccatgccgacgttattacgcaagcttgcggacaaggacattgttgttttccactgtgctctgagtcaacagcgcggtccctcggcggctctgaaatacctaagagaaaaggagagtaagggcacaaaggaatcagattctcagcaaaaagtttacgtgctatatgggggctttaacaaatgggcacaggaatttggtgaaaacgaaactcttacggaagggttcctagcagatcttcatgaattctag

SEQ ID NO: 28427 - protein, 154 aa, Muscodor strobelii
  misc_feature: SGI Peptide ID NO. 569752
  misc_feature (39)..(153): NCBI GI: 116195614 Blast Desc: CHGG_04405 [Chaetomium globosum CBS 148.51] gi|88180318|gb|EAQ87786.1| CHGG_04405 [Chaetomium globosum CBS 148.51]
  misc_feature (24)..(153): NCBI GI: 255950222 Blast Desc: Pc22g19760 [Penicillium chrysogenum Wisconsin 54-1255] gi|211592895|emb|CAP99264.1| Pc22g19760 [Penicillium chrysogenum Wisconsin 54-1255]
  misc_feature (42)..(153): NCBI GI: 46122577 Blast Desc: FG05666.1 [Gibberella zeae PH-1]
  misc_feature (21)..(153): NCBI GI: 170940243 Blast Desc: protein product [Podospora anserina]
  misc_feature (24)..(151): NCBI GI: 145252680 Blast Desc: An16g05450 [Aspergillus niger] gi|134083407|emb|CAK46885.1| protein product [Aspergillus niger]
  misc_feature (42)..(154): NCBI GI: 169619130 Blast Desc: SNOG_12758 [Phaeosphaeria nodorum SN15] gi|111058936|gb|EAT80056.1| SNOG_12758 [Phaeosphaeria nodorum SN15]
  misc_feature (33)..(151): NCBI GI: 115395894 Blast Desc: conserved [Aspergillus terreus NIH2624] gi|114193155|gb|EAU34855.1| conserved [Aspergillus terreus NIH2624]
  misc_feature (23)..(151): NCBI GI: 212536206 Blast Desc: conserved [Penicillium marneffei ATCC 18224] gi|210070658|gb|EEA24748.1| conserved [Penicillium marneffei ATCC 18224]
  misc_feature (43)..(151): NCBI GI: 119480873 Blast Desc: NFIA_085210 [Neosartorya fischeri NRRL 181] gi|119408619|gb|EAW18568.1| conserved [Neosartorya fischeri NRRL 181]
  misc_feature (13)..(151): NCBI GI: 258576947 Blast Desc: conserved [Uncinocarpus reesii 1704] gi|237902921|gb|EEP77322.1| conserved [Uncinocarpus reesii 1704]
  misc_feature (59)..(133): SWISSPROT Homolog: EC 3.1.3.48 Protein-tyrosine-phosphatase
MLENGEGKEQTDLDSYTREGPELRDLLLAANNSTAENASQSPRVAVVDVRDDDHVGGHIRNSMHFPTHSLDATMPTLLRKLADKDIVVFHCALSQQRGPSAALKYLREKESKGTKESDSQQKVYVLYGGFNKWAQEFGENETLTEGFLADLHEF

SEQ ID NO: 28428 - DNA, 1145 bp, Muscodor strobelii
  misc_feature: SGI EST ID NO. CUFF.67046.0
  misc_feature: Variant of the nucleotide sequence at SEQ ID NO 28426
atttgaagcatgtcgaatcgatgttagaaaacggtgaaggaaaagaacaaactgacctcgattcatacaccagagagggtcccgagcttcgtgatctccttctggcagcaaataacagcacagccgaaaatgcctcacagtcaccaagggtagcggttgttgatgtcagagacgatgaccacgtcggtgggcacatccgcaattccatgcactttcctacgcatagtctagacgcaaccatgccgacgttattacgcaagcttgcggacaaggacattgttgttttccactgtgctctgagtcaacagcgcggtccctcggcggctctgaaatacctaagagaaaaggagagtaagggcacaaaggaatcagattctcagcaaaaagtttacgtgctatatgggggctttaacaaatgggcacaggaatttggtgaaaacgaaactcttacggaagggttcctagcagatcttcatgaattctagaagcctgcatatatttaccagatgctttggagattaagtgcaggactgggcttgaggaattgtccatagccactattcaattcaattcaatattaatctccgcgagaacatatactcatagtctggcatcgcttttctcacccatatttcaagcttacgaccaagatcttctccgaattccgctctccatttcacagcttcctcgtcaatattaatcttgcccgccaccttgttcatatcaatcccagaacttccattaagagtgcgcagcattttgatggctattgccggaagtttactaatctgctcctcggttggcttttcccaggagaatttcagcttgttcggatcaaggcctgtgattttcgcatatttcacaacgacctcgggacttgtcattatgtcgtcggcgtcgatgacaactggccactgacttccctcgccgaattgctcaacgtaaaaatcgtacattgttctgaaccatttagtcgtcatctctatctcgtgtggttcttttcttcccgcccaagcaacgccatctcctcctttgctattgtcgaaagtatggaggagagatgggagcatcactggttaatggttagatcttgatacggacgactcgcttgtgtgtaacttggggcgtcttacttgctgggtgac

SEQ ID NO: 28429 - DNA, 1008 bp, Muscodor strobelii
  misc_feature: SGI cDNA ID NO. 569753
  misc_feature: Encodes the peptide sequence at SEQ ID NO 28430
atggctgctgaaccattgtctccgacgcctcgtatatggctcctcacagcgcctcgaactgcgtccaatttactcgtgaaaatactcaatctcagcgagcaaaatgtaaaacctgctaataatggaggctacttctttcacccagcactcgtagtgaagatgaaactcatgacaaagcccatgagagactggtcgagcgaagaactcgctagtgtagatgaagcgcagcgcaattgcttcgaaacactacagacgcatattgaggatgctgaagcagcaaataagattgtcttcgtcaaagaacatgtcatgttcatgaatgatcccgtatacgagacgagatacaggcatggtgatgatgccagttttgaaaccggccctcccaagccgctgccttgccgcggcattgataatcccgctcgatcttccctaaacctgacgtgcatgccggatgagtttctaagaaagtggcacccgacattcctaattcgtcacccagcaatgatgctcccatctctcctccatactttcgacaatagcaaaggaggagatggcgttgcttgggcgggaagaaaagaaccacacgagatagagatgacgactaaatggttcagaacaatgtacgatttttacgttgagcaattcggcgagggaagtcagtggccagttgtcatcgacgccgacgacataatgacaagtcccgaggtcgttgtgaaatatgcgaaaatcacaggccttgatccgaacaagctgaaattctcctgggaaaagccaaccgaggagcagattagtaaacttccggcaatagccatcaaaatgctgcgcactcttaatggaagttctgggattgatatgaacaaggtggcgggcaagattaatattgacgaggaagctgtgaaatggagagcggaattcggagaagatcttggtcgtaagcttgaaatatgggtgagaaaagcgatgccagactatgagtatatgttctcgcggagattaatattgaattga

SEQ ID NO: 28430 - protein, 335 aa, Muscodor strobelii
  misc_feature: SGI Peptide ID NO. 569753
  misc_feature (13)..(332): NCBI GI: 256725437 Blast Desc: NECHADRAFT_95141 [Nectria haematococca mpVI 77-13-4]
  misc_feature (9)..(334): NCBI GI: 116179332 Blast Desc: CHGG_00294 [Chaetomium globosum CBS 148.51] gi|88184591|gb|EAQ92059.1| CHGG_00294 [Chaetomium globosum CBS 148.51]
  misc_feature (11)..(332): NCBI GI: 46115060 Blast Desc: FG03372.1 [Gibberella zeae PH-1]
  misc_feature (7)..(332): NCBI GI: 256722378 Blast Desc: NECHADRAFT_17690 [Nectria haematococca mpVI 77-13-4]
  misc_feature (8)..(334): NCBI GI: 46118071 Blast Desc: FG04682.1 [Gibberella zeae PH-1]
  misc_feature (11)..(332): NCBI GI: 226287819 Blast Desc: conserved [Paracoccidioides brasiliensis Pb18]
  misc_feature (6)..(333): NCBI GI: 238845398 Blast Desc: conserved [Microsporum canis CBS 113480]
  misc_feature (11)..(332): NCBI GI: 225680182 Blast Desc: conserved [Paracoccidioides brasiliensis Pb03]
  misc_feature (11)..(332): NCBI GI: 226281710 Blast Desc: conserved [Paracoccidioides brasiliensis Pb01]
  misc_feature (11)..(332): NCBI GI: 238845399 Blast Desc: conserved [Microsporum canis CBS 113480]
MAAEPLSPTPRIWLLTAPRTASNLLVKILNLSEQNVKPANNGGYFFHPALVVKMKLMTKPMRDWSSEELASVDEAQRNCFETLQTHIEDAEAANKIVFVKEHVMFMNDPVYETRYRHGDDASFETGPPKPLPCRGIDNPARSSLNLTCMPDEFLRKWHPTFLIRHPAMMLPSLLHTFDNSKGGDGVAWAGRKEPHEIEMTTKWFRTMYDFYVEQFGEGSQWPVVIDADDIMTSPEVVVKYAKITGLDPNKLKFSWEKPTEEQISKLPAIAIKMLRTLNGSSGIDMNKVAGKINIDEEAVKWRAEFGEDLGRKLEIWVRKAMPDYEYMFSRRLILN

SEQ ID NO: 28431 - DNA, 792 bp, Muscodor strobelii
  misc_feature: SGI cDNA ID NO. 569754
  misc_feature: Encodes the peptide sequence at SEQ ID NO 28432
atggctctgctcttacggggaaatgaggctctcaacataaacccacccactggagttacggatcacttagatgtagcaagctcagattggttatttgctgtaacggcaatctacctcattgcatttttcggtgtcttgatcccatgctttacttcgcccgaaagtgatagagtgttccattatctctacactttgaccgtcctagttggcggcattagctactatgcagaggcagcggatctaggttggagcgctgtaggatcccgtcagtttttcttcgtgcgatatgtaaactgggctttcgccttcccatctgttgcgttgggacttggcatgctctgtggagtgtcatggactacaatcatcacaaacattgtgagcgcattggtttgggtcgcctcatatgccgcagctgcgtataccaccacttcttaccggtggggattctatgccttcggtaccttcacttggatcattctagcgatgagtactctcaatgaaggtcgcgaagctgctcaacgactcggtatcgccaaggactatatgattctatcagtctggatgaatctcacatggttagcatttgttgtggcatttgcactaacagatggtgccggtgtcatcaacgtcttcggggcttccatcttcattggcattatcgacatcctcatgattcctctctggagtgttgcatttattctactatcgcgcaaatgggattaccgccaactgcgtctagatttcagcgagcaccggtttgatcccgcaagcgaaatctgttcgaaaacatag

SEQ ID NO: 28432 - protein, 263 aa, Muscodor strobelii
  misc_feature: SGI Peptide ID NO. 569754
  misc_feature (25)..(256): Pfam Id: PF01036 Pfam Desc: Bacteriorhodopsin
  misc_feature (1)..(258): NCBI GI: 212528034 Blast Desc: protein FDD123, [Penicillium marneffei ATCC 18224] gi|210073572|gb|EEA27659.1| protein FDD123, [Penicillium marneffei ATCC 18224]
  misc_feature (1)..(262): NCBI GI: 242767466 Blast Desc: protein FDD123, [Talaromyces stipitatus ATCC 10500] gi|218724570|gb|EED23987.1| protein FDD123, [Talaromyces stipitatus ATCC 10500]
  misc_feature (1)..(263): NCBI GI: 145246114 Blast Desc: An12g02200 [Aspergillus niger] gi|134080019|emb|CAK41066.1| protein product [Aspergillus niger]
  misc_feature (1)..(258): NCBI GI: 115436848 Blast Desc: conserved [Aspergillus terreus NIH2624] gi|114188474|gb|EAU30174.1| conserved [Aspergillus terreus NIH2624]
  misc_feature (1)..(258): NCBI GI: 256730840 Blast Desc: NECHADRAFT_89813 [Nectria haematococca mpVI 77-13-4]
  misc_feature (1)..(251): NCBI GI: 46109116 Blast Desc: FG01440.1 [Gibberella zeae PH-1]
  misc_feature (29)..(251): NCBI GI: 256724030 Blast Desc: NECHADRAFT_7781 [Nectria haematococca mpVI 77-13-4]
  misc_feature (1)..(255): NCBI GI: 85083669 Blast Desc: NCU01735 [Neurospora crassa OR74A] gi|8218236|emb|CAB92637.1| related to YRO2 protein [Neurospora crassa] gi|28918245|gb|EAA27922.1| conserved [Neurospora crassa
  misc_feature (1)..(255): NCBI GI: 171689094 Blast Desc: protein product [Podospora anserina] gi|170944509|emb|CAP70620.1| protein product [Podospora anserina]
  misc_feature (3)..(250): NCBI GI: 261358583 Blast Desc: FDD123 [Verticillium albo-atrum VaMs.102]
MALLLRGNEALNINPPTGVTDHLDVASSDWLFAVTAIYLIAFFGVLIPCFTSPESDRVFHYLYTLTVLVGGISYYAEAADLGWSAVGSRQFFFVRYVNWAFAFPSVALGLGMLCGVSWTTIITNIVSALVWVASYAAAAYTTTSYRWGFYAFGTFTWIILAMSTLNEGREAAQRLGIAKDYMILSVWMNLTWLAFVVAFALTDGAGVINVFGASIFIGIIDILMIPLWSVAFILLSRKWDYRQLRLDFSEHRFDPASEICSKT

SEQ ID NO: 28433 - DNA, 1466 bp, Muscodor strobelii
  misc_feature: SGI EST ID NO. CUFF.67058.0
  misc_feature: Variant of the nucleotide sequence at SEQ ID NO 28431
ccatcccccaacactagtttctcgcagtctattactgatgactcggtagttccagacaaaataccaactttcttctcatttccataacatatcatatttattttatttctttaacaattcgcagatcgaatagacatagagttgttacaatggctctgctcttacggggaaatgaggctctcaacataaacccacccactggagttacggatcacttagatgtagcaagctcagattggttatttgctgtaacggcaatctacctcattgcatttttcggtgtcttgatcccatgctttacttcgcccgaaagtgatagagtgttccattatctctacactttgaccgtcctagttggcggcattagctactatgcagaggcagcggatctaggttggagcgctgtaggatcccgtcagtttttcttcgtgcgatatgtaaactgggctttcgccttcccatctgttgcgttgggacttggcatgctctgtggagtgtcatggactacaatcatcacaaacattgtgagcgcattggtttgggtcgcctcatatgccgcagctgcgtataccaccacttcttaccggtggggattctatgccttcggtaccttcacttggatcattctagcgatgagtactctcaatgaaggtcgcgaagctgctcaacgactcggtatcgccaaggactatatgattctatcagtctggatgaatctcacatggttagcatttgttgtggcatttgcactaacagatggtgccggtgtcatcaacgtcttcggggcttccatcttcattggcattatcgacatcctcatgattcctctctggagtgttgcatttattctactatcgcgcaaatgggattaccgccaactgcgtctagatttcagcgagcaccggtttgatcccgcaagcgaaatctgttcgaaaacatagtcgatatcgaaactgtttaactcttctatcgacatgattttagcagaccaatattacggtcaagggatcgattgatcgaggaaatctcaaccccatagtcccccccacccttttctcttctttcaacaggctagctttagaaccaagtttttatatgtatatgtaatatccgccctcgttcaattgcatctgttttgttcttatatgactattcttgtaagcttgtgaatgagtttcgcttgtgcggcatgatggactctatatgatgtgttgcgttctaaaatagtcattggcctaaggctcatttgacattcgcagcgcgagcgggcgactactttgaaagtatgttgaagataatacataatctggtaggcctaatgatcgacggcatgtatcaaaagcatgattagttcgttaccctttttgtagacgacccgggaaacgggtattggatgtgcgtcggccatttgattggtcaatactctccattagaagtaaatacagctcctgttaaggtaagccgtg

SEQ ID NO: 28434 - DNA, 1416 bp, Muscodor strobelii
  misc_feature: SGI cDNA ID NO. 569755
  misc_feature: Encodes the peptide sequence at SEQ ID NO 28435
atggcaaacttggcttggcctgcctgggattgccgggatcagcaagatcaagccgagctaaattacaatcagcctttgcgcatcaagaatcgtcgtcttgaggacgagaatctggccttgaagaagctgctccgagagcataacatatcatggcagggccagtccaagcggcccgctagtcctgagccttcatcacgggtcactaggtctcgtcgctcacacggtacccagggaacgctcccgtatctgcccgttgagatacagctcaaaatactctcatgttcgttcgcgctcacatctccacaccctatcgttgacccgctctgcaagttgaaacctgaacgagccttggcacgcgagaaggccaagaaatcccacgatctcgctatccatttcttgaccacatgccgagcttaccatgtcgaaggcactaagttcctatggtcaaacaacactttcgttttcacgagcccaacttgcctgagaaattttgcagaagttgatcttgtctggcgtcagcaagtcaagcacgtcaacctccgtctagtcgcgaaattctacgacgacgaggaccgttcccaccggctgccacgaacttaccatccagacctcaagaaaccagtttctcttctcgtccaacgccgtgtgaaggagaacactcttgctcgtcgtggctttcgtgcttacgcttggcttcaactgatcgactttcttgaagccatgctgcctccgtatgatcccaagtcgacttcactttctgtacacccgaggctgctgccgtctctttcgagtcttcgcatagactttgtaaactttacggataatctactccagtatccaccgcatcaattgcatgacctggcctcgcatcaactgggctgcatgttgaacgagctcatcttgactggcattcccactgatgagtgtggaatgcgagcgagcagtgagctatcaggcctcctaaaggacgaaggcctcctaattgatcacgcacctactatgctcgccgacaagaagggtattcgccgactccagtgcaatgacagagagtgccactatacttctaaagtgattcgtggaatgcacaatagtcatttctatcttcatgatcatcatggacgcgaggaattacagtttgatcctgctcccgccgatgacggagagcctccatattccgcgttcctttcgtgtcgcaccatctggaagaaagtaccggtatgcattgacaagaaagagcggaagtgggagctgtttgatcgcgtcagcggcatgccttgggaagacatagaagaggatgccacgatgttcgatttcctcgacgatgacgacgatggcatggtatgtgagaattgtggtgaagtccacccaggagcaatcctccctgatgaattgatggatctctacgacgacttttga

SEQ ID NO: 28435 - protein, 471 aa, Muscodor strobelii
  misc_feature: SGI Peptide ID NO. 569755
  misc_feature (9)..(466): NCBI GI: 46136221 Blast Desc: FG09626.1 [Gibberella zeae PH-1]
  misc_feature (12)..(456): NCBI GI: 116195564 Blast Desc: CHGG_04380 [Chaetomium globosum CBS 148.51] gi|88180293|gb|EAQ87761.1| CHGG_04380 [Chaetomium globosum CBS 148.51]
  misc_feature (7)..(455): NCBI GI: 170940197 Blast Desc: protein product [Podospora anserina]
  misc_feature (1)..(455): NCBI GI: 39940792 Blast Desc: MGG_04844 [Magnaporthe grisea 70-15] gi|145010932|gb|EDJ95588.1| MGG_04844 [Magnaporthe grisea 70-15]
  misc_feature (9)..(197): NCBI GI: 261352559 Blast Desc: conserved [Verticillium albo-atrum VaMs.102]
  misc_feature (23)..(468): NCBI GI: 154311010 Blast Desc: BC1G_06623 [Botryotinia fuckeliana B05.10] gi|150851027|gb|EDN26220.1| BC1G_06623 [Botryotinia fuckeliana B05.10]
  misc_feature (284)..(469): NCBI GI: 261352559 Blast Desc: conserved [Verticillium albo-atrum VaMs.102]
  misc_feature (212)..(326): NCBI GI: 156034583 Blast Desc: SS1G_13226 [Sclerotinia sclerotiorum 1980] gi|154698630|gb|EDN98368.1| SS1G_13226 [Sclerotinia sclerotiorum 1980]
MANLAWPAWDCRDQQDQAELNYNQPLRIKNRRLEDENLALKKLLREHNISWQGQSKRPASPEPSSRVTRSRRSHGTQGTLPYLPVEIQLKILSCSFALTSPHPIVDPLCKLKPERALAREKAKKSHDLAIHFLTTCRAYHVEGTKFLWSNNTFVFTSPTCLRNFAEVDLVWRQQVKHVNLRLVAKFYDDEDRSHRLPRTYHPDLKKPVSLLVQRRVKENTLARRGFRAYAWLQLIDFLEAMLPPYDPKSTSLSVHPRLLPSLSSLRIDFVNFTDNLLQYPPHQLHDLASHQLGCMLNELILTGIPTDECGMRASSELSGLLKDEGLLIDHAPTMLADKKGIRRLQCNDRECHYTSKVIRGMHNSHFYLHDHHGREELQFDPAPADDGEPPYSAFLSCRTIWKKVPVCIDKKERKWELFDRVSGMPWEDIEEDATMFDFLDDDDDGMVCENCGEVHPGAILPDELMDLYDDF

SEQ ID NO: 28436 - DNA, 1484 bp, Muscodor strobelii
  misc_feature: SGI EST ID NO. CUFF.67074.0
  misc_feature: Variant of the nucleotide sequence at SEQ ID NO 28434
ctccatcattttccttaggagatgatccgggcaagatcagactccctattgacgaccattctattgacatgttctagtcgcgctcacatctccacaccctatcgttgacccgctctgcaagttgaaacctgaacgagccttggcacgcgagaaggccaagaaatcccacgatctcgctatccatttcttgaccacatgccgagcttaccatgtcgaaggcactaagttcctatggtcaaacaacactttcgttttcacgagcccaacttgcctgagaaattttgcagaagttgatcttgtctggcgtcagcaagtcaagcacgtcaacctccgtctagtcgcgaaattctacgacgacgaggaccgttcccaccggctgccacgaacttaccatccagacctcaagaaaccagtttctcttctcgtccaacgccgtgtgaaggagaacactcttgctcgtcgtggctttcgtgcttacgcttggcttcaactgatcgactttcttgaagccatgctgcctccgtatgatcccaagtcgacttcactttctgtacacccgaggctgctgccgtctctttcgagtcttcgcatagactttgtaaactttacggataatctactccagtatccaccgcatcaattgcatgacctggcctcgcatcaactgggctgcatgttgaacgagctcatcttgactggcattcccactgatgagtgtggaatgcgagcgagcagtgagctatcaggcctcctaaaggacgaaggcctcctaattgatcacgcacctactatgctcgccgacaagaagggtattcgccgactccagtgcaatgacagagagtgccactatacttctaaagtgattcgtggaatgcacaatagtcatttctatcttcatgatcatcatggacgcgaggaattacagtttgatcctgctcccgccgatgacggagagcctccatattccgcgttcctttcgtgtcgcaccatctggaagaaagtaccggtatgcattgacaagaaagagcggaagtgggagctgtttgatcgcgtcagcggcatgccttgggaagacatagaagaggatgccacgatgttcgatttcctcgacgatgacgacgatggcatggtatgtgagaattgtggtgaagtccacccaggagcaatcctccctgatgaattgatggatctctacgacgacttttgagaagcagcaaggtggccattgtacaatctgacggtgaatgatgaacgatcacgacatatgaacgacctggcgtttggcattcgttgtttttgcggctcatcttctgtcggtgtttaaaaaggcatcaaaaagcaaagatgttaattaggaaggtcgggattcgtctcgctgtgttagtaaataatctttgaggacagaaaaatgcggttgattgtggagattagagagcacaagctgtgtaataatagaagtttaacaatgtatacaatttccgaat

SEQ ID NO: 28437 - DNA, 1659 bp, Muscodor strobelii
  misc_feature: SGI cDNA ID NO. 569756
  misc_feature: Elevated expression when VOC is produced
  misc_feature: Encodes the peptide sequence at SEQ ID NO 28438
atgccgcaagcaacttccctctctgcctggacctccctggaggagcactacaagaccgtcggcaagagttttgtgctgaaggaggcctttgcctctgactctagccgcttcgacaagctcagcaagactttcggcggctctgccggcaccgagattctgttcgacttcagcaagaacctcgtcactccagagacgattgatctgctggtcaagctggccgaggaggctggcctggaaaagaagcgcgatgccatgttcgctggtgagaagatcaacttcaccgaacagcgtgccgtatatcacaccgctttgcgcaatgtcggcggatgggaaatgaaggtcgaaggcaaggatgtcatgaacgttgctggcggcgtcaatgaggtccttgaacatatgaaggagttctccgagcaagttcgtagcggcgagtggaagggctttaccggcaagaagctgactactattatcaacatcggaatcggcggctctgacttgggccccgtaatggtaactgaggctctcaagcattacggtgccagagacatgactctccactttgtttccaacatcgatggcacccacatggctgaagcccttgctgcctccgatccggagacgactcttttcctcgttgcctccaagaccttcaccaccgccgagacttgcacgaatgccaacacagcgaagtcatggttcctcgagaagaccggtaacaagggagagattgcaaagcactttgtagctttgtccaccaacgagcccgaggttaccaaattcggtatcgatagcaagaacatgttcggattcgagagctgggttggcggtcgatactccgtctggagcgccattggtctcagtgtcgccctctacatcggctacgataacttccacaagttcctttctggtgcccacgccatggacaagcatttccgcgagactcccttaaaggataacattcctgtgctcggtggtcttctgagcgtgtggtacagcgacttctttgccgctcagactcacttggttgctcctttcgaccagtatttgcaccgattccccgcctacctccagcagttgtccatggaatccaacggcaagacaatcacttcagatggctctccggccaagtatacgaccggccccattctcttcggcgaaccctgcaccaatgcccagcactccttcttccaattggtccaccagggaaccaagctgatcccaactgatttcatcctcgccgccaagtcacacaaccctatctcagacaacctccatcagaagatgttagcctccaactactttgctcaggccgaggctctcatgatcggcaagaccgccgaccaggtcaagtcagagggtacccaagaggatctggttccccacaaggtattccttggtaaccgtcctacgactagcatcctcgtgggtggtaccatcggccccgccgagctcggcgcgctcatcgtctactacgagcacctcaccttcactgagggtgccatctgggacatcaactcgttcgaccagtggggtgtcgagctcggcaaggtactcgccaagaagattctcaaggagcttgacgagtccggcaacggcgagggccacgatgccagcaccggcagcctcatcggcgctttcaagaagtacgccggcaattga

SEQ ID NO: 28438 - protein, 552 aa, Muscodor strobelii
  misc_feature: SGI Peptide ID NO. 569756
  misc_feature (55)..(543): Pfam Id: PF00342 Pfam Desc: Phosphoglucose isomerase
  misc_feature (1)..(552): NCBI GI: 46122931 Blast Desc: FG05843.1 [Gibberella zeae PH-1]
  misc_feature (1)..(550): NCBI GI: 261352637 Blast Desc: glucose-6-phosphate isomerase [Verticillium albo-atrum VaMs.102]
  misc_feature (1)..(550): NCBI GI: 85068239 Blast Desc: Glucose-6-phosphate isomerase [Neurospora crassa OR74A] gi|52782824|sp|Q7S986.1|G6PI_NEUCR RecName: Full=Glucose-6-phosphate isomerase; Short=GPI; AltName: AltName:
  misc_feature (1)..(550): NCBI GI: 256731189 Blast Desc: NECHADRAFT_123412 [Nectria haematococca mpVI 77-13-4]
  misc_feature (1)..(550): NCBI GI: 109150106 Blast Desc: glucose-6-phosphate isomerase [Hypocrea jecorina]
  misc_feature (1)..(550): NCBI GI: 145608638 Blast Desc: glucose-6-phosphate isomerase [Magnaporthe grisea 70-15] gi|145016083|gb|EDK00573.1| glucose-6-phosphate isomerase [Magnaporthe grisea 70-15]
  misc_feature (1)..(551): NCBI GI: 170940184 Blast Desc: protein product [Podospora anserina]
  misc_feature (1)..(550): NCBI GI: 116195636 Blast Desc: glucose-6-phosphate isomerase [Chaetomium globosum CBS 148.51] gi|88180329|gb|EAQ87797.1| glucose-6-phosphate isomerase [Chaetomium globosum CBS 148.51]
  misc_feature (1)..(548): NCBI GI: 169620804 Blast Desc: SNOG_13608 [Phaeosphaeria nodorum SN15] gi|111057935|gb|EAT79055.1| SNOG_13608 [Phaeosphaeria nodorum SN15]
  misc_feature (1)..(548): NCBI GI: 189210475 Blast Desc: glucose-6-phosphate isomerase [Pyrenophora tritici-repentis Pt-1C-BFP] gi|187977662|gb|EDU44288.1| glucose-6-phosphate isomerase [Pyrenophora tritici-repentis
  misc_feature (1)..(550): SWISSPROT Homolog: EC 5.3.1.9 Glucose-6-phosphate isomerase
  misc_feature: Useful for introducing or modulating the production of volatile compounds
MPQATSLSAWTSLEEHYKTVGKSFVLKEAFASDSSRFDKLSKTFGGSAGTEILFDFSKNLVTPETIDLLVKLAEEAGLEKKRDAMFAGEKINFTEQRAVYHTALRNVGGWEMKVEGKDVMNVAGGVNEVLEHMKEFSEQVRSGEWKGFTGKKLTTIINIGIGGSDLGPVMVTEALKHYGARDMTLHFVSNIDGTHMAEALAASDPETTLFLVASKTFTTAETCTNANTAKSWFLEKTGNKGEIAKHFVALSTNEPEVTKFGIDSKNMFGFESWVGGRYSVWSAIGLSVALYIGYDNFHKFLSGAHAMDKHFRETPLKDNIPVLGGLLSVWYSDFFAAQTHLVAPFDQYLHRFPAYLQQLSMESNGKTITSDGSPAKYTTGPILFGEPCTNAQHSFFQLVHQGTKLIPTDFILAAKSHNPISDNLHQKMLASNYFAQAEALMIGKTADQVKSEGTQEDLVPHKVFLGNRPTTSILVGGTIGPAELGALIVYYEHLTFTEGAIWDINSFDQWGVELGKVLAKKILKELDESGNGEGHDASTGSLIGAFKKYAGN

SEQ ID NO: 28439 - DNA, 2210 bp, Muscodor strobelii
  misc_feature: SGI EST ID NO. CUFF.67136.1
  misc_feature: Variant of the nucleotide sequence at SEQ ID NO 28437
ctcgtttcccatcgcttccgcatcgtcgtcattagctttgctcccgtgttgtcactacctcgactactactcttaggtaggatattgctgtggtgacagtgccacgtctcatcgccataacgtcagtaagcattacatgaagtaagagctttgcttattttccacacgtggaatacccctagacttacttgctgctctatctccgtccctctagccaagatgccgcaagcaacttccctctctgcctggacctccctggaggagcactacaagaccgtcggcaagagttttgtgctgaaggaggcctttgcctctgactctagccgcttcgacaagctcagcaagactttcggcggctctgccggcaccgagattctgttcgacttcagcaagaacctcgtcactccagagacgattgatctgctggtcaagctggccgaggaggctggcctggaaaagaagcgcgatgccatgttcgctggtgagaagatcaacttcaccgaacagcgtgccgtatatcacaccgctttgcgcaatgtcggcggatgggaaatgaaggtcgaaggcaaggatgtcatgaacgttgctggcggcgtcaatgaggtccttgaacatatgaaggagttctccgagcaagttcgtagcggcgagtggaagggctttaccggcaagaagctgactactattatcaacatcggaatcggcggctctgacttgggccccgtaatggtaactgaggctctcaagcattacggtgccagagacatgactctccactttgtttccaacatcgatggcacccacatggctgaagcccttgctgcctccgatccggagacgactcttttcctcgttgcctccaagaccttcaccaccgccgagacttgcacgaatgccaacacagcgaagtcatggttcctcgagaagaccggtaacaagggagagattgcaaagcactttgtagctttgtccaccaacgagcccgaggttaccaaattcggtatcgatagcaagaacatgttcggattcgagagctgggttggcggtcgatactccgtctggagcgccattggtctcagtgtcgccctctacatcggctacgataacttccacaagttcctttctggtgcccacgccatggacaagcatttccgcgagactcccttaaaggataacattcctgtgctcggtggtcttctgagcgtgtggtacagcgacttctttgccgctcagactcacttggttgctcctttcgaccagtatttgcaccgattccccgcctacctccagcagttgtccatggaatccaacggcaagacaatcacttcagatggctctccggccaagtatacgaccggccccattctcttcggcgaaccctgcaccaatgcccagcactccttcttccaattggtccaccagggaaccaagctgatcccaactgatttcatcctcgccgccaagtcacacaaccctatctcagacaacctccatcagaagatgttagcctccaactactttgctcaggccgaggctctcatgatcggcaagaccgccgaccaggtcaagtcagagggtacccaagaggatctggttccccacaaggtattccttggtaaccgtcctacgactagcatcctcgtgggtggtaccatcggccccgccgagctcggcgcgctcatcgtctactacgagcacctcaccttcactgagggtgccatctgggacatcaactcgttcgaccagtggggtgtcgagctcggcaaggtactcgccaagaagattctcaaggagcttgacgagtccggcaacggcgagggccacgatgccagcaccggcagcctcatcggcgctttcaagaagtacgccggcaattgaaggttggaagagagcggtggtgaggaacacaggccgcggctttgatatgccatccgtcgattctctcgccgctgtatctcccctcctctctatcatgatgagacgacaaaactgtaccactgggtaaaaaagacttatgtagaagattaaagaaaagaattgcgagcatccttctcatcccaaattccctgcgcgtagtcaatacatttagagtacctatctaccgcgtgtctcccactaagtattttgaggagaatagaagatcttgagagatctcatcgtatcttataaccataaccgatcaacgtcgatgaacaaatagtgcatttaaa

SEQ ID NO: 28440 - DNA, 1932 bp, Muscodor strobelii
  misc_feature: SGI cDNA ID NO. 569757
  misc_feature: Encodes the peptide sequence at SEQ ID NO 28441
atgtcgtggaagctcaccaagaagctaaaggagacccatttggggcccttgaccagcacattctcgcgcaacccttcgacatccaccatcacagacaaggacgagaaggctcctttgcccacatctgccaccccgactcccggcgataactctatcgctgcttcggaggccttagtgcaggagcccataatcgtccccccgaaacccggtatccttgtcgtcaccctccatgaaggccagaacttcgctcttccagatcagcaccgcaatgcctttgcacagagccatcaaggctccatgtcaacagggaatgctctgggtggcgttgctggatccgtaaggccaggctcttcccagagaacggccgccggctcgttcatgaatggctcgggtcgacctcagacatccgcaggcggattctccggcattccttcaaatcacggccgaatctcaagtaaatacctaccttatgctcttattgatttcgataaggttcaggtgtttgtcaactcggtgtccggtaaccccgaaaaccccctatgggctggtgacaacacgcagtacaagttcgatgtgtcccgtgtcaccgagctcaacatccacctctacatgcgcaacccgaatgctccgcctggatcaggccgaagccaagacatctttatcggcgtagtccgcatcaaccctcgattcgagaacaagcgcaacttcgtcgaagaccccaaagccagcaagaaagaccgcgaaaaggctgcagccgagttcgcaagccgggagcggggactcgggcataccggggtagagtgggttgatgtgcaatacggctcgggcaagctgaagattggtgtggagtacgtcgaaaaccgtgcaggcaaactcaagatagaggatttcgagttgctcaaggtggtcggcaagggcagtttcggcaaagtcatgcaagtcaagaagaaggataccaatcggatctacgcgctcaagacgattcgcaaagcacacatcatctcacgctccgaggttgcgcatacactggccgaaagatcggttctagcccagatcaacaaccctttcattgtacccctgaagttcactttccaatcgccagagaagctatactttgtgctagccttcgtcaacggcggcgaactgttccatcacttgcagaaggagcagcggttcgatgtcaaccgagcacgtttctacacggctgagcttctctgcgcccttgaatgcttgcacggcttcaacgtcatctaccgtgatctgaaaccggagaacatcctgctcgactatcagggtcatatcgcgctgtgcgactttggactctgcaagctggacatgaaagacgaggaccggaccaacacgttctgtggcacacctgagtatctcgctcccgagctcttgatgggccagggctacaacaagacggttgattggtggacgttgggcgttctcctctacgaaatgctgacgggcttgccaccattttacgatgaaaatactaatgagatgtatcgtaaaatcttgtcagagccattgcatttccctggggcagatgtggtgcctcctgctgcgaaggacttgcttacaaagctgctgaatcgcaagccggaagagcgattaggtgcgaacggcagcgctgagattaaggctcatccattcttccacgccatagattggcgtaagctattacagcgcaaatacgaacccaccttcaagcccaacgtggttgatgcattggacacggataacttcgaccctgagttcacatccgaggcaccccaggattcttacgtagagggcccagtcctgacacagacgatgcagaaccagtttgcaggattcagttacaaccgaccgattccaggacttggggacggaggtggcagtgtaaaggatccttctttcgtgggcagcattcaagatagaagatag

SEQ ID NO: 28441 - protein, 643 aa, Muscodor strobelii
  misc_feature: SGI Peptide ID NO. 569757
  misc_feature (574)..(620): Pfam Id: PF00433 Pfam Desc: Protein kinase C terminal domain
  misc_feature (297)..(554): Pfam Id: PF00069 Pfam Desc: Protein kinase domain
  misc_feature (425)..(507): Pfam Id: PF07714 Pfam Desc: Protein tyrosine kinase
  misc_feature (1)..(640): NCBI GI: 116195634 Blast Desc: CHGG_04415 [Chaetomium globosum CBS 148.51] gi|88180328|gb|EAQ87796.1| CHGG_04415 [Chaetomium globosum CBS 148.51]
  misc_feature (1)..(643): NCBI GI: 46122935 Blast Desc: FG05845.1 [Gibberella zeae PH-1]
  misc_feature (1)..(641): NCBI GI: 164424393 Blast Desc: serine/threonine-protein kinase gad8 [Neurospora crassa OR74A] gi|157070493|gb|EAA32898.2| serine/threonine-protein kinase gad8 [Neurospora crassa OR74A]
  misc_feature (8)..(642): NCBI GI: 170940185 Blast Desc: protein product [Podospora anserina]
  misc_feature (1)..(643): NCBI GI: 256731188 Blast Desc: [Nectria haematococca mpVI 77-13-4]
  misc_feature (8)..(641): NCBI GI: 458284 Blast Desc: serine/threonine protein kinase [Hypocrea jecorina]
  misc_feature (8)..(642): NCBI GI: 15072452 Blast Desc: protein kinase 1 [Cryphonectria parasitica]
  misc_feature (66)..(643): NCBI GI: 145608478 Blast Desc: conserved [Magnaporthe grisea 70-15] gi|145015956|gb|EDK00446.1| conserved [Magnaporthe grisea 70-15]
  misc_feature (1)..(639): NCBI GI: 261187972 Blast Desc: serine/threonine-protein kinase gad8 [Ajellomyces dermatitidis SLH14081] gi|239593414|gb|EEQ75995.1| serine/threonine-protein kinase gad8 [Ajellomyces dermatitidis
  misc_feature (1)..(639): NCBI GI: 226279854 Blast Desc: serine/threonine-protein kinase gad8 [Paracoccidioides brasiliensis Pb01]
  misc_feature (1)..(619): SWISSPROT Homolog: EC 2.7.11.1 Non-specific serine/threonine protein kinase
MSWKLTKKLKETHLGPLTSTFSRNPSTSTITDKDEKAPLPTSATPTPGDNSIAASEALVQEPIIVPPKPGILVVTLHEGQNFALPDQHRNAFAQSHQGSMSTGNALGGVAGSVRPGSSQRTAAGSFMNGSGRPQTSAGGFSGIPSNHGRISSKYLPYALIDFDKVQVFVNSVSGNPENPLWAGDNTQYKFDVSRVTELNIHLYMRNPNAPPGSGRSQDIFIGVVRINPRFENKRNFVEDPKASKKDREKAAAEFASRERGLGHTGVEWVDVQYGSGKLKIGVEYVENRAGKLKIEDFELLKVVGKGSFGKVMQVKKKDTNRIYALKTIRKAHIISRSEVAHTLAERSVLAQINNPFIVPLKFTFQSPEKLYFVLAFVNGGELFHHLQKEQRFDVNRARFYTAELLCALECLHGFNVIYRDLKPENILLDYQGHIALCDFGLCKLDMKDEDRTNTFCGTPEYLAPELLMGQGYNKTVDWWTLGVLLYEMLTGLPPFYDENTNEMYRKILSEPLHFPGADVVPPAAKDLLTKLLNRKPEERLGANGSAEIKAHPFFHAIDWRKLLQRKYEPTFKPNVVDALDTDNFDPEFTSEAPQDSYVEGPVLTQTMQNQFAGFSYNRPIPGLGDGGGSVKDPSFVGSIQDRR

SEQ ID NO: 28442 - DNA, 2991 bp, Muscodor strobelii
  misc_feature: SGI EST ID NO. CUFF.67168.1
  misc_feature: Variant of the nucleotide sequence at SEQ ID NO 28440
cccgtcgagcccccctctccccgtgtttattactcgtagtctctggcagcaatcggccccttctctgcgccaccctccccctgatccgatcgtcttcgccgtattcactgtctcgactgtttacatgccacttactatatacttcattctttccgtcttgcactcggcggcctctccatctcaagaccgcagcacctagcattcattcttcatcggctacccttatcgccgcatcagcctcgccccgggcttgttcctgcccgagccaaaaacaccacagcatccatatccatcgattccctccagctccgccacaggccgtgcccctctcctcaccaccgccaacaagacgtgctctcccgcccaccctcgctcgtaacggctgcactccagcccaaacccaagatatccccgacatcccgtctcccagcccagtcgctcgaccataggaggtccttcgaagatgtcgtggaagctcaccaagaagctaaaggagacccatttggggcccttgaccagcacattctcgcgcaacccttcgacatccaccatcacagacaaggacgagaaggctcctttgcccacatctgccaccccgactcccggcgataactctatcgctgcttcggaggccttagtgcaggagcccataatcgtccccccgaaacccggtatccttgtcgtcaccctccatgaaggccagaacttcgctcttccagatcagcaccgcaatgcctttgcacagagccatcaaggctccatgtcaacagggaatgctctgggtggcgttgctggatccgtaaggccaggctcttcccagagaacggccgccggctcgttcatgaatggctcgggtcgacctcagacatccgcaggcggattctccggcattccttcaaatcacggccgaatctcaagtaaatacctaccttatgctcttattgatttcgataaggttcaggtgtttgtcaactcggtgtccggtaaccccgaaaaccccctatgggctggtgacaacacgcagtacaagttcgatgtgtcccgtgtcaccgagctcaacatccacctctacatgcgcaacccgaatgctccgcctggatcaggccgaagccaagacatctttatcggcgtagtccgcatcaaccctcgattcgagaacaagcgcaacttcgtcgaagaccccaaagccagcaagaaagaccgcgaaaaggctgcagccgagttcgcaagccgggagcggggactcgggcataccggggtagagtgggttgatgtgcaatacggctcgggcaagctgaagattggtgtggagtacgtcgaaaaccgtgcaggcaaactcaagatagaggatttcgagttgctcaaggtggtcggcaagggcagtttcggcaaagtcatgcaagtcaagaagaaggataccaatcggatctacgcgctcaagacgattcgcaaagcacacatcatctcacgctccgaggttgcgcatacactggccgaaagatcggttctagcccagatcaacaaccctttcattgtacccctgaagttcactttccaatcgccagagaagctatactttgtgctagccttcgtcaacggcggcgaactgttccatcacttgcagaaggagcagcggttcgatgtcaaccgagcacgtttctacacggctgagcttctctgcgcccttgaatgcttgcacggcttcaacgtcatctaccgtgatctgaaaccggagaacatcctgctcgactatcagggtcatatcgcgctgtgcgactttggactctgcaagctggacatgaaagacgaggaccggaccaacacgttctgtggcacacctgagtatctcgctcccgagctcttgatgggccagggctacaacaagacggttgattggtggacgttgggcgttctcctctacgaaatgctgacgggcttgccaccattttacgatgaaaatactaatgagatgtatcgtaaaatcttgtcagagccattgcatttccctggggcagatgtggtgcctcctgctgcgaaggacttgcttacaaagctgctgaatcgcaagccggaagagcgattaggtgcgaacggcagcgctgagattaaggctcatccattcttccacgccatagattggcgtaagctattacagcgcaaatacgaacccaccttcaagcccaacgtggttgatgcattggacacggataacttcgaccctgagttcacatccgaggcaccccaggattcttacgtagagggcccagtcctgacacagacgatgcagaaccagtttgcaggattcagttacaaccgaccgattccaggacttggggacggaggtggcagtgtaaaggatccttctttcgtgggcagcattcaagatagaagatagattgaggctctttggcaggtcttcaggtgctatagacatagcgacgaggctgaagtagtaggatgagtgcgacgcaaagtcgacaaactcagtcagccaggcatgttacccataaagtcggcgatgcaaaagtgttagaagacacgagcagggtggcaaaagcacgttggagactacatgcacgcaaaggttttctgtttctgacagaacagcaaatatcattggagccgagaaacagcttcaacagacacaggacgtggaagtggcgagcaagcgccgtcaacgtgtatacagacgtgctcgtagatgcccagagaacagaaaaagcaagagagatgtcatcatattgctttgaaactcttttttcctcatttgcaaatgggtgtagttcggattgtactacacgaatggcgagccgtgggggacagacaggatggcatcgaagcaaatggtacctccgaataacacaacgaataatgttttgataatggtcaatcggtacagtaggttcgatcctcgcgtaatctacacatataaatgcacttgaaattatagtagatgatatatcatgttttcgaaataaatgtgttgccagg

SEQ ID NO: 28443 - DNA, 552 bp, Muscodor strobelii
  misc_feature: SGI cDNA ID NO. 569758
  misc_feature: Encodes the peptide sequence at SEQ ID NO 28444
atgttcttcgacacactcatcaagacctcgctcttaccggagcggtcgtcaaacgacgttcctctttggccgaagacggctccgaaggcatctttcgccagtctaccccccgaactccatatgctcatcgtgaagctacttccctatcccgatgctctatcattgaagcacacgaatcggtatttctaccatgtagtcgatacgggagtgcaagtcaaggtggactggcttatggaacggcgccggctccatttggaatgccccaatgatcggcgatgtgatctcgggagcgatttgaagttctgccgaggcagcatcaagctattaatgcagcggcgccgagagcatttcgaatgtgattctcgaccaggagttggttgtttagtgctcggcactaccagccgctgcgcttacaagcgaagctttagacaacgttgcgagaagtggctacggatccgtctgtcggtcgagatctggtggctcttgcttgctgctgtacctgttttctttgcttgcgtctgggcaagtgagcttgcaagctggaagttctga

SEQ ID NO: 28444 - protein, 183 aa, Muscodor strobelii
  misc_feature: SGI Peptide ID NO. 569758
  misc_feature (30)..(77): Pfam Id: PF00646 Pfam Desc: F-box domain
  misc_feature (28)..(182): NCBI GI: 171691264 Blast Desc: protein product [Podospora anserina] gi|170945580|emb|CAP71693.1| protein product [Podospora anserina]
  misc_feature (27)..(176): NCBI GI: 154304992 Blast Desc: BC1G_08586 [Botryotinia fuckeliana B05.10] gi|150853749|gb|EDN28941.1| BC1G_08586 [Botryotinia fuckeliana B05.10]
  misc_feature (31)..(107): NCBI GI: 116195306 Blast Desc: CHGG_04251 [Chaetomium globosum CBS 148.51] gi|88180164|gb|EAQ87632.1| CHGG_04251 [Chaetomium globosum CBS 148.51]
  misc_feature (25)..(104): NCBI GI: 256726803 Blast Desc: NECHADRAFT_32215 [Nectria haematococca mpVI 77-13-4]
  misc_feature (28)..(128): NCBI GI: 46136333 Blast Desc: FG09682.1 [Gibberella zeae PH-1]
  misc_feature (31)..(107): NCBI GI: 145611558 Blast Desc: MGG_00298 [Magnaporthe grisea 70-15] gi|145018822|gb|EDK03101.1| MGG_00298 [Magnaporthe grisea 70-15]
  misc_feature (24)..(176): NCBI GI: 242778561 Blast Desc: F-box domain protein [Talaromyces stipitatus ATCC 10500] gi|218722883|gb|EED22301.1| F-box domain protein [Talaromyces stipitatus ATCC 10500]
  misc_feature (30)..(179): NCBI GI: 255941578 Blast Desc: Pc16g12590 [Penicillium chrysogenum Wisconsin 54-1255] gi|211586181|emb|CAP93929.1| Pc16g12590 [Penicillium chrysogenum Wisconsin 54-1255]
  misc_feature (14)..(130): NCBI GI: 70996040 Blast Desc: F-box domain protein [Aspergillus fumigatus Af293] gi|66850410|gb|EAL90737.1| F-box domain protein [Aspergillus fumigatus Af293] gi|159131529|gb|EDP56642.1| F-box domain protein
  misc_feature (14)..(130): NCBI GI: 44889997 Blast Desc: [Aspergillus fumigatus]
MFFDTLIKTSLLPERSSNDVPLWPKTAPKASFASLPPELHMLIVKLLPYPDALSLKHTNRYFYHVVDTGVQVKVDWLMERRRLHLECPNDRRCDLGSDLKFCRGSIKLLMQRRREHFECDSRPGVGCLVLGTTSRCAYKRSFRQRCEKWLRIRLSVEIWWLLLAAVPVFFACVWASELASWKF

SEQ ID NO: 28445 - DNA, 1095 bp, Muscodor strobelii
  misc_feature: SGI EST ID NO. CUFF.67084.0
  misc_feature: Variant of the nucleotide sequence at SEQ ID NO 28443
ttacatttcatccctatggagagctgcaactgaatataccctggctaggacgccaatgtggctcaatccgttgctcgaaacctggaaacgcttcagtcccaggctaatgtccacttcctcgtatcagccttggatgtcagctttggatggagattggccaaaccccccagctttctataccggtgcctggttacaggtgacagccatgcatctcgtttgactacttttcgctagtccagtggctgtggctgttgtcgatggcagactcgaccgagtagacaaggcaacagtaggtttaaatattgcaaatcgcacctatcgctctcaatgtgcaatctgccgattgcttgacaagaaatcgtagtcatgttcttcgacacactcatcaagacctcgctcttaccggagcggtcgtcaaacgacgttcctctttggccgaagacggctccgaaggcatctttcgccagtctaccccccgaactccatatgctcatcgtgaagctacttccctatcccgatgctctatcattgaagcacacgaatcggtatttctaccatgtagtcgatacgggagtgcaagtcaaggtggactggcttatggaacggcgccggctccatttggaatgccccaatgatcggcgatgtgatctcgggagcgatttgaagttctgccgaggcagcatcaagctattaatgcagcggcgccgagagcatttcgaatgtgattctcgaccaggagttggttgtttagtgctcggcactaccagccgctgcgcttacaagcgaagctttagacaacgttgcgagaagtggctacggatccgtctgtcggtcgagatctggtggctcttgcttgctgctgtacctgttttctttgcttgcgtctgggcaagtgagcttgcaagctggaagttctgattatgatatttttacttcttgttgtatacctactcactgtacatctaatgaatgacgataataatattggaaataatcatgggaaattgtcatcatcgatcctgacttctagagcgtttcaatgataagtcaggggaaacaagtaccttagcaagtattgattaacatcaatgaaac

SEQ ID NO: 28446 - DNA, 1524 bp, Muscodor strobelii
  misc_feature: SGI cDNA ID NO. 569759
  misc_feature: Encodes the peptide sequence at SEQ ID NO 28447
atggccgactcggccttgaaccgcgacatcagcatcggcaggattggtgacggcgacggcgacggcaacagcgactacggatccgacttttctgccggcgaggaactactagtagaccagctgctgcagcgcatcgcgcccgacagctcgaccctggagattgtgtcgtccgagtcgcgccatgcccgggtctcgcctcctgcctcggcagcgcctgagaacaagtatctgcctcctccccttgcgcccctcgcgatcgacgacggtgtttcgacgcccggtagcgaccagcactccatatcgccagattccatcccctacccggatttaagccccgcgctgtctgatctagaacctccggcccgccatgcctcgcagcctgctcctccctctcctgatccagaggacaccaggcctccaatcgaacgatttcgatccttccccaagcgcccgctgactgtctctgatatgtcggccggcgcatggtgcgagctccaacacttctataccttgagtcttcttccgggcggcaagaagacgaagacccctgctatgcgaggtggcactcgcgtacacaagaagctagaggacgaagtgcattccgctgttcaggtcacgatcgcatccaaagaagaagcttttgccctacggttgtggaacatcatccaagggctacgcactcttcgcgatactggactcacaagagaattggaggtctggggactcctagacggtcaagtcatcaatggcgtcatcgaccaagtcagttatcagagcccaaacgccgacttcgagaaagaagtgatgcaggccagttctcccacttcggagcagcaagcaacgctcgacgagtatctgcatggggggactcgcaagactatgtatttgacggacgtaaagactcgaggaactgacaggctgccggcaggcacacaggttcggcctgctcgtgtccaactgttcctctatcatcgtcttctctcaaacatggcttcggacaagctgaactattctatcatactagagcgctatggccttaatggagctgcgcgcttctccgatgctttcatggcgcaaatcggtggacttcatgatgaaatcttttacgacgccgattctgagatagagcaggcatcacaggattcatcatatacttccgactttatacgctatcggtcaatctcccagattgtttcattgctcaaagaggagctaaaggtgacattccctgctgggggtgcatctatcaatgaccttcttgccgtcgaataccggcatcgagatgatggccgtgctctcggtaataactgctttatgaacgacccggataccctagatggctacgtgaaagacacattaagatggtggcgcggagagcgagaaccgcaaggagtccagatcgaagaaacgtacaaatgtgggtggtgcgagtttgcagagaattgccagtggaggaaagacaaggaagttgaacattcgatgaagaggaaagccacaagaaccttaaagcgagagtcatcttga

SEQ ID NO: 28447 - protein, 507 aa, Muscodor strobelii
  misc_feature: SGI Peptide ID NO. 569759
  misc_feature (89)..(504): NCBI GI: 46136335 Blast Desc: FG09683.1 [Gibberella zeae PH-1]
  misc_feature (55)..(507): NCBI GI: 256727359 Blast Desc: NECHADRAFT_90786 [Nectria haematococca mpVI 77-13-4]
  misc_feature (98)..(504): NCBI GI: 85076323 Blast Desc: NCU04450 [Neurospora crassa OR74A] gi|28916938|gb|EAA26672.1| NCU04450 [Neurospora crassa OR74A] gi|40882171|emb|CAF05997.1| conserved [Neurospora crassa]
  misc_feature (21)..(479): NCBI GI: 261352705 Blast Desc: conserved [Verticillium albo-atrum VaMs.102]
  misc_feature (20)..(506): NCBI GI: 154304994 Blast Desc: BC1G_08587 [Botryotinia fuckeliana B05.10] gi|150853750|gb|EDN28942.1| BC1G_08587 [Botryotinia fuckeliana B05.10]
  misc_feature (140)..(485): NCBI GI: 171691266 Blast Desc: protein product [Podospora anserina] gi|170945581|emb|CAP71694.1| protein product [Podospora anserina]
  misc_feature (85)..(498): NCBI GI: 39975113 Blast Desc: MGG_00297 [Magnaporthe grisea 70-15] gi|145018823|gb|EDK03102.1| MGG_00297 [Magnaporthe grisea 70-15]
  misc_feature (23)..(488): NCBI GI: 156062520 Blast Desc: SS1G_01376 [Sclerotinia sclerotiorum 1980] gi|154696712|gb|EDN96450.1| SS1G_01376 [Sclerotinia sclerotiorum 1980]
  misc_feature (102)..(506): NCBI GI: 116195308 Blast Desc: CHGG_04252 [Chaetomium globosum CBS 148.51] gi|88180165|gb|EAQ87633.1| CHGG_04252 [Chaetomium globosum CBS 148.51]
  misc_feature (135)..(507): NCBI GI: 189211113 Blast Desc: conserved [Pyrenophora tritici-repentis Pt-1C-BFP] gi|187977980|gb|EDU44606.1| conserved [Pyrenophora tritici-repentis Pt-1C-BFP]
MADSALNRDISIGRIGDGDGDGNSDYGSDFSAGEELLVDQLLQRIAPDSSTLEIVSSESRHARVSPPASAAPENKYLPPPLAPLAIDDGVSTPGSDQHSISPDSIPYPDLSPALSDLEPPARHASQPAPPSPDPEDTRPPIERFRSFPKRPLTVSDMSAGAWCELQHFYTLSLLPGGKKTKTPAMRGGTRVHKKLEDEVHSAVQVTIASKEEAFALRLWNIIQGLRTLRDTGLTRELEVWGLLDGQVINGVIDQVSYQSPNADFEKEVMQASSPTSEQQATLDEYLHGGTRKTMYLTDVKTRGTDRLPAGTQVRPARVQLFLYHRLLSNMASDKLNYSIILERYGLNGAARFSDAFMAQIGGLHDEIFYDADSEIEQASQDSSYTSDFIRYRSISQIVSLLKEELKVTFPAGGASINDLLAVEYRHRDDGRALGNNCFMNDPDTLDGYVKDTLRWWRGEREPQGVQIEETYKCGWCEFAENCQWRKDKEVEHSMKRKATRTLKRESS

SEQ ID NO: 28448 - DNA, 1910 bp, Muscodor strobelii
  misc_feature: SGI EST ID NO. CUFF.67132.1
  misc_feature: Variant of the nucleotide sequence at SEQ ID NO 28446
aagtgcgagttggggttatatcgaatgaagaggcgacttttgatgatacacttgacgcgacgtgaacaacctttcgacacgtataaatcgtgatggacaattgcacattgtcgcaatgctcccatgctcgctcaaagcttcgtcgtccatgattgatgattcatgagtatcccaagaagttgaccaggttccgccgcgcttggcctgcttaatttccatcgcccagcacaagaggcatggccgactcggccttgaaccgcgacatcagcatcggcaggattggtgacggcgacggcgacggcaacagcgactacggatccgacttttctgccggcgaggaactactagtagaccagctgctgcagcgcatcgcgcccgacagctcgaccctggagattgtgtcgtccgagtcgcgccatgcccgggtctcgcctcctgcctcggcagcgcctgagaacaagtatctgcctcctccccttgcgcccctcgcgatcgacgacggtgtttcgacgcccggtagcgaccagcactccatatcgccagattccatcccctacccggattcgactagtaagccccgcgctgtctgatctagaacctccggcccgccatgcctcgcagcctgctcctccctctcctgatccagaggacaccaggcctccaatcgaacgatttcgatccttccccaagcgcccgctgactgtctctgatatgtcggccggcgcatggtgcgagctccaacacttctataccttgagtcttcttccgggcggcaagaagacgaagacccctgctatgcgaggtggcactcgcgtacacaagaagctagaggacgaagtgcattccgctgttcaggtcacgatcgcatccaaagaagaagcttttgccctacggttgtggaacatcatccaagggctacgcactcttcgcgatactggactcacaagagaattggaggtctggggactcctagacggtcaagtcatcaatggcgtcatcgaccaagtcagttatcagagcccaaacgccgacttcgagaaagaagtgatgcaggccagttctcccacttcggagcagcaagcaacgctcgacgagtatctgcatggggggactcgcaagactatgtatttgacggacgtaaagactcgaggaactgacaggctgccggcaggcacacaggttcggcctgctcgtgtccaactgttcctctatcatcgtcttctctcaaacatggcttcggacaagctgaactattctatcatactagagcgctatggccttaatggagctgcgcgcttctccgatgctttcatggcgcaaatcggtggacttcatgatgaaatcttttacgacgccgattctgagatagagcaggcatcacaggattcatcatatacttccgactttatacgctatcggtcaatctcccagattgtttcattgctcaaagaggagctaaaggtgacattccctgctgggggtgcatctatcaatgaccttcttgccgtcgaataccggcatcgagatgatggccgtgctctcggtaataactgctttatgaacgacccggataccctagatggctacgtgaaagacacattaagatggtggcgcggagagcgagaaccgcaaggagtccagatcgaagaaacgtacaaatgtgggtggtgcgagtttgcagagaattgccagtggaggaaagacaaggaagttgaacattcgatgaagaggaaagccacaagaaccttaaagcgagagtcatcttgaagacaacgaggtaacttttctaactaaatccgaatagaccggcggataacgctggtatatatacacacctaaaccaatatattgtgctctagggagcgtaccgtatcatcttgcgtggcaatctggattagccggccacttcg

SEQ ID NO: 28449 - DNA, 1458 bp, Muscodor strobelii
  misc_feature: SGI cDNA ID NO. 569760
  misc_feature: Encodes the peptide sequence at SEQ ID NO 28450
atgtcgactgtttcactgcgagctctactgggagcgtttgttttgccaattctcgttgctgggcatagcattcgacagtccgctacaaccgttaccgttaatcttgggcagacgtaccaaactattgatggattcggctgttcggaagcctttcaaagagctgtccagatgtctaagctcacagctgatcagcagcaatatgtccttgacttactcttcagcacgactgatggggccggtttgtcgattctccggaacgggatagggtcttcgccggatatgagttccgaccatatggtgtctattgcacctaagagccctggatcaccttcaagtccgttacagtacgcctgggacggatctgataataagcagctgtgggttgctcaaggactaatggtaacgacgcaaatggtgggtctctgcggagtgagtggtgcgacttgctcgagtggtgattggcgacaaccctatgcagattaccttgtgcatgtgttctcccttttgatgaaatcgtgcagagcgacaatcccgaggttcacgtacatcaggctaatacggagctggtcaaacaaacagaaatactacctagaggccaatgtcacaattactcatgtcggtttcctaaatgaaccagaacttacaacaagctatgcttccatgcgctcaagcggcacccaggccgctgatttcataaaaatacttggcccaacgctgcaaaaagcaaatctcagctcagtcggcataaattgttgtgacgctgaaggatggagtagtcgatatcaagtgctaaagttaagtagaggctggaatgcttgggcaactctcctcggtggaccaatacatatcgaccatcacgtcacactcttatacgtcgtcccctgggtcgcctatgaacacaaagcaccggttttaaaaagggtctggcagacagaagcggcagatcttaatggagcctggcaaggagcttggtgcagtggcggcgcaggagaaggcgccacgtgggcaaacagtatctacacggcggttgtgaatgccaatgtgtccggctatctgtattggattggtgcccaaacagggacgactaattcgaagctcattcgaattgatggcaacacagtgactgcttccaaacgtctctgggcatttgctcagtggagtcgttcagtccgcccaggagcagtgcgtgttggcgctgctggagcgccttctggcgtaaaaacggcagcatttaagaatgtagacggatccgtcgcagtcttgtttatcaatggcgggacttcggcggccagcgttcagatcaaagtctccggagatacgacgtttaatatgacaggggcggtggcctatttaactgacaatactcacgacttcaacgagactacgatatcagttgttaatggcgccgctaccgcaagtgtccctggtcgaagtatgatgtctgctgttctaaaataa

SEQ ID NO: 28450 - protein, 485 aa, Muscodor strobelii
  misc_feature: SGI Peptide ID NO. 569760
  misc_feature (25)..(485): NCBI GI: 28629056 Blast Desc: AF487263_8 endo-exoxylanase [Leptosphaeria maculans]
  misc_feature (26)..(485): NCBI GI: 116200289 Blast Desc: CHGG_08300 [Chaetomium globosum CBS 148.51] gi|88179579|gb|EAQ87047.1| CHGG_08300 [Chaetomium globosum CBS 148.51]
  misc_feature (26)..(485): NCBI GI: 171679950 Blast Desc: protein product [Podospora anserina] gi|170939601|emb|CAP64828.1| protein product [Podospora anserina]
  misc_feature (26)..(481): NCBI GI: 116207174 Blast Desc: CHGG_02880 [Chaetomium globosum CBS 148.51] gi|88183477|gb|EAQ90945.1| CHGG_02880 [Chaetomium globosum CBS 148.51]
  misc_feature (13)..(484): NCBI GI: 121715874 Blast Desc: cellulose hydrolase, [Aspergillus clavatus NRRL 1] gi|119403703|gb|EAW14120.1| cellulose hydrolase, [Aspergillus clavatus NRRL 1]
  misc_feature (42)..(485): NCBI GI: 169608037 Blast Desc: SNOG_07084 [Phaeosphaeria nodorum SN15] gi|160701544|gb|EAT85735.2| SNOG_07084 [Phaeosphaeria nodorum SN15]
  misc_feature (28)..(485): NCBI GI: 115388667 Blast Desc: conserved [Aspergillus terreus NIH2624] gi|114195923|gb|EAU37623.1| conserved [Aspergillus terreus NIH2624]
  misc_feature (25)..(481): NCBI GI: 171685760 Blast Desc: protein product [Podospora anserina] gi|170942841|emb|CAP68494.1| protein product [Podospora anserina]
  misc_feature (12)..(485): NCBI GI: 242789520 Blast Desc: endo-1,6-beta-D-glucanase BGN16.3 precursor, [Talaromyces stipitatus ATCC 10500] gi|218717964|gb|EED17384.1| endo-1,6-beta-D-glucanase BGN16.3 precursor, [Talaromyces ATCC
  misc_feature (17)..(484): NCBI GI: 212527120 Blast Desc: glucosylceramidase, [Penicillium marneffei ATCC 18224] gi|210073115|gb|EEA27202.1| glucosylceramidase, [Penicillium marneffei ATCC 18224]
MSTVSLRALLGAFVLPILVAGHSIRQSATTVTVNLGQTYQTIDGFGCSEAFQRAVQMSKLTADQQQYVLDLLFSTTDGAGLSILRNGIGSSPDMSSDHMVSIAPKSPGSPSSPLQYAWDGSDNKQLWVAQGLMVTTQMVGLCGVSGATCSSGDWRQPYADYLVHVFSLLMKSCRATIPRFTYIRLIRSWSNKQKYYLEANVTITHVGFLNEPELTTSYASMRSSGTQAADFIKILGPTLQKANLSSVGINCCDAEGWSSRYQVLKLSRGWNAWATLLGGPIHIDHHVTLLYVVPWVAYEHKAPVLKRVWQTEAADLNGAWQGAWCSGGAGEGATWANSIYTAVVNANVSGYLYWIGAQTGTTNSKLIRIDGNTVTASKRLWAFAQWSRSVRPGAVRVGAAGAPSGVKTAAFKNVDGSVAVLFINGGTSAASVQIKVSGDTTFNMTGAVAYLTDNTHDFNETTISVVNGAATASVPGRSMMSAVLK

SEQ ID NO: 28451 - DNA, 157 bp, Muscodor strobelii
  misc_feature: SGI EST ID NO. CUFF.67098.0
  misc_feature: Variant of the nucleotide sequence at SEQ ID NO 28449
tatttaactgacaatactcacgacttcaacgagactacgatatcagttgttaatggcgccgctaccgcaagtgtccctggtcgaagtatgatgtctgctgttctaaaataagctccaacacaagtacctgaggtgtactgcctggtatcggattgat

SEQ ID NO: 28452 - DNA, 1092 bp, Muscodor strobelii
  misc_feature: SGI cDNA ID NO. 569761
  misc_feature: Encodes the peptide sequence at SEQ ID NO 28453
atggacgagaggaatatcagccagcctagtccacaatggttatcagctgggagttattgggattggactcgagctgcgtgcgcacccgactcgttgtcccggaacgtcctaacaccaaagacattcgataagccgcccgccttcccgcctccttcttggaccccgagttactcttatgaggggtttgttcgcaacttcagcgcttctatcgacccatgctcccagccacatcttcgagagatgcatgggacattcgtcgaaccgatcacgatgtcaacttctactgagctgataccgttgttcagcggttctaagcttagcacgaacaacgacatactcatccctggggcaatgtatttgacggacgaccaaagatactcggggggtgacggacatggaccacaatggcacaagaagactgatggcattgtctggcgtggcgtcgcatcaggtgggcgcaataagaaagaaaactggactcatttccagcgtcatcgtctcgttgaaatgttgaatgcgacgactgtctccgcggctgagaaggctaataatcgggcgccgacgtttgagatgccttcagtggagcgatatgacttccctcggaggcgagatggcaagatcggcgcatggctgaaagatttcgctgacgctggcttcatcgagttgttatgttttcctgctgacaactgtgattatgtccgaccgcatttctctgtcgttggaaaaattcccatggaagagcaatacaagcaaaagttcctgccagatgtggacgggaacagctttagtgctcggttccgaggctttatcttaagcacgtccttgcctatcaaatcgactgtctacgcggagtggcacgatgaccgcctcattccttggttgcatttcgtacccatggacaatactttccaagatttatatgcaattcttgactatttcacaggcagtaaaaagggcgacaaggcggcgaacttcatatcagaagaaggcaggatatggggcaatcaagtcttgcggacaggtatgtgtgacttcccccttactcaagttccaccgagcatccaaatattagaagactcactaattttgtag

SEQ ID NO: 28453 - protein, 363 aa, Muscodor strobelii
  misc_feature: SGI Peptide ID NO. 569761
  misc_feature (1)..(339): NCBI GI: 46137519 Blast Desc: FG10275.1 [Gibberella zeae PH-1]
  misc_feature (11)..(339): NCBI GI: 256731665 Blast Desc: [Nectria haematococca mpVI 77-13-4]
  misc_feature (19)..(339): NCBI GI: 189191866 Blast Desc: conserved [Pyrenophora tritici-repentis Pt-1C-BFP] gi|187973878|gb|EDU41377.1| conserved [Pyrenophora tritici-repentis Pt-1C-BFP]
  misc_feature (2)..(339): NCBI GI: 119479795 Blast Desc: NFIA_079710 [Neosartorya fischeri NRRL 181] gi|119408080|gb|EAW18029.1| conserved [Neosartorya fischeri NRRL 181]
  misc_feature (17)..(339): NCBI GI: 70993096 Blast Desc: capsule associated protein [Aspergillus fumigatus Af293] gi|66849030|gb|EAL89358.1| capsule associated protein, [Aspergillus fumigatus Af293]
  misc_feature (2)..(339): NCBI GI: 70998312 Blast Desc: capsular associated protein [Aspergillus fumigatus Af293] gi|66851514|gb|EAL91840.1| capsular associated protein, [Aspergillus fumigatus Af293] gi|159126387|gb|EDP51503.1| A1163]
  misc_feature (20)..(339): NCBI GI: 115401162 Blast Desc: [Aspergillus terreus NIH2624] gi|114190110|gb|EAU31810.1| [Aspergillus terreus NIH2624]
  misc_feature (19)..(339): NCBI GI: 261202210 Blast Desc: capsular associated protein [Ajellomyces dermatitidis SLH14081] gi|239590416|gb|EEQ72997.1| capsular associated protein [Ajellomyces dermatitidis SLH14081]
  misc_feature (19)..(339): NCBI GI: 239612127 Blast Desc: capsular associated protein [Ajellomyces dermatitidis ER-3]
  misc_feature (9)..(339): NCBI GI: 154313380 Blast Desc: BC1G_05387 [Botryotinia fuckeliana B05.10] gi|150849456|gb|EDN24649.1| BC1G_05387 [Botryotinia fuckeliana B05.10]
MDERNISQPSPQWLSAGSYWDWTRAACAPDSLSRNVLTPKTFDKPPAFPPPSWTPSYSYEGFVRNFSASIDPCSQPHLREMHGTFVEPITMSTSTELIPLFSGSKLSTNNDILIPGAMYLTDDQRYSGGDGHGPQWHKKTDGIVWRGVASGGRNKKENWTHFQRHRLVEMLNATTVSAAEKANNRAPTFEMPSVERYDFPRRRDGKIGAWLKDFADAGFIELLCFPADNCDYVRPHFSVVGKIPMEEQYKQKFLPDVDGNSFSARFRGFILSTSLPIKSTVYAEWHDDRLIPWLHFVPMDNTFQDLYAILDYFTGSKKGDKAANFISEEGRIWGNQVLRTGMCDFPLTQVPPSIQILEDSLIL

SEQ ID NO: 28454 - DNA, 2163 bp, Muscodor strobelii
  misc_feature: SGI EST ID NO. CUFF.67147.0
  misc_feature: Variant of the nucleotide sequence at SEQ ID NO 28452
cgccccggcaacaacgatggggatatcgaaataggacaataagaattgcactaacatgatttgtccaaacaggcagatatagcccctttctggggcattgatgccgtagtcacggccgaaagagccgcaacatgggaacattcagtcaatgtgcgtggaggtctcgtgagcactacaggaagcggtatgtatgcgtaagcctcgtgcacttcagtctcttggttacatctctgtaacatccgctaactcttctccagtaagttacgactatcataggtttattccaagactcgggcgcctgcatgacgaatatctagactaacaggagatttccctggccattagaccgaaggccgcgtaccttggttgcaactatggtcgggattgattgccgaagcgagtccttttctacccgatgtcgatatgcctattaattatatggatgagtcaaggttgattgtcccatttgaaaatatatcagcacttgtacacaccgagcaatcgaaacgggggttgttccatatcaatgagtccgtaacagcgtacactggactttctgcgatggacgagaggaatatcagccagcctagtccacaatggttatcagctgggagttattgggattggactcgagctgcgtgcgcacccgactcgttgtcccggaacgtcctaacaccaaagacattcgataagccgcccgccttcccgcctccttcttggaccccgagttactcttatgaggggtttgttcgcaacttcagcgcttctatcgacccatgctcccagccacatcttcgagagatgcatgggacattcgtcgaaccgatcacgatgtcaacttctactgagctgataccgttgttcagcggttctaagcttagcacgaacaacgacatactcatccctggggcaatgtatttgacggacgaccaaagatactcggggggtgacggacatggaccacaatggcacaagaagactgatggcattgtctggcgtggcgtcgcatcaggtgggcgcaataagaaagaaaactggactcatttccagcgtcatcgtctcgttgaaatgttgaatgcgacgactgtctccgcggctgagaaggctaataatcgggcgccgacgtttgagatgccttcagtggagcgatatgacttccctcggaggcgagatggcaagatcggcgcatggctgaaagatttcgctgacgctggcttcatcgagttgttatgttttcctgctgacaactgtgattatgtccgaccgcatttctctgtcgttggaaaaattcccatggaagagcaatacaagcaaaagttcctgccagatgtggacgggaacagctttagtgctcggttccgaggctttatcttaagcacgtccttgcctatcaaatcgactgtctacgcggagtggcacgatgaccgcctcattccttggttgcatttcgtacccatggacaatactttccaagatttatatgcaattcttgactatttcacaggcagtaaaaagggcgacaaggcggcgaacttcatatcagaagaaggcaggatatggggcaatcaagtcttgcggacagaggatatgttactatatatgtggcgattgcttttagaatttgcacgtgtttgcgatgagaaacgagataaacttggatatgtcgacgatttgagaaacagttcttaatatttgtacatatatccttaatctacgttatagtagtgttaggactggtaatgtagtatctggacacagttaactagattttttcttttgcctccagtgctttcgtctttgcctgatacaacttcacaagttgtctaacagcaagatcaagaaggacatcttctgagcctcctggaatccgggcacctggaacctcacgatgtatcactattacatcaatgttagcatataaacgtcacaaataatcgaggttcccgtggtcgcttgtacatactttcgatcagttcaccttggccacttcttgtgtatccattaccgccgaacagaagaacggcagtgtctgcacattctttgaggacaatgccggcgtgcgctttcaataggccggtcatcccgcctagttcgcgatcggcatcatctttagtcatacgtgtcatctggaaagcaaattgctctacccatgcccactgactc

SEQ ID NO: 28455 - DNA, 1326 bp, Muscodor strobelii
  misc_feature: SGI cDNA ID NO. 569762
  misc_feature: Encodes the peptide sequence at SEQ ID NO 28456
atgactgcgccaattcccttttcggacccctcgtggttgatggggatgccctcagcgtactttaccgattctcatcgcaaatggcaacaagctatccgaccctttatacaaaagcatttgattgaccgcgcagtggaatgggagaaagtcgaaacagtgcctgatgaagtctttggtgaattcgcgaaggccaacatgctgcttcctgcgctcccagctccgttacccgtcgattggttgaaacgtctcggaattcacgaacttcccggtggcttgaaggttgaagacttcgattacttacactcccttatctactctgacgagatggctcggtctggtcttgctggaccgtcgggcagtttgactacgggcatggcctttggtgtgcctcccataatcaaattcggcaataagcaactccaggaacgatttctacctgacctattaactggcaagaagagaagttgtattgcgatcactgagccagacgctggtagcgatgttgccaatatcacaaccactgccgttaagagcagctgtggaaagttctatattgtgaacggaactaaaaaatggatcacaaatggcatatggactgattgggcctcgatggctgtacggacgggcgggcctggtccagttggcttatctatgcttgtcgtcccgttgaagggccaaccaggagtcacgatgcgtcgtttgaaggtgggagggcaaatatctgctgggacgacattcatcgagcttgatgatgtcaaagttccggtggagaatctcattggtatagaaggaatgggaatgaaatatgtaatgaccaatttcaaccacgaacgtctgagcatcgctgtcggagttacgcgaacagcacgagttgcactttcgagcgcattcgaatatgtcatgaagcgagaagcctttggcaagccactgatggagcagcccgtagttcgtcacagacttgcgaaagccggtgcactcctgtcaataagggagagtcagtgggcatgggtagagcaatttgctttccagatgacacgtatgactaaagatgatgccgatcgcgaactaggcgggatgaccggcctattgaaagcgcacgccggcattgtcctcaaagaatgtgcagacactgccgttcttctgttcggcggtaatggatacacaagaagtggccaaggtgaactgatcgaaatgatacatcgtgaggttccaggtgcccggattccaggaggctcagaagatgtccttcttgatcttgctgttagacaacttgtgaagttgtatcaggcaaagacgaaagcactggaggcaaaagaaaaaatctag

SEQ ID NO: 28456 - protein, 441 aa, Muscodor strobelii
  misc_feature: SGI Peptide ID NO. 569762
  misc_feature (156)..(209): Pfam Id: PF02770 Pfam Desc: Acyl-CoA dehydrogenase, middle domain
  misc_feature (264)..(425): Pfam Id: PF00441 Pfam Desc: Acyl-CoA dehydrogenase, C-terminal domain
  misc_feature (264)..(322): Pfam Id: PF00441 Pfam Desc: Acyl-CoA dehydrogenase, C-terminal domain
  misc_feature (351)..(425): Pfam Id: PF00441 Pfam Desc: Acyl-CoA dehydrogenase, C-terminal domain
  misc_feature (2)..(436): NCBI GI: 189189650 Blast Desc: short-chain specific acyl-CoA dehydrogenase, mitochondrial precursor [Pyrenophora tritici-repentis Pt-1C-BFP] gi|187972770|gb|EDU40269.1| short-chain specific acyl-CoA
  misc_feature (4)..(441): NCBI GI: 255932253 Blast Desc: Pc12g08530 [Penicillium chrysogenum Wisconsin 54-1255] gi|211582302|emb|CAP80480.1| Pc12g08530 [Penicillium chrysogenum Wisconsin 54-1255]
  misc_feature (4)..(441): NCBI GI: 119473937 Blast Desc: acyl-CoA dehydrogenase, [Neosartorya fischeri NRRL 181] gi|119406997|gb|EAW16947.1| acyl-CoA dehydrogenase, [Neosartorya fischeri NRRL 181]
  misc_feature (4)..(441): NCBI GI: 159128355 Blast Desc: acyl-CoA dehydrogenase, [Aspergillus fumigatus A1163]
  misc_feature (4)..(441): NCBI GI: 238839036 Blast Desc: acyl-CoA dehydrogenase [Microsporum canis CBS 113480]
  misc_feature (3)..(435): NCBI GI: 67902856 Blast Desc: AN8415.2 [Aspergillus nidulans FGSC A4] gi|40747881|gb|EAA67037.1| AN8415.2 [Aspergillus nidulans FGSC A4] gi|259484351|tpe|CBF80495.1| TPA: Acyl-CoA dehydrogenase FGSC
  misc_feature (4)..(436): NCBI GI: 261203511 Blast Desc: acyl-CoA dehydrogenase [Ajellomyces dermatitidis SLH14081] gi|239586754|gb|EEQ69397.1| acyl-CoA dehydrogenase [Ajellomyces dermatitidis SLH14081] gi|239608213|gb|EEQ85200.1|
  misc_feature (3)..(436): NCBI GI: 171680058 Blast Desc: protein product [Podospora anserina] gi|170939655|emb|CAP64882.1| protein product [Podospora anserina]
  misc_feature (4)..(435): NCBI GI: 119184337 Blast Desc: CIMG_06986 [Coccidioides immitis RS]
  misc_feature (4)..(435): NCBI GI: 240109848 Blast Desc: Acyl-CoA dehydrogenase domain containing protein [Coccidioides posadasii C735 delta SOWgp]
  misc_feature (21)..(429): SWISSPROT Homolog: EC 1.3.99.3 Acyl-CoA dehydrogenase
  misc_feature: Useful for introducing or modulating the production of volatile compounds
  misc_feature: Useful for fungicidal and/or biocontrol applications
MTAPIPFSDPSWLMGMPSAYFTDSHRKWQQAIRPFIQKHLIDRAVEWEKVETVPDEVFGEFAKANMLLPALPAPLPVDWLKRLGIHELPGGLKVEDFDYLHSLIYSDEMARSGLAGPSGSLTTGMAFGVPPIIKFGNKQLQERFLPDLLTGKKRSCIAITEPDAGSDVANITTTAVKSSCGKFYIVNGTKKWITNGIWTDWASMAVRTGGPGPVGLSMLVVPLKGQPGVTMRRLKVGGQISAGTTFIELDDVKVPVENLIGIEGMGMKYVMTNFNHERLSIAVGVTRTARVALSSAFEYVMKREAFGKPLMEQPVVRHRLAKAGALLSIRESQWAWVEQFAFQMTRMTKDDADRELGGMTGLLKAHAGIVLKECADTAVLLFGGNGYTRSGQGELIEMIHREVPGARIPGGSEDVLLDLAVRQLVKLYQAKTKALEAKEKI

SEQ ID NO: 28457 - DNA, 1042 bp, Muscodor strobelii
  misc_feature: SGI EST ID NO. CUFF.67152.0
  misc_feature: Variant of the nucleotide sequence at SEQ ID NO 28455
tcgaagcacattttcagaagatcagggcttccaaatcgtattaacaaaaagttcaaagatgactgcgccaattcccttttcggacccctcgtggttgatggggatgccctcagcgtactttaccgattctcatcgcaaatggcaacaagctatccgaccctttatacaaaagcatttgattgaccgcgcagtggaatgggagaaagtcgaaacagtgcctgatgaagtctttggtgaattcgcgaaggccaacatgctgcttcctgcgctcccagctccgttacccgtcgattggttgaaacgtctcggaattcacgaacttcccggtggcttgaaggttgaagacttcgattacttacactcccttatctactctgacgagatggctcggtctggtcttgctggaccgtcgggcagtttgactacgggcatggcctttggtgtgcctcccataatcaaattcggcaataagcaactccaggaacgatttctacctgacctattaactggcaagaagagaagttgtattgcgatcactgagccagacgctggtagcgatgttgccaatatcacaaccactgccgttaagagcagctgtggaaagttctatattgtgaacggaactaaaaaatggatcacaaatggcatatggactgattgggcctcgatggctgtacggacgggcgggcctggtccagttggcttatctatgcttgtcgtcccgttgaagggccaaccaggagtcacgatgcgtcgtttgaaggtgggagggcaaatatctgctgggacgacattcatcgagcttgatgatgtcaaagttccggtggagaatctcattggtatagaaggaatgggaatgaaatatgtaatgaccaatttcaaccacgaacgtctgagcatcgctgtcggagttacgcgaacagcacgagttgcactttcgagcgcattcgaatatgtcatgaagcgagaagcctttggcaagccactgatggagcagcccgtagttcgtcacagacttgcgaaagccggtgcactcctggta

SEQ ID NO: 28458 - DNA, 2520 bp, Muscodor strobelii
  misc_feature: SGI cDNA ID NO. 569763
  misc_feature: Encodes the peptide sequence at SEQ ID NO 28459
atggccttgaatccccagcgtcaactctttgcgcgcagcgagcgcgtaaagggaatcgacttccaccctaccgagccttggatcttgacaacactctatagcggccatgtctatatctggtcctacgagacgcaacagatcgtcaagactttcgaattaaccgatgtccccgttcgagccggccgctttgttgcccgaaagaactggatcgtctgcggctctgatgatttccagctccgcgtgtacaactacaacacctccgagaagatcacctccttcgaagcacaccctgactatatccgagccatcgttgtccacccgactcagccctttgtgttgacagccagtgatgacatgaccatcaagctttgggattgggacagacaatggaaatgtgtgcaggtattcgagggtcacagccactacgtcatgagcttggccatcaaccccaaagacaccaacacttttgcttcggcctgtctggacaggaccgtcaagatctggagccttggttcttcaacacccaactttactctcgaagcccacgagaccaagggtgtgaatcacgtagactactacccccatagtgacaagccatatctgctcacgactagcgacgacaggacggtcaagatatgggactacacaaccaagagtctgatcgccagtctggagggacataccaataatgtttcatttgcctgttaccacccagagctgcccattatcatctcgggatctgaagatggaactatacggatgtggcatgccaacacatatcggtttgagcaatctctcaactacggtctagaacgaacctggtgtgtatcatatcaacgcggaaagcaaggcatcgcagttggcttcgacgatggtgccgtggtcgtcaagctgggtcgcgaagagcctgctgtgtccatggacgcctctggaaagctcatctgggcgcgccataacgagattgtctcgtctataatcaagggaggcgatgcctctatcaaagataatgttcccatcacactccccaccaaggatctgggcacttgcgaagtatacccacagacactccttcattctccgaatggtcgctttgtcgcagtgtgtggagatggcgaatatatcatatatacggcgcttgcctggcgaaacaaagcttttggatctgccctggattttgtttggggctctaaagagaacagcaatgactacgcaatcagagaatcgtccactgtcgtcaaggtctacaagaactttgtcgagaagaccagtggactagacattccgttccaggttgaaggattgaccgggggggtcttgctaggtgtcaaaggacaaggcggcatctccttctacgactgggcaaccggcggtctcgtaaggcggattgaggttgagcctagacaagtatactggtcggaaagtggtgagcttgtcacactggcatgtgaagacactttctatgtcttgcggtattcgcgagagaattttgtcgaagccgtgcaagctggacaggtagatgaggacggagtagaagctgccttcgaagttatcacagacattgcagagagcgtacgaactggcgagtgggtgggcgattcgttcatctacacaaacagcacaaatcgactcaacagcttggttggcgaccaaacctacactatcacccacttcgaccagccaatgtactctcttggcttcattcagcgagactccaggatctacctttctgacaaagatgtcaatgtgacatcatttgctctctcactccctgtattggaataccagactctggtgttgcgtggagacatggaaacagccggcgaattacttccaagcattcctgccgatcaactcaataaaatcgctaggtttctcgagggacagggtcacaaagagctcgcgcttgaagtggctactgatcccgagcacaagttcgacttagctcttgccctgaatcaattagatatcgctctaaacctcgctcgcgaagccgatattgagcacaagtggaaaacagtcggcgacgctgctcttgcggcttgggatgttgcattagccacggaatgctttacgtccgcacgcgacctcggatcgctgctattgatctattcgagcacttcggatcaagagggcctacaggctctgtctacacaggctgaggagtctggcgctcataatgttgcattcacttgcaaatggcttcttggtgacacagcgggttgcatagacattctcaccaagacgaatagactggccgaagctgttctgttttctcaaacatataagccaagcttgactgttgcggctgtcaaagagtggaaagacggcttagagaaggctaagaagggtcgggtggccaaggtcatcggtgtccctacagacgatgaagacttatttcccgaatgggacgaatggttgaagctcgaagaagaagggggtgttgtagatgaggcagacgaggtagagaacgggacagccgaagaagctgaggccgagtcggaggctgaggaggaagagtag

SEQ ID NO: 28459 - protein, 839 aa, Muscodor strobelii
  misc_feature: SGI Peptide ID NO. 569763
  misc_feature (130)..(169): Pfam Id: PF00400 Pfam Desc: WD domain, G-beta repeat
  misc_feature (87)..(125): Pfam Id: PF00400 Pfam Desc: WD domain, G-beta repeat
  misc_feature (218)..(256): Pfam Id: PF00400 Pfam Desc: WD domain, G-beta repeat
  misc_feature (173)..(214): Pfam Id: PF00400 Pfam Desc: WD domain, G-beta repeat
  misc_feature (318)..(778): Pfam Id: PF04053 Pfam Desc: Coatomer WD associated region
  misc_feature (1)..(817): NCBI GI: 46122933 Blast Desc: FG05844.1 [Gibberella zeae PH-1]
  misc_feature (1)..(809): NCBI GI: 256731592 Blast Desc: [Nectria haematococca mpVI 77-13-4]
  misc_feature (1)..(812): NCBI GI: 85107950 Blast Desc: coatomer beta' subunit [Neurospora crassa OR74A] gi|28924084|gb|EAA33241.1| coatomer beta' subunit [Neurospora crassa OR74A]
  misc_feature (1)..(813): NCBI GI: 145615762 Blast Desc: MGG_10504 [Magnaporthe grisea 70-15] gi|145022813|gb|EDK06586.1| conserved [Magnaporthe grisea 70-15]
  misc_feature (1)..(812): NCBI GI: 116194920 Blast Desc: conserved [Chaetomium globosum CBS 148.51] gi|88179971|gb|EAQ87439.1| conserved [Chaetomium globosum CBS 148.51]
  misc_feature (1)..(813): NCBI GI: 261352635 Blast Desc: coatomer subunit beta-1 [Verticillium albo-atrum VaMs.102]
  misc_feature (14)..(815): NCBI GI: 170940305 Blast Desc: protein product [Podospora anserina]
  misc_feature (1)..(836): NCBI GI: 154298588 Blast Desc: conserved [Botryotinia fuckeliana B05.10] gi|150857721|gb|EDN32913.1| conserved [Botryotinia fuckeliana B05.10]
  misc_feature (1)..(838): NCBI GI: 225555695 Blast Desc: coatomer beta subunit [Ajellomyces capsulatus G186AR]
  misc_feature (1)..(838): NCBI GI: 154271097 Blast Desc: coatomer beta' subunit [Ajellomyces capsulatus NAm1] gi|150409625|gb|EDN05069.1| coatomer beta' subunit [Ajellomyces capsulatus NAm1]
MALNPQRQLFARSERVKGIDFHPTEPWILTTLYSGHVYIWSYETQQIVKTFELTDVPVRAGRFVARKNWIVCGSDDFQLRVYNYNTSEKITSFEAHPDYIRAIVVHPTQPFVLTASDDMTIKLWDWDRQWKCVQVFEGHSHYVMSLAINPKDTNTFASACLDRTVKIWSLGSSTPNFTLEAHETKGVNHVDYYPHSDKPYLLTTSDDRTVKIWDYTTKSLIASLEGHTNNVSFACYHPELPIIISGSEDGTIRMWHANTYRFEQSLNYGLERTWCVSYQRGKQGIAVGFDDGAVVVKLGREEPAVSMDASGKLIWARHNEIVSSIIKGGDASIKDNVPITLPTKDLGTCEVYPQTLLHSPNGRFVAVCGDGEYIIYTALAWRNKAFGSALDFVWGSKENSNDYAIRESSTVVKVYKNFVEKTSGLDIPFQVEGLTGGVLLGVKGQGGISFYDWATGGLVRRIEVEPRQVYWSESGELVTLACEDTFYVLRYSRENFVEAVQAGQVDEDGVEAAFEVITDIAESVRTGEWVGDSFIYTNSTNRLNSLVGDQTYTITHFDQPMYSLGFIQRDSRIYLSDKDVNVTSFALSLPVLEYQTLVLRGDMETAGELLPSIPADQLNKIARFLEGQGHKELALEVATDPEHKFDLALALNQLDIALNLAREADIEHKWKTVGDAALAAWDVALATECFTSARDLGSLLLIYSSTSDQEGLQALSTQAEESGAHNVAFTCKWLLGDTAGCIDILTKTNRLAEAVLFSQTYKPSLTVAAVKEWKDGLEKAKKGRVAKVIGVPTDDEDLFPEWDEWLKLEEEGGVVDEADEVENGTAEEAEAESEAEEEE

SEQ ID NO: 28460 - DNA, 3386 bp, Muscodor strobelii
  misc_feature: SGI EST ID NO. CUFF.67186.0
  misc_feature: Variant of the nucleotide sequence at SEQ ID NO 28458
gctgtacctacaagtgggcgataacagaacgataaaagaagtgaccacatctgtacttgggcaaatgtgggcatagggccaatacaggcaaggagggcctcactcatctggcgacctgctaggtacattgagatgaacattgcagtctaccttaacgcttcataacccaacatctctctcacctccccagactcttcgtcatcgctcacgccgctggagatcgggcacttgcgaacaaccaattctctctcgttgccggggtcgaagcaccgacactctctcaccaattagctccgcaacaactcctccgacgaatgcctctcctgcctacctctatgtgacttcgcatgattccaagcaaccagtcctctcccgccgctatctgattcctccgccgaccacctctcgactcgccacccgccccgagccctgggcgccgccgtcagaatgaggctggacgtgaaggtgtgtaccttgtctcaatgcgagctccctcgaaggccctgttgcgcttgtacatggccccctgagcgagacaggccatgctttcgtcctgccagcttgtcttcctcctcgacattcatgaacaggcatgccacggctcgatgtctatgttgccctgcccctcagacggagacctggcgttgagctgctgctgacatggccttgaatccccagcgtcaactctttgcgcgcagcgagcgcgtaaagggaatcgacttccaccctaccgagccttggatcttgacaacactctatagcggccatgtctatatctggtcctacgagacgcaacagatcgtcaagactttcgaattaaccgatgtccccgttcgagccggccgctttgttgcccgaaagaactggatcgtctgcggctctgatgatttccagctccgcgtgtacaactacaacacctccgagaagatcacctccttcgaagcacaccctgactatatccgagccatcgttgtccacccgactcagccctttgtgttgacagccagtgatgacatgaccatcaagctttgggattgggacagacaatggaaatgtgtgcaggtattcgagggtcacagccactacgtcatgagcttggccatcaaccccaaagacaccaacacttttgcttcggcctgtctggacaggaccgtcaagatctggagccttggttcttcaacacccaactttactctcgaagcccacgagaccaagggtgtgaatcacgtagactactacccccatagtgacaagccatatctgctcacgactagcgacgacaggacggtcaagatatgggactacacaaccaagagtctgatcgccagtctggagggacataccaataatgtttcatttgcctgttaccacccagagctgcccattatcatctcgggatctgaagatggaactatacggatgtggcatgccaacacatatcggtttgagcaatctctcaactacggtctagaacgaacctggtgtgtatcatatcaacgcggaaagcaaggcatcgcagttggcttcgacgatggtgccgtggtcgtcaagctgggtcgcgaagagcctgctgtgtccatggacgcctctggaaagctcatctgggcgcgccataacgagattgtctcgtctataatcaagggaggcgatgcctctatcaaagataatgttcccatcacactccccaccaaggatctgggcacttgcgaagtatacccacagacactccttcattctccgaatggtcgctttgtcgcagtgtgtggagatggcgaatatatcatatatacggcgcttgcctggcgaaacaaagcttttggatctgccctggattttgtttggggctctaaagagaacagcaatgactacgcaatcagagaatcgtccactgtcgtcaaggtctacaagaactttgtcgagaagaccagtggactagacattccgttccaggttgaaggattgaccgggggggtcttgctaggtgtcaaaggacaaggcggcatctccttctacgactgggcaaccggcggtctcgtaaggcggattgaggttgagcctagacaagtatactggtcggaaagtggtgagcttgtcacactggcatgtgaagacactttctatgtcttgcggtattcgcgagagaattttgtcgaagccgtgcaagctggacaggtagatgaggacggagtagaagctgccttcgaagttatcacagacattgcagagagcgtacgaactggcgagtgggtgggcgattcgttcatctacacaaacagcacaaatcgactcaacagcttggttggcgaccaaacctacactatcacccacttcgaccagccaatgtactctcttggcttcattcagcgagactccaggatctacctttctgacaaagatgtcaatgtgacatcatttgctctctcactccctgtattggaataccagactctggtgttgcgtggagacatggaaacagccggcgaattacttccaagcattcctgccgatcaactcaataaaatcgctaggtttctcgagggacagggtcacaaagagctcgcgcttgaagtggctactgatcccgagcacaagttcgacttagctcttgccctgaatcaattagatatcgctctaaacctcgctcgcgaagccgatattgagcacaagtggaaaacagtcggcgacgctgctcttgcggcttgggatgttgcattagccacggaatgctttacgtccgcacgcgacctcggatcgctgctattgatctattcgagcacttcggatcaagagggcctacaggctctgtctacacaggctgaggagtctggcgctcataatgttgcattcacttgcaaatggcttcttggtgacacagcgggttgcatagacattctcaccaagacgaatagactggccgaagctgttctgttttctcaaacatataagccaagcttgactgttgcggctgtcaaagagtggaaagacggcttagagaaggctaagaagggtcgggtggccaaggtcatcggtgtccctacagacgatgaagacttatttcccgaatgggacgaatggttgaagctcgaagaagaagggggtgttgtagatgaggcagacgaggtagagaacgggacagccgaagaagctgaggccgagtcggaggctgaggaggaagagtagtactctgttccgagaatgtggcccaaatcgtcgtggggcgccatgacaggttgaaaaaaatatagctgcgtttggaatggttatgctatagataaaacaaatccatttaaaaacttattaaccgtcgagcgttgccaccttgctctcttaattgatatagactggaacacgactggagaggagctcccatgatgtgagagcaatcg

SEQ ID NO: 28461 - DNA, 2520 bp, Muscodor strobelii
  misc_feature: SGI cDNA ID NO. 569764
  misc_feature: Encodes the peptide sequence at SEQ ID NO 28462
atgaggctggacgtgaagcgtcaactctttgcgcgcagcgagcgcgtaaagggaatcgacttccaccctaccgagccttggatcttgacaacactctatagcggccatgtctatatctggtcctacgagacgcaacagatcgtcaagactttcgaattaaccgatgtccccgttcgagccggccgctttgttgcccgaaagaactggatcgtctgcggctctgatgatttccagctccgcgtgtacaactacaacacctccgagaagatcacctccttcgaagcacaccctgactatatccgagccatcgttgtccacccgactcagccctttgtgttgacagccagtgatgacatgaccatcaagctttgggattgggacagacaatggaaatgtgtgcaggtattcgagggtcacagccactacgtcatgagcttggccatcaaccccaaagacaccaacacttttgcttcggcctgtctggacaggaccgtcaagatctggagccttggttcttcaacacccaactttactctcgaagcccacgagaccaagggtgtgaatcacgtagactactacccccatagtgacaagccatatctgctcacgactagcgacgacaggacggtcaagatatgggactacacaaccaagagtctgatcgccagtctggagggacataccaataatgtttcatttgcctgttaccacccagagctgcccattatcatctcgggatctgaagatggaactatacggatgtggcatgccaacacatatcggtttgagcaatctctcaactacggtctagaacgaacctggtgtgtatcatatcaacgcggaaagcaaggcatcgcagttggcttcgacgatggtgccgtggtcgtcaagctgggtcgcgaagagcctgctgtgtccatggacgcctctggaaagctcatctgggcgcgccataacgagattgtctcgtctataatcaagggaggcgatgcctctatcaaagataatgttcccatcacactccccaccaaggatctgggcacttgcgaagtatacccacagacactccttcattctccgaatggtcgctttgtcgcagtgtgtggagatggcgaatatatcatatatacggcgcttgcctggcgaaacaaagcttttggatctgccctggattttgtttggggctctaaagagaacagcaatgactacgcaatcagagaatcgtccactgtcgtcaaggtctacaagaactttgtcgagaagaccagtggactagacattccgttccaggttgaaggattgaccgggggggtcttgctaggtgtcaaaggacaaggcggcatctccttctacgactgggcaaccggcggtctcgtaaggcggattgaggttgagcctagacaagtatactggtcggaaagtggtgagcttgtcacactggcatgtgaagacactttctatgtcttgcggtattcgcgagagaattttgtcgaagccgtgcaagctggacaggtagatgaggacggagtagaagctgccttcgaagttatcacagacattgcagagagcgtacgaactggcgagtgggtgggcgattcgttcatctacacaaacagcacaaatcgactcaacagcttggttggcgaccaaacctacactatcacccacttcgaccagccaatgtactctcttggcttcattcagcgagactccaggatctacctttctgacaaagatgtcaatgtgacatcatttgctctctcactccctgtattggaataccagactctggtgttgcgtggagacatggaaacagccggcgaattacttccaagcattcctgccgatcaactcaataaaatcgctaggtttctcgagggacagggtcacaaagagctcgcgcttgaagtggctactgatcccgagcacaagttcgacttagctcttgccctgaatcaattagatatcgctctaaacctcgctcgcgaagccgatattgagcacaagtggaaaacagtcggcgacgctgctcttgcggcttgggatgttgcattagccacggaatgctttacgtccgcacgcgacctcggatcgctgctattgatctattcgagcacttcggatcaagagggcctacaggctctgtctacacaggctgaggagtctggcgctcataatgttgcattcacttgcaaatggcttcttggtgacacagcgggttgcatagacattctcaccaagacgaatagactggccgaagctgttctgttttctcaaacatataagccaagcttgactgttgcggctgtcaaagagtggaaagacggcttagagaaggctaagaagggtcgggtggccaaggtcatcggtgtccctacagacgatgaagacttatttcccgaatgggacgaatggttgaagctcgaagaagaagggggtgttgtagatgaggcagacgaggtagagaacgggacagccgaagaagctgaggccgagtcggaggctgaggaggaagagtag

SEQ ID NO: 28462 - protein, 839 aa, Muscodor strobelii
  misc_feature: SGI Peptide ID NO. 569764
  misc_feature (130)..(169): Pfam Id: PF00400 Pfam Desc: WD domain, G-beta repeat
  misc_feature (87)..(125): Pfam Id: PF00400 Pfam Desc: WD domain, G-beta repeat
  misc_feature (218)..(256): Pfam Id: PF00400 Pfam Desc: WD domain, G-beta repeat
  misc_feature (173)..(214): Pfam Id: PF00400 Pfam Desc: WD domain, G-beta repeat
  misc_feature (318)..(778): Pfam Id: PF04053 Pfam Desc: Coatomer WD associated region
  misc_feature (3)..(41): Pfam Id: PF00400 Pfam Desc: WD domain, G-beta repeat
  misc_feature (28)..(813): NCBI GI: 226279853 Blast Desc: coatomer subunit beta-1 [Paracoccidioides brasiliensis Pb01]
  misc_feature (1)..(817): NCBI GI: 189194141 Blast Desc: coatomer subunit beta [Pyrenophora tritici-repentis Pt-1C-BFP] gi|187978973|gb|EDU45599.1| coatomer subunit beta [Pyrenophora tritici-repentis Pt-1C-BFP]
  misc_feature (7)..(754): NCBI GI: 258577047 Blast Desc: coatomer beta' subunit [Uncinocarpus reesii 1704] gi|237902971|gb|EEP77372.1| coatomer beta' subunit [Uncinocarpus reesii 1704]
  misc_feature (1)..(801): NCBI GI: 210075575 Blast Desc: YALI0C21802p [Yarrowia lipolytica] gi|199425315|emb|CAG82427.2| YALI0C21802p [Yarrowia lipolytica]
  misc_feature (1)..(810): NCBI GI: 241701693 Blast Desc: vesicle coat complex COPI, beta' subunit, [Ixodes scapularis] gi|215506995|gb|EEC16489.1| vesicle coat complex COPI, beta' subunit, [Ixodes scapularis]
  misc_feature (1)..(810): NCBI GI: 126326043 Blast Desc: : similar to beta prime cop [Monodelphis domestica]
  misc_feature (1)..(810): NCBI GI: 118094989 Blast Desc: : similar to beta prime cop [Gallus gallus]
  misc_feature (1)..(810): NCBI GI: 149408802 Blast Desc: : similar to Chondroitin sulfate GalNAcT-2 [Ornithorhynchus anatinus]
  misc_feature (1)..(810): NCBI GI: 224059348 Blast Desc: : similar to coatomer protein complex, subunit beta 2 (beta prime) [Taeniopygia guttata]
  misc_feature (1)..(810): NCBI GI: 281354607 Blast Desc: PANDA_020240 [Ailuropoda melanoleuca]
MRLDVKRQLFARSERVKGIDFHPTEPWILTTLYSGHVYIWSYETQQIVKTFELTDVPVRAGRFVARKNWIVCGSDDFQLRVYNYNTSEKITSFEAHPDYIRAIVVHPTQPFVLTASDDMTIKLWDWDRQWKCVQVFEGHSHYVMSLAINPKDTNTFASACLDRTVKIWSLGSSTPNFTLEAHETKGVNHVDYYPHSDKPYLLTTSDDRTVKIWDYTTKSLIASLEGHTNNVSFACYHPELPIIISGSEDGTIRMWHANTYRFEQSLNYGLERTWCVSYQRGKQGIAVGFDDGAVVVKLGREEPAVSMDASGKLIWARHNEIVSSIIKGGDASIKDNVPITLPTKDLGTCEVYPQTLLHSPNGRFVAVCGDGEYIIYTALAWRNKAFGSALDFVWGSKENSNDYAIRESSTVVKVYKNFVEKTSGLDIPFQVEGLTGGVLLGVKGQGGISFYDWATGGLVRRIEVEPRQVYWSESGELVTLACEDTFYVLRYSRENFVEAVQAGQVDEDGVEAAFEVITDIAESVRTGEWVGDSFIYTNSTNRLNSLVGDQTYTITHFDQPMYSLGFIQRDSRIYLSDKDVNVTSFALSLPVLEYQTLVLRGDMETAGELLPSIPADQLNKIARFLEGQGHKELALEVATDPEHKFDLALALNQLDIALNLAREADIEHKWKTVGDAALAAWDVALATECFTSARDLGSLLLIYSSTSDQEGLQALSTQAEESGAHNVAFTCKWLLGDTAGCIDILTKTNRLAEAVLFSQTYKPSLTVAAVKEWKDGLEKAKKGRVAKVIGVPTDDEDLFPEWDEWLKLEEEGGVVDEADEVENGTAEEAEAESEAEEEE

SEQ ID NO: 28463 - DNA, 3386 bp, Muscodor strobelii; identical to SEQ ID NO: 28460
  misc_feature: SGI EST ID NO. CUFF.67186.0
  misc_feature: Variant of the nucleotide sequence at SEQ ID NO 28461

SEQ ID NO: 28464 - DNA, 1185 bp, Muscodor strobelii
  misc_feature: SGI cDNA ID NO. 569765
  misc_feature: Encodes the peptide sequence at SEQ ID NO 28465
atgggtaagaaggcagttcacttcggtgccggcaacattggccgtggattcgtcgcctgctttcttcatgaggctggctatgatgttgtcttcgccgatgtcgtcgacaagctggttgatgacctcaacgcccagccctcctacaatgtcatcgagctcggcaccgccggcactaccgtgaagactatcagcaactacgttgctatcaactcgcgcaaggacgaggccaagctggttgacgagcttgccgctgctgatgtcatcacctgctccgtcggtgccagaattctccccttcattgcccctgtcattgccaagggtatcgagaagcgctcgcttgaccagactccggtcggcatcattgcttgcgagaacatgatcaacaacactgccaaccttgctggctacatcaaggaccccaagaacactcctgctgagaagctcgccgatcacgacaagaaggttgtctacgccaactgcgccgtagaccgcattgtccctgacaagaagggcgaggcatctctggatgtccagcttgagcttttctacgagtgggttgttgagagcactcccttcgacaaggctggtgcccccaagcccgagattcccgccatccactgggtcgccaacttggacccctacattgagcgcaagctgtacaccgtcaacacctcgcacgccactgctgcctactacggctacaacaggaacaagcccgctatccacgacgccatggcagatgccaatatcaaggcttcggttgccgccgctatttccgagacagccgccttcattgtgaagaagcatggcgtctctcagtccgagcaggatgcctacaagaacaagatcctcgacagaatcagcaaccccaatctcgatgactccgtcaagcgtgtaggccgtgagccactgcgcaagctgggccgccatgagcgtctcatcggaccggctgcctccctggccgaggagggcatggagaccaaggccttgctggccgccgctgagatggctttccgcttccagaatgtcgagggcgacaaggagagtgcggagctcgccaagatcatggccgagaagagtgccgatgatgtcgtccgcgaggtttgcggcctcgaggccaaccaccctctctaccccaaggtcaaggacgttgtccagaaggtccaggccgacggccgagactga

SEQ ID NO: 28465 - protein, 394 aa, Muscodor strobelii
  misc_feature: SGI Peptide ID NO. 569765
  misc_feature (3)..(126): Pfam Id: PF01232 Pfam Desc: Mannitol dehydrogenase Rossmann domain
  misc_feature (153)..(381): Pfam Id: PF08125 Pfam Desc: Mannitol dehydrogenase C-terminal domain
  misc_feature (3)..(394): NCBI GI: 261352636 Blast Desc: mannitol-1-phosphate 5-dehydrogenase [Verticillium albo-atrum VaMs.102]
  misc_feature (3)..(394): NCBI GI: 229891116 Blast Desc: MTLD_PODAN RecName: Full=Mannitol-1-phosphate 5-dehydrogenase; Short=M1PDH; Short=MPDH; Short=MPD gi|170940306|emb|CAP65533.1| protein product [Podospora anserina]
  misc_feature (3)..(394): NCBI GI: 85107946 Blast Desc: mannitol-1-phosphate 5-dehydrogenase [Neurospora crassa OR74A] gi|74628887|sp|Q7SA44.1|MTLD_NEUCR RecName: Full=Mannitol-1-phosphate 5-dehydrogenase; Short=M1PDH; Short=MPD
  misc_feature (3)..(391): NCBI GI: 116194922 Blast Desc: mannitol-1-phosphate dehydrogenase [Chaetomium globosum CBS 148.51] gi|121784141|sp|Q2H2D7.1|MTLD_CHAGB RecName: Full=Mannitol-1-phosphate 5-dehydrogenase; Short=M1PDH; Short=MPD
  misc_feature (1)..(391): NCBI GI: 255761271 Blast Desc: mannitol-1-phosphate dehydrogenase [Beauveria bassiana]
  misc_feature (3)..(394): NCBI GI: 39969787 Blast Desc: MGG_10503 [Magnaporthe grisea 70-15] gi|74627641|sp|Q5EMU8.1|MTLD_MAGGR RecName: Full=Mannitol-1-phosphate 5-dehydrogenase; Short=M1PDH; Short=MPD
  misc_feature (1)..(391): NCBI GI: 256731190 Blast Desc: NECHADRAFT_101746 [Nectria haematococca mpVI 77-13-4]
  misc_feature (1)..(393): NCBI GI: 121715504 Blast Desc: mannitol-1-phosphate dehydrogenase [Aspergillus clavatus NRRL 1] gi|229891111|sp|A1C6B4.1|MTLD_ASPCL RecName: Full=Mannitol-1-phosphate 5-dehydrogenase; Short=M1PDH; Short=MPD
  misc_feature (1)..(379): NCBI GI: 156032649 Blast Desc: SS1G_14022 [Sclerotinia sclerotiorum 1980] gi|229891118|sp|A7F8U1.1|MTLD_SCLS1 RecName: Full=Mannitol-1-phosphate 5-dehydrogenase; Short=M1PDH; Short=MPD
  misc_feature (1)..(379): NCBI GI: 85792456 Blast Desc: mannitol-1-phosphate dehydrogenase [Botryotinia fuckeliana]
  misc_feature (3)..(394): SWISSPROT Homolog: EC 1.1.1.17 Mannitol-1-phosphate 5-dehydrogenase
MGKKAVHFGAGNIGRGFVACFLHEAGYDVVFADVVDKLVDDLNAQPSYNVIELGTAGTTVKTISNYVAINSRKDEAKLVDELAAADVITCSVGARILPFIAPVIAKGIEKRSLDQTPVGIIACENMINNTANLAGYIKDPKNTPAEKLADHDKKVVYANCAVDRIVPDKKGEASLDVQLELFYEWVVESTPFDKAGAPKPEIPAIHWVANLDPYIERKLYTVNTSHATAAYYGYNRNKPAIHDAMADANIKASVAAAISETAAFIVKKHGVSQSEQDAYKNKILDRISNPNLDDSVKRVGREPLRKLGRHERLIGPAASLAEEGMETKALLAAAEMAFRFQNVEGDKESAELAKIMAEKSADDVVREVCGLEANHPLYPKVKDVVQKVQADGRD

SEQ ID NO: 28466 - DNA, 1883 bp, Muscodor strobelii
  misc_feature: SGI EST ID NO. CUFF.67117.0
  misc_feature: Variant of the nucleotide sequence at SEQ ID NO 28464
cctccatccacccattccacccgtcctgccttctccttgttttcgtgcctgcctctgttctgctatgacggtactacgcattgaatgagcagttgcaataggtaacaggtgcaatctctcttataaagcctgcctcccccgccttcattcctcactcttctcatttcacaccataacttctgaaatcttccagactcaacacaactatttgacacttccactttctccaattgcaagacattgcacttacccactgcgtcctacacgttaactcctgtaggaaagacttcacaggctccagttccaacaccacatcatcactcaatctttcatccaagatgggtaagaaggcagttcacttcggtgccggcaacattggccgtggattcgtcgcctgctttcttcatgaggctggctatgatgttgtcttcgccgatgtcgtcgacaagctggttgatgacctcaacgcccagccctcctacaatgtcatcgagctcggcaccgccggcactaccgtgaagactatcagcaactacgttgctatcaactcgcgcaaggacgaggccaagctggttgacgagcttgccgctgctgatgtcatcacctgctccgtcggtgccagaattctccccttcattgcccctgtcattgccaagggtatcgagaagcgctcgcttgaccagactccggtcggcatcattgcttgcgagaacatgatcaacaacactgccaaccttgctggctacatcaaggaccccaagaacactcctgctgagaagctcgccgatcacgacaagaaggttgtctacgccaactgcgccgtagaccgcattgtccctgacaagaagggcgaggcatctctggatgtccagcttgagcttttctacgagtgggttgttgagagcactcccttcgacaaggctggtgcccccaagcccgagattcccgccatccactgggtcgccaacttggacccctacattgagcgcaagctgtacaccgtcaacacctcgcacgccactgctgcctactacggctacaacaggaacaagcccgctatccacgacgccatggcagatgccaatatcaaggcttcggttgccgccgctatttccgagacagccgccttcattgtgaagaagcatggcgtctctcagtccgagcaggatgcctacaagaacaagatcctcgacagaatcagcaaccccaatctcgatgactccgtcaagcgtgtaggccgtgagccactgcgcaagctgggccgccatgagcgtctcatcggaccggctgcctccctggccgaggagggcatggagaccaaggccttgctggccgccgctgagatggctttccgcttccagaatgtcgagggcgacaaggagagtgcggagctcgccaagatcatggccgagaagagtgccgatgatgtcgtccgcgaggtttgcggcctcgaggccaaccaccctctctaccccaaggtcaaggacgttgtccagaaggtccaggccgacggccgagactgactgtctcgtagccagtcagggtctgcatctgttttccacacgaagttatgaaaatgaagcgagcgttaagggatttgcagggaataaggcgttataaatgataccggaaaggcaatgggcgtcacggaatcatatagtctcatgagagcaggaactgactttgggtcaacgcaactgtgcaaattaaaaatcacaaaggaagccatgaccattcccaccagactagacactagaggtgatagatcagaataaatggtactaccgaacaacacaacgaatgatattctgataatgaccagtcagtatagtaggattgatttctacacagtttataacaaataaatgtaacttagatctgta

SEQ ID NO: 28467 - DNA, 621 bp, Muscodor strobelii
  misc_feature: SGI cDNA ID NO. 569766
  misc_feature: Reduced expression when VOC is produced
  misc_feature: Encodes the peptide sequence at SEQ ID NO 28468
atgtcctctttctccaacacagacactggcagcaagcccgccgatccgtatagcgccacgaataaggataccaatgtgagcgtacaggacaaggtcgatgctctcgatagattcgtcagtgccaacaaatttggcatgatgacgacccgggatactagctcaggaagactcgtatcacgttgcatggctgttgctgcaaaggaatctggcagtaccgattatctcttcttcaccaacaccgaatcgcacaagaccgacgaattgaagtcagatccccatgtcaacctggcattcctcgatagctctggacagtgggcttccatctcgggtacaagcacaatcgagacggatagaagcgtggtaaagaaatactacaaccctacgttgaaggcttgggtgggcgatcttggagatggtaaacacgacggttctgaaaacgaccctagaatcggtgtgattcgtgtaaagatggagacagccacatattcgattaccgacaagacgattctgggtcgtgctgctgaagtaataaaggggactgtaacaggcgagacggcagatgtcaacaagattcgtgagatttccgaggctgaagttcagacctggagagctactcactga

SEQ ID NO: 28468 - protein, 206 aa, Muscodor strobelii
  misc_feature: SGI Peptide ID NO. 569766
  misc_feature (35)..(119): Pfam Id: PF01243 Pfam Desc: Pyridoxamine 5'-phosphate oxidase
  misc_feature (2)..(203): NCBI GI: 39969775 Blast Desc: MGG_10497 [Magnaporthe grisea 70-15] gi|145012075|gb|EDJ96731.1| MGG_10497 [Magnaporthe grisea 70-15]
  misc_feature (4)..(206): NCBI GI: 164424402 Blast Desc: protein bli-3 [Neurospora crassa OR74A] gi|157070497|gb|EAA32885.2| protein bli-3 [Neurospora crassa OR74A]
  misc_feature (4)..(206): NCBI GI: 2498183 Blast Desc: BLI3_NEUCR RecName: Full=Protein bli-3 gi|602075|emb|CAA57098.1| bli-3 [Neurospora crassa] gi|1092170|prf||2023159A bli-3 gene
  misc_feature (3)..(206): NCBI GI: 256727621 Blast Desc: [Nectria haematococca mpVI 77-13-4]
  misc_feature (2)..(206): NCBI GI: 170940198 Blast Desc: protein product [Podospora anserina]
  misc_feature (3)..(205): NCBI GI: 46136223 Blast Desc: FG09627.1 [Gibberella zeae PH-1]
  misc_feature (6)..(206): NCBI GI: 116195566 Blast Desc: CHGG_04381 [Chaetomium globosum CBS 148.51] gi|88180294|gb|EAQ87762.1| CHGG_04381 [Chaetomium globosum CBS 148.51]
  misc_feature (4)..(183): NCBI GI: 261352560 Blast Desc: bli-3 [Verticillium albo-atrum VaMs.102]
  misc_feature (1)..(204): NCBI GI: 189211251 Blast Desc: bli-3 protein [Pyrenophora tritici-repentis Pt-1C-BFP] gi|187978049|gb|EDU44675.1| bli-3 protein [Pyrenophora tritici-repentis Pt-1C-BFP]
  misc_feature (1)..(206): NCBI GI: 145240385 Blast Desc: An08g07240 [Aspergillus niger] gi|134077356|emb|CAK39971.1| protein product [Aspergillus niger]
  misc_feature: Useful for introducing or modulating the production of volatile compounds
MSSFSNTDTGSKPADPYSATNKDTNVSVQDKVDALDRFVSANKFGMMTTRDTSSGRLVSRCMAVAAKESGSTDYLFFTNTESHKTDELKSDPHVNLAFLDSSGQWASISGTSTIETDRSVVKKYYNPTLKAWVGDLGDGKHDGSENDPRIGVIRVKMETATYSITDKTILGRAAEVIKGTVTGETADVNKIREISEAEVQTWRATH

SEQ ID NO: 28469 - DNA, 1285 bp, Muscodor strobelii
  misc_feature: SGI EST ID NO. CUFF.67215.1
  misc_feature: Variant of the nucleotide sequence at SEQ ID NO 28467
gagctagagcacctctgtagcctatggtttgaatctggatattctaccccgtagacgaaactattcaaactcacagttccaaaccaattactgcataatcaacaacttctttcagaactccgtattcaccatgtcctctttctccaacacagacactggcagcaagcccgccgatccgtatagcgccacgaataaggataccaatgtgagcgtacaggacaaggtcgatgctctcgatagattcgtcagtgccaacaaatttggcatgatgacgacccgggatactagctcaggaagactcgtatcacgttgcatggctgttgctgcaaaggaatctggcagtaccgattatctcttcttcaccaacaccgaatcgcacaagaccgacgaattgaagtcagatccccatgtcaacctggcattcctcgatagctctggacagtgggcttccatctcgggtacaagcacaatcgagacggatagaagcgtggtaaagaaatactacaaccctacgttgaaggcttgggtgggcgatcttggagatggtaaacacgacggttctgaaaacgaccctagaatcggtgtgattcgtgtaaagatggagacagccacatattcgattaccgacaagacgattctgggtcgtgctgctgaagtaataaaggggactgtaacaggcgagacggcagatgtcaacaagattcgtgagatttccgaggctgaagttcagacctggagagctactcactgagaatcaacctctatgctttgacttagcgtgtaatggggcttgaaaattgctagcaggttaaaacattactttaataatctgatctctaatgcattttactatttgccatattgtgctagccattccttatcccaagtgtctttatcaacggcgaattcacgagcatagtccctttcaagttcgtgtgctcgtttacctaatagaaccaagctatgaaggggtggtccaagtaaatcatcggcctcgcagagctgtttcaatgttcccgcaacatacttctcgttcttcccaccgacgcgagcagctcctatggccaggctgtctggtccgtaaacacccagcttcttttcctcctcaatctcaagcatttgttgggcacactggccaacggtcatatacctcggtggttcgtagattaatcttccacgcgccatgttttctaaactctgttctttaactttgatatcaaggaggacaagggtatgaagcccaatgtcgcgattctctttgatacggtcgtaaaatgatgctggg

SEQ ID NO: 28470 - DNA, 858 bp, Muscodor strobelii
  misc_feature: SGI cDNA ID NO. 569767
  misc_feature: Encodes the peptide sequence at SEQ ID NO 28471
atgttgtatctcgtgggattgggcctgtatgacgagactgatatcactgttcgcggtcttgagcttgtcaagaaagcatcacgtgtctaccttgaagcttatacgagtattctactggtagatcaagccgtcctggaggcttattatggacggcctattgtgattgcggatcgtgagatggtggagtcgaatagcgatgagatcctaagagatgctcaaagtgaagacgtttgttttctcgtcgtcggcgatccgttcggtgctaccacacacaccgatctggttattcgtgcccgagaactgggaattcctttccagactgtgccgaatgcatcaattatgtcagcaatcggcggctgtggtcttcagctctacaacttcggccaaacggtatccatggtcttctttttagataattggcgcccagcatcattttacgaccgtatcaaagagaatcgcgacattgggcttcatacccttgtcctccttgatatcaaagttaaagaacagagtttagaaaacatggcgcgtggaagattaatctacgaaccaccgaggtatatgaccgttggccagtgtgcccaacaaatgcttgagattgaggaggaaaagaagctgggtgtttacggaccagacagcctggccataggagctgctcgcgtcggtgggaagaacgagaagtatgttgcgggaacattgaaacagctctgcgaggccgatgatttacttggaccaccccttcatagcttggttctattaggtaaacgagcacacgaacttgaaagggactatgctcgtgaattcgccgttgataaagacacttgggataaggaatggctagcacaatatggcaaatag

SEQ ID NO: 28471 - protein, 285 aa, Muscodor strobelii
  misc_feature: SGI Peptide ID NO. 569767
  misc_feature (1)..(205): Pfam Id: PF00590 Pfam Desc: Tetrapyrrole (Corrin/Porphyrin) Methylases
  misc_feature (1)..(188): Pfam Id: PF00590 Pfam Desc: Tetrapyrrole (Corrin/Porphyrin) Methylases
  misc_feature (1)..(285): NCBI GI: 46136225 Blast Desc: FG09628.1 [Gibberella zeae PH-1] gi|84028931|sp|Q4HZI0.1|DPH5_GIBZE RecName: Full=Diphthine synthase; AltName: Full=Diphthamide biosynthesis
  misc_feature (1)..(283): NCBI GI: 85106228 Blast Desc: diphthine synthase [Neurospora crassa OR74A] gi|74662671|sp|Q7S949.1|DPH5_NEUCR RecName: Full=Diphthine synthase; AltName: Full=Diphthamide biosynthesis diphthine crassa
  misc_feature (1)..(285): NCBI GI: 256727043 Blast Desc: [Nectria haematococca mpVI 77-13-4]
  misc_feature (1)..(283): NCBI GI: 170940199 Blast Desc: protein product [Podospora anserina]
  misc_feature (1)..(283): NCBI GI: 156045279 Blast Desc: SS1G_09828 [Sclerotinia sclerotiorum 1980] gi|154694223|gb|EDN93961.1| SS1G_09828 [Sclerotinia sclerotiorum 1980]
  misc_feature (1)..(283): NCBI GI: 39969773 Blast Desc: MGG_10496 [Magnaporthe grisea 70-15] gi|145012076|gb|EDJ96732.1| MGG_10496 [Magnaporthe grisea 70-15]
  misc_feature (1)..(284): NCBI GI: 261200901 Blast Desc: diphthine synthase [Ajellomyces dermatitidis SLH14081] gi|239593923|gb|EEQ76504.1| diphthine synthase [Ajellomyces dermatitidis SLH14081] gi|239607202|gb|EEQ84189.1| diphthine
  misc_feature (1)..(284): NCBI GI: 242778576 Blast Desc: diphthine synthase, [Talaromyces stipitatus ATCC 10500] gi|218722886|gb|EED22304.1| diphthine synthase, [Talaromyces stipitatus ATCC 10500]
  misc_feature (1)..(285): NCBI GI: 212533645 Blast Desc: diphthine synthase, [Penicillium marneffei ATCC 18224] gi|210072343|gb|EEA26432.1| diphthine synthase, [Penicillium marneffei ATCC 18224]
  misc_feature (1)..(284): NCBI GI: 226289038 Blast Desc: diphthine synthase [Paracoccidioides brasiliensis Pb18]
  misc_feature (1)..(285): SWISSPROT Homolog: EC 2.1.1.98 Diphthine synthase
MLYLVGLGLYDETDITVRGLELVKKASRVYLEAYTSILLVDQAVLEAYYGRPIVIADREMVESNSDEILRDAQSEDVCFLVVGDPFGATTHTDLVIRARELGIPFQTVPNASIMSAIGGCGLQLYNFGQTVSMVFFLDNWRPASFYDRIKENRDIGLHTLVLLDIKVKEQSLENMARGRLIYEPPRYMTVGQCAQQMLEIEEEKKLGVYGPDSLAIGAARVGGKNEKYVAGTLKQLCEADDLLGPPLHSLVLLGKRAHELERDYAREFAVDKDTWDKEWLAQYGK

SEQ ID NO: 28472 - DNA, 711 bp, Muscodor strobelii
  misc_feature: SGI cDNA ID NO. 569768
  misc_feature: Encodes the peptide sequence at SEQ ID NO 28473
atgtcgggcaaaggttctgcatacggcacgccggcgacggacacctctttccggcgcaattacgaccttaatgaatatgctgagaaagccaaggtgcgcgatagcgcagaacgagaggaagcaaaggctcgatatgaggcaaaattggctgggaagaaatactacaaaccgatgacgggagacgagacaagcacaagagcccgacgtgatatactggatctagaggccaatgtcggcaagacgatgctggtcccagctggggctggagtgggaaagcgaggacgtggcgccggtttctactgtagcgcgtgtgacttgacttttaaggacaacatccaatgggttgagcatatcaacagtatgcagcatttgcgcaacattggggagacaggagaggtccaaaaagctaccgctgaagacgttcaccgtcgcatcgacgaggtgtgggaccgccttcaagcacaaaagaaagatgctgcaacgacacttaaggaacgactcgagattcgtgaagaggaggatgcgaaggagaaagaagcacgtcgggtgaagcggcaggaggatcttgctcgcaagagaaacaaccgcgagaacgctgaaaagatcaagaccgaatatggcgacgacgtccgggtcgaaggcgaacatgacgaagacgacatgatggctgctatgggaattactggttttggaacatcgaagaagaaatga

SEQ ID NO: 28473 - protein, 236 aa, Muscodor strobelii
  misc_feature: SGI Peptide ID NO. 569768
  misc_feature (1)..(235): NCBI GI: 154291518 Blast Desc: BC1G_15004 [Botryotinia fuckeliana B05.10] gi|150846720|gb|EDN21913.1| BC1G_15004 [Botryotinia fuckeliana B05.10]
  misc_feature (6)..(235): NCBI GI: 116195570 Blast Desc: CHGG_04383 [Chaetomium globosum CBS 148.51] gi|88180296|gb|EAQ87764.1| CHGG_04383 [Chaetomium globosum CBS 148.51]
  misc_feature (1)..(235): NCBI GI: 156045281 Blast Desc: SS1G_09829 [Sclerotinia sclerotiorum 1980] gi|154694224|gb|EDN93962.1| SS1G_09829 [Sclerotinia sclerotiorum 1980]
  misc_feature (1)..(236): NCBI GI: 145603962 Blast Desc: MGG_14070 [Magnaporthe grisea 70-15] gi|145012077|gb|EDJ96733.1| MGG_14070 [Magnaporthe grisea 70-15]
  misc_feature (1)..(235): NCBI GI: 85106223 Blast Desc: NCU07265 [Neurospora crassa OR74A] gi|28923715|gb|EAA32883.1| conserved [Neurospora crassa OR74A]
  misc_feature (2)..(235): NCBI GI: 256727620 Blast Desc: NECHADRAFT_33630 [Nectria haematococca mpVI 77-13-4]
  misc_feature (4)..(235): NCBI GI: 261352563 Blast Desc: conserved [Verticillium albo-atrum VaMs.102]
  misc_feature (1)..(236): NCBI GI: 170940200 Blast Desc: protein product [Podospora anserina]
  misc_feature (5)..(235): NCBI GI: 46136227 Blast Desc: FG09629.1 [Gibberella zeae PH-1]
  misc_feature (1)..(145): NCBI GI: 212533633 Blast Desc: C2H2 finger domain protein, [Penicillium marneffei ATCC 18224] gi|210072337|gb|EEA26426.1| C2H2 finger domain protein, [Penicillium marneffei ATCC 18224]
MSGKGSAYGTPATDTSFRRNYDLNEYAEKAKVRDSAEREEAKARYEAKLAGKKYYKPMTGDETSTRARRDILDLEANVGKTMLVPAGAGVGKRGRGAGFYCSACDLTFKDNIQWVEHINSMQHLRNIGETGEVQKATAEDVHRRIDEVWDRLQAQKKDAATTLKERLEIREEEDAKEKEARRVKRQEDLARKRNNRENAEKIKTEYGDDVRVEGEHDEDDMMAAMGITGFGTSKKK

SEQ ID NO: 28474 - DNA, 4005 bp, Muscodor strobelii
  misc_feature: SGI EST ID NO. CUFF.67159.0
  misc_feature: Variant of the nucleotide sequence at SEQ ID NO 28472
ccgtagtaaaaattttatttctgaacagttgaccttacagtcaaccttaataaggcactcttaactttttatgggccaagctcaagttgaagctctaacatccgacggccgactacctttcacggcctcattgtgcacaacctcacactcattctacactctcaactagctgccactgataagtgaatagtctctgtcctgggacgagggacaaatacaagatgtcgggcaaaggttctgcatacggcacgccggcgacggacacctctttccggcgcaattacgaccttaatgaatatgctgagaaagccaaggtgcgcgatagcgcagaacgagaggaagcaaaggctcgatatgaggcaaaattggctgggaagaaatactacaaaccgatgacgggagacgagacaagcacaagagcccgacgtgatatactggatctagaggccaatgtcggcaagacgatgctggtcccagctggggctggagtgggaaagcgaggacgtggcgccggtttctactgtagcgcgtgtgacttgacttttaaggacaacatccaatgggttgagcatatcaacagtatgcagcatttgcgcaacattggggagacaggagaggtccaaaaagctaccgctgaagacgttcaccgtcgcatcgacgaggtgtgggaccgccttcaagcacaaaagaaagatgctgcaacgacacttaaggaacgactcgagattcgtgaagaggaggatgcgaaggagaaagaagcacgtcgggtgaagcggcaggaggatcttgctcgcaagagaaacaaccgcgagaacgctgaaaagatcaagaccgaatatggcgacgacgtccgggtcgaaggcgaacatgacgaagacgacatgatggctgctatgggaattactggttttggaacatcgaagaagaaatgaggatgactactcactcgatttgccggcctaagttgaacaatcaccatttgcttatgcaaacttgtcagaatgaagcgctcacagctgtttcaaaatcccgacttgatgtccacttgactcaatgagaaaatcatgggaaacgatacagccctcgaagcctacaccttggtgtgcaaagaggcgggctagggaccataagctttgtggtcagcatcgatctgtgtatcgacgatgacggctcaatgatgatggtcaacacggccgtcgtgatcagagattcttggggctacctaagtgtagctgcacatcatggcattcagcataaatgcggacgggctgaatttccaagagacccgacttctccaccataaaggaggccggtgatgccatccagctctgcttacggatacagtgaaaaacatcatgccagtcaagaggtctagccaaaccccttgatattgcatcctcgccaactagtcttgtctctctgcattcaagagccagatgacgattccatgaatttggctgatgcagttagctcgtaaacgaccttggaaacagaagtgcgcgaggcaatctagtaaattggcgatataacaatcttcaacatttagtaccatgggttgatgtcccaggatgtatctcggggagtttctttcatggaaggagacatgtgtaagattaaagaaaacaatgaagagaagagttgattagttctctcatttcacacaaaagcaaaaggactccgcgaaatacaagtagagcagaacgaaatggttgtgatgtccattgtcatccattagcgtatgttaattgtgaaccctgcaccatgcatgtaagctccattcccccaccagattgctgagaaacgacctatggaggggtcatcttgcagcttctatcatgaaccaagtatctccccaggcttctccaggcattaatactaggagtcaggatgccctttcatcacgccagcaggttcgtcccggattgctgacaacttgaagtcaagttgactgtgccgggctccatcggctagagcacccgttttcccgtctatctcctcgacaacctgcccatctagtctgccacagcatccaacaacgctcttccgagcatagctgcttactggtttgccgaagataccacggtcttctgagcaagctctcaagttcttgaacaccctgaatatttcagtttccgcgcattcgatgcaatggcggcctcggcgcaaagtgcaccggctgcgtcgctgctaagccggcagctgaaggagatcaacagtgacaatgtcctctcaggcatttcggcaggcttactcaatgataacaatgtctttgaatgggaggtatctttgatgctgaacgatgactgcaaatattatggtggagctatattccgcgcgcacctgatctttccgcccgaatatccgcatctgccaccaaagatgatatttcagaaccccatccctttccatccgaacatctaccccacgggcgagctctgcatatccatcctacatccacctggcaacgaccaatacggctacgagaacgcttccgagcgctggtctcccgtacagacacccgagaccattctgctgagtgtcatcagtttgttcagcgagcccaacgaggacagccctgcaaatttagatgctgccaaattactacgcatcgagagggaaggaggacctaaggacttcaggaagagggtacggaagtgtgtgcgtgagagtcttggggatgattgaggtggaggtcgtaatttcggggtatggatgacagtatatggtggttcattttcagcgttctcaagcgtactgcatagggcggtagtcaaatctgctcacattgcgaagcataggtcaggttaagtagatttggcggaacagtaaatcctttccataaacttttttgttttcacactatctggcgttggatctcggagttcccatagccttaggcacagcgattttgcgatctgaatgtctttctgctcagatgctccatgtcctagcatcatcgcagacttgaagcttcattcatctgcctcgacccaagtgtctgtcatctgcccccggtgagtcattctctgaactcgcagatcaggattcggccgcgactctgttactcagtatacctcgtagaaggcgtcaatccctgtgattcatcccttgaacccgaaaattggagccaggacacgatcccattcctcatcccagcgcaactggctctcttcctctgcgccctcacgtagactggcaagctcttgcttaccagagtcacctaggagtcgtagaagtctactagagagctcgtcggcggtctcaaatccatatccatttttaccttccaagacgagttcgtcaaagctctcgtaccctgaatatgcgaccactggcagtccagagccaaacatgtcgacaaccttcataggtaggtcaactcctgagctcgacatgtggaggcaaacgccaagatcggcacatgcgagcaagcgggcatagtcctccattgtaaaccaggcggtcatgatacgaatgttaggtagcttgccagctttaactagctcctggatccgacgttcgtagtactccttctgcgggcccttgcctgtgatgacagctataattggtaccgcggtactagctttggcataggtaactagtgcgtccagaagcagcgagaagtcttcgtccggcgtccacgacgtgctgctcacgatcagcctagtcgtgctggccaagatcgacgaagacaagcttttcaaccaaggcacactgtccaggaagtcttttcgctctgaaatgaaattcagaggttgaaagattgcggcaggacgatcgtgaagggtgtagattggtgaagtgacatcgtacggagcgcgctgtaactctctcttcattgcatgggtcacagtgatgttggcagtcggagcaatctgaccacaaaggcattcatagagcttagaaatcttgacgaatggatgagtgtgacctttggtgccagctaggatagtccagccgtagttatgccagtcgaccataagcttcgtgttacgtatgagagag

SEQ ID NO: 28475 - DNA, 537 bp, Muscodor strobelii
  misc_feature: SGI cDNA ID NO. 569769
  misc_feature: Encodes the peptide sequence at SEQ ID NO 28476
atggcggcctcggcgcaaagtgcaccggctgcgtcgctgctaagccggcagctgaaggagatcaacagtgacaatgtcctctcaggcatttcggcaggcttactcaatgataacaatgtctttgaatgggaggtatctttgatgctgaacgatgactgcaaatattatggtggagctatattccgcgcgcacctgatctttccgcccgaatatccgcatctgccaccaaagatgatatttcagaaccccatccctttccatccgaacatctaccccacgggcgagctctgcatatccatcctacatccacctggcaacgaccaatacggctacgagaacgcttccgagcgctggtctcccgtacagacacccgagaccattctgctgagtgtcatcagtttgttcagcgagcccaacgaggacagccctgcaaatttagatgctgccaaattactacgcatcgagagggaaggaggacctaaggacttcaggaagagggtacggaagtgtgtgcgtgagagtcttggggatgattga

SEQ ID NO: 28476 - protein, 178 aa, Muscodor strobelii
  misc_feature: SGI Peptide ID NO. 569769
  misc_feature (13)..(171): Pfam Id: PF00179 Pfam Desc: Ubiquitin-conjugating enzyme
  misc_feature (13)..(178): NCBI GI: 116195576 Blast Desc: ubiquitin-conjugating enzyme E2 [Chaetomium globosum CBS 148.51] gi|88180299|gb|EAQ87767.1| ubiquitin-conjugating enzyme E2 [Chaetomium globosum CBS 148.51]
  misc_feature (15)..(178): NCBI GI: 256727619 Blast Desc: [Nectria haematococca mpVI 77-13-4]
  misc_feature (13)..(178): NCBI GI: 46136229 Blast Desc: FG09630.1 [Gibberella zeae PH-1]
  misc_feature (13)..(178): NCBI GI: 170940201 Blast Desc: protein product [Podospora anserina]
  misc_feature (5)..(178): NCBI GI: 85106220 Blast Desc: ubiquitin-conjugating enzyme E2 15 [Neurospora crassa OR74A] gi|28923714|gb|EAA32882.1| ubiquitin-conjugating enzyme E2 15 [Neurospora crassa OR74A]
  misc_feature (1)..(178): NCBI GI: 212526092 Blast Desc: ubiquitin conjugating enzyme, [Penicillium marneffei ATCC 18224] gi|210072601|gb|EEA26688.1| ubiquitin conjugating enzyme, [Penicillium marneffei ATCC 18224]
  misc_feature (1)..(178): NCBI GI: 242779995 Blast Desc: ubiquitin conjugating enzyme, [Talaromyces stipitatus ATCC 10500] gi|218719649|gb|EED19068.1| ubiquitin conjugating enzyme, [Talaromyces stipitatus ATCC 10500]
  misc_feature (1)..(178): NCBI GI: 225555573 Blast Desc: ubiquitin-conjugating enzyme [Ajellomyces capsulatus G186AR]
  misc_feature (1)..(178): NCBI GI: 226285602 Blast Desc: ubiquitin-conjugating enzyme [Paracoccidioides brasiliensis Pb01] gi|226294876|gb|EEH50296.1| ubiquitin conjugating enzyme [Paracoccidioides brasiliensis Pb18]
  misc_feature (1)..(178): NCBI GI: 154270909 Blast Desc: ubiquitin conjugating enzyme [Ajellomyces capsulatus NAm1] gi|150409531|gb|EDN04975.1| ubiquitin conjugating enzyme [Ajellomyces capsulatus NAm1] gi|240280894|gb|EER44398.1| enzyme
  misc_feature (16)..(174): SWISSPROT Homolog: EC 6.3.2.19 Ubiquitin--protein ligase
MAASAQSAPAASLLSRQLKEINSDNVLSGISAGLLNDNNVFEWEVSLMLNDDCKYYGGAIFRAHLIFPPEYPHLPPKMIFQNPIPFHPNIYPTGELCISILHPPGNDQYGYENASERWSPVQTPETILLSVISLFSEPNEDSPANLDAAKLLRIEREGGPKDFRKRVRKCVRESLGDD

SEQ ID NO: 28477 - DNA, 4005 bp, Muscodor strobelii; identical to SEQ ID NO: 28474
  misc_feature: SGI EST ID NO. CUFF.67159.0
  misc_feature: Variant of the nucleotide sequence at SEQ ID NO 28475

SEQ ID NO: 28478 - DNA, 1371 bp, Muscodor strobelii
  misc_feature: SGI cDNA ID NO. 569770
  misc_feature: Encodes the peptide sequence at SEQ ID NO 28479
atgacgctcctcgccataattctgtggctcaccgtcgccggtcttgcgctggcctcggttgccatgctgacgatgttgccttctcgctatgtttcgccgcctaccgatgttcgcgcctcaacatcggtccagattcttgtcctgggcgatattggtcgaagcccgcgaatgcagtatcatgcactgagcattgcaaaacacggcggccaagttcacctgattggctacctcgagtctttgcctcaccctgatcttattgacaatcctcgtgtaacaattcatgcactgccagaagccccaaaggctctgaaatcgggggatatcccttttgttgtcgctggtcctctcaaagtgctttggcagatcgtcacactcattcgtgctcttggatacaccacacctgcctcaacatggcttcttgttcagaatcctcctgcgattcccacactcgcagtagctttcattatctctctcatacgtaacacgaagcttatggtcgactggcataactacggctggactatcctagctggcaccaaaggtcacactcatccattcgtcaagatttctaagctctatgaatgcctttgtggtcagattgctccgactgccaacatcactgtgacccatgcaatgaagagagagttacagcgcgctccgtacgatgtcacttcaccaatctacacccttcacgatcgtcctgccgcaatctttcaacctctgaatttcatttcagagcgaaaagacttcctggacagtgtgccttggttgaaaagcttgtcttcgtcgatcttggccagcacgactaggctgatcgtgagcagcacgtcgtggacgccggacgaagacttctcgctgcttctggacgcactagttacctatgccaaagctagtaccgcggtaccaattatagctgtcatcacaggcaagggcccgcagaaggagtactacgaacgtcggatccaggagctagttaaagctggcaagctacctaacattcgtatcatgaccgcctggtttacaatggaggactatgcccgcttgctcgcatgtgccgatcttggcgtttgcctccacatgtcgagctcaggagttgacctacctatgaaggttgtcgacatgtttggctctggactgccagtggtcgcatattcagggtacgagagctttgacgaactcgtcttggaaggtaaaaatggatatggatttgagaccgccgacgagctctctagtagacttctacgactcctaggtgactctggtaagcaagagcttgccagtctacgtgagggcgcagaggaagagagccagttgcgctgggatgaggaatgggatcgtgtcctggctccaattttcgggttcaagggatga

SEQ ID NO: 28479 - protein, 456 aa, Muscodor strobelii
  misc_feature: SGI Peptide ID NO. 569770
  misc_feature (258)..(439): Pfam Id: PF00534 Pfam Desc: Glycosyl transferases group 1
  misc_feature (21)..(454): NCBI GI: 145603966 Blast Desc: beta-1,4-mannosyltransferase, [Magnaporthe grisea 70-15] gi|145012079|gb|EDJ96735.1| beta-1,4-mannosyltransferase, [Magnaporthe grisea 70-15]
  misc_feature (6)..(456): NCBI GI: 46136231 Blast Desc: FG09631.1 [Gibberella zeae PH-1]
  misc_feature (6)..(454): NCBI GI: 256727042 Blast Desc: glycosyltransferase family 33 [Nectria haematococca mpVI 77-13-4]
  misc_feature (4)..(454): NCBI GI: 85106207 Blast Desc: NCU07261 [Neurospora crassa OR74A] gi|28923711|gb|EAA32879.1| conserved [Neurospora crassa OR74A]
  misc_feature (21)..(454): NCBI GI: 170940202 Blast Desc: protein product [Podospora anserina]
  misc_feature (38)..(454): NCBI GI: 116195578 Blast Desc: CHGG_04387 [Chaetomium globosum CBS 148.51] gi|88180300|gb|EAQ87768.1| CHGG_04387 [Chaetomium globosum CBS 148.51]
  misc_feature (1)..(445): NCBI GI: 261352462 Blast Desc: chitobiosyldiphosphodolichol beta-mannosyltransferase [Verticillium albo-atrum VaMs.102]
  misc_feature (15)..(454): NCBI GI: 121700370 Blast Desc: beta-1,4-mannosyltransferase (Alg1), [Aspergillus clavatus NRRL 1] gi|119396592|gb|EAW07024.1| beta-1,4-mannosyltransferase (Alg1), [Aspergillus clavatus NRRL
  misc_feature (2)..(454): NCBI GI: 255946644 Blast Desc: Pc22g00440 [Penicillium chrysogenum Wisconsin 54-1255] gi|211591106|emb|CAP97332.1| Pc22g00440 [Penicillium chrysogenum Wisconsin 54-1255]
  misc_feature (25)..(454): NCBI GI: 145236579 Blast Desc: An06g01100 [Aspergillus niger] gi|134075396|emb|CAK39183.1| protein product [Aspergillus niger]
  misc_feature (45)..(451): SWISSPROT Homolog: EC 2.4.1.142 Chitobiosyldiphosphodolichol beta-mannosyltransferase
MTLLAIILWLTVAGLALASVAMLTMLPSRYVSPPTDVRASTSVQILVLGDIGRSPRMQYHALSIAKHGGQVHLIGYLESLPHPDLIDNPRVTIHALPEAPKALKSGDIPFVVAGPLKVLWQIVTLIRALGYTTPASTWLLVQNPPAIPTLAVAFIISLIRNTKLMVDWHNYGWTILAGTKGHTHPFVKISKLYECLCGQIAPTANITVTHAMKRELQRAPYDVTSPIYTLHDRPAAIFQPLNFISERKDFLDSVPWLKSLSSSILASTTRLIVSSTSWTPDEDFSLLLDALVTYAKASTAVPIIAVITGKGPQKEYYERRIQELVKAGKLPNIRIMTAWFTMEDYARLLACADLGVCLHMSSSGVDLPMKVVDMFGSGLPVVAYSGYESFDELVLEGKNGYGFETADELSSRLLRLLGDSGKQELASLREGAEEESQLRWDEEWDRVLAPIFGFKG

SEQ ID NO: 28480 - DNA, 4968 bp, Muscodor strobelii
  misc_feature: SGI EST ID NO. CUFF.67160.1
  misc_feature: Variant of the nucleotide sequence at SEQ ID NO 28478
gctgtgtattcggtggtcttgttgaatacctatccgaaacacatgatgtgtttacacttataagttgcatatagagatagggtgtcatctttttgcagactgcctaactgccaagaacgtctggttttgagtagaacttccatcccagctacattttgcatttcaatcgcgcgcagaactgtaacatatcgtagtctctaattacatgcccgtctgaattgtgagaggcactttgtttgcgctagaggtgccaaagcaatgggagcgcctgcccattgacaggtgtctgaatctcacaatgtgcctgaagcaaacaaacctcgccgaaggcagtttcgccgagtcttgtcctcacaccagcaacatcaccgttctcgcctgtcactagtaataactgcgaatcaaaatgacgctcctcgccataattctgtggctcaccgtcgccggtcttgcgctggcctcggttgccatgctgacgatgttgccttctcgctatgtttcgccgcctaccgatgttcgcgcctcaacatcggtccagattcttgtcctgggcgatattggtcgaagcccgcgaatgcagtatcatgcactgagcattgcaaaacacggcggccaagttcacctgattggctacctcgagtctttgcctcaccctgatcttattgacaatcctcgtgtaacaattcatgcactgccagaagccccaaaggctctgaaatcgggggatatcccttttgttgtcgctggtcctctcaaagtgctttggcagatcgtcacactcattcgtgctcttggatacaccacacctgcctcaacatggcttcttgttcagaatcctcctgcgattcccacactcgcagtagctttcattatctctctcatacgtaacacgaagcttatggtcgactggcataactacggctggactatcctagctggcaccaaaggtcacactcatccattcgtcaagatttctaagctctatgaatgcctttgtggtcagattgctccgactgccaacatcactgtgacccatgcaatgaagagagagttacagcgcgctccgtacgatgtcacttcaccaatctacacccttcacgatcgtcctgccgcaatctttcaacctctgaatttcatttcagagcgaaaagacttcctggacagtgtgccttggttgaaaagcttgtcttcgtcgatcttggccagcacgactaggctgatcgtgagcagcacgtcgtggacgccggacgaagacttctcgctgcttctggacgcactagttacctatgccaaagctagtaccgcggtaccaattatagctgtcatcacaggcaagggcccgcagaaggagtactacgaacgtcggatccaggagctagttaaagctggcaagctacctaacattcgtatcatgaccgcctggtttacaatggaggactatgcccgcttgctcgcatgtgccgatcttggcgtttgcctccacatgtcgagctcaggagttgacctacctatgaaggttgtcgacatgtttggctctggactgccagtggtcgcatattcagggtacgagagctttgacgaactcgtcttggaaggtaaaaatggatatggatttgagaccgccgacgagctctctagtagacttctacgactcctaggtgactctggtaagcaagagcttgccagtctacgtgagggcgcagaggaagagagccagttgcgctgggatgaggaatgggatcgtgtcctggctccaattttcgggttcaagggatgaatcacagggattgacgccttctacgaggtatactgagtaacagagtcgcggccgaatcctgatctgcgagttcagagaatgactcaccgggggcagatgacagacacttgggtcgaggcagatgaatgaagcttcaagtctgcgatgatgctaggacatggagcatctgagcagaaagacattcagatcgcaaaatcgctgtgcctaaggctatgggaactccgagatccaacgccagatagtgtgaaaacaaaaaagtttatggaaaggatttactgttccgccaaatctacttaacctgacctatgcttcgcaatgtgagcagatttgactaccgccctatgcagtacgcttgagaacgctgaaaatgaaccaccatatactgtcatccataccccgaaattacgacctccacctcaatcatccccaagactctcacgcacacacttccgtaccctcttcctgaagtccttaggtcctccttccctctcgatgcgtagtaatttggcagcatctaaatttgcagggctgtcctcgttgggctcgctgaacaaactgatgacactcagcagaatggtctcgggtgtctgtacgggagaccagcgctcggaagcgttctcgtagccgtattggtcgttgccaggtggatgtaggatggatatgcagagctcgcccgtggggtagatgttcggatggaaagggatggggttctgaaatatcatctttggtggcagatgcggatattcgggcggaaagatcaggtgcgcgcggaatatagctcctgttttggttgcgtcagcaggaagtcgcaagaaagagggtcaagagtaggaaggcgacgaggttggattgggaatagaattgcacgtaccaccataatatttgcagtcatcgttcagcatcaaagatacctcccattcaaagacattgttatcattgagtaagcctgccgaaatgcctgagaggacattgtcactgttgatctccttcagctgccggcttagcagcgacgcagccggtgcactttgcgccgaggccgccattgcatcgaatgcgcggaaactgaaatattcagggtgttcaagaacttgagagcttgctcagaagaccgtggtatcttcggcaaaccagtaagcagctatgctcggaagagcgttgttggatgctgtggcagactagatgggcaggttgtcgaggagatagacgggaaaacgggtgctctagccgatggagcccggcacagtcaacttgacttcaagttgtcagcaatccgggacgaacctgctggcgtgatgaaagggcatcctgactcctagtattaatgcctggagaagcctggggagatacttggttcatgatagaagctgcaagatgacccctccataggtcgtttctcagcaatctggtgggggaatggagcttacatgcatggtgcagggttcacaattaacatacgctaatggatgacaatggacatcacaaccatttcgttctgctctacttgtatttcgcggagtccttttgcttttgtgtgaaatgagagaactaatcaactcttctcttcattgttttctttaatcttacacatgtctccttccatgaaagaaactccccgagatacatcctgggacatcaacccatggtactaaatgttgaagattgttatatcgccaatttactagattgcctcgcgcacttctgtttccaaggtcgtttacgagctaactgcatcagccaaattcatggaatcgtcatctggctcttgaatgcagagagacaagactagttggcgaggatgcaatatcaaggggtttggctagacctcttgactggcatgatgtttttcactgtatccgtaagcagagctggatggcatcaccggcctcctttatggtggagaagtcgggtctcttggaaattcagcccgtccgcatttatgctgaatgccatgatgtgcagctacacttaggtagccccaagaatctctgatcacgacggccgtgttgaccatcatcattgagccgtcatcgtcgatacacagatcgatgctgaccacaaagcttatggtccctagcccgcctctttgcacaccaaggtgtaggcttcgagggctgtatcgtttcccatgattttctcattgagtcaagtggacatcaagtcgggattttgaaacagctgtgagcgcttcattctgacaagtttgcataagcaaatggtgattgttcaacttaggccggcaaatcgagtgagtagtcatcctcatttcttcttcgatgttccaaaaccagtaattcccatagcagccatcatgtcgtcttcgtcatgttcgccttcgacccggacgtcgtcgccatattcggtcttgatcttttcagcgttctcgcggttgtttctcttgcgagcaagatcctcctgccgcttcacccgacgtgcttctttctccttcgcatcctcctcttcacgaatctcgagtcgttccttaagtgtcgttgcagcatctttcttttgtgcttgaaggcggtcccacacctcgtcgatgcgacggtgaacgtcttcagcggtagctttttggacctctcctgtctccccaatgttgcgcaaatgctgcatactgttgatatgctcaacccattggatgttgtccttaaaagtcaagtcacacgcgctacagtagaaaccggcgccacgtcctcgctttcccactccagccccagctgggaccagcatcgtcttgccgacattggcctctagatccagtatatcacgtcgggctcttgtgcttgtctcgtctcccgtcatcggtttgtagtatttcttcccagccaattttgcctcatatcgagcctttgcttcctctcgttctgcgctatcgcgcaccttggctttctcagcatattcattaaggtcgtaattgcgccggaaagaggtgtccgtcgccggcgtgccgtatgcagaacctttgcccgacatcttgtatttgtccctcgtcccaggacagagactattcacttatcagtggcagctagttgagagtgtagaatgagtgtgaggttgtgcacaatgaggccgtgaaaggtagtcggccgtcggatgttagagcttcaacttgagcttggcccataaaaagttaagagtgccttattaaggttgactgtaaggtcaactgttcagaaataaaatttttactacgg

SEQ ID NO: 28481 - DNA, 1638 bp, Muscodor strobelii
  misc_feature: SGI cDNA ID NO. 569771
  misc_feature: Encodes the peptide sequence at SEQ ID NO 28482
atggcctcatcttatgctctcccgcaggcgccgctggcacacggtcatagccctcacggctccatcgagcatctccattcccagagccacacggcctcgttcggcgacgcaaggtcttcacgcccgagcttttctggcggcacaaccgctcgttcccacgatcacaaccatagccacggtcatacccatagtcacagcacccacagcaaccacagcaaccatagccatagtcacagtcaggatagcgccgacgaagatggttcgagtcatgcacggcagaacatgtcacactaccgagccaattcttttgtcccgctgcaacggcgagaaaaccgcccctcgccattgaggcatacgaccgaagaactaccaagcccagcagagaagcaggttgaatactcttctacgcactcacacgctcactcgcatgatcacgggcacgaccacgacgattgcgatcacgatcatcacgatcaccatgagcatcatggacgctcccactcccactctcaagactactccaagatgacggccttattattaccatatacctccaagtggccgctcattcacgccatcatgaccgaaaaagactctcggcgcatattctacttcatgggggttaatttcacatttatgatggtgcaagctgcatatggttatctcacagactcgttaggtctcctgagtgacagcatacatatgtttttcgattgcgttgccttagccgtcggcctttttgcatccgttatgagcaaatggccgcccagtcaaagattcccatatggattcggcaagatcgaaactttgagtgggtttgctaatggtgtctttctaatccttatcagcctcgagatcatgttcgaggccttcgaaagattactcgagggaaggcagacaaagcgactgggggagctgtttgtcgttagtacgatgggactggtggtgaatctcctcggcatattcgcttttgggtcgcacagtcaccatgggcatagtcatggccatgaccatggccacggacattctcatcctcacgaccaccacgcccatgagaaagagggacacggtcacagtcatggtcactctcatgggcactctcatcacggacacagtcacgataatgagaacatgcatggcatttacctgcatattctcgcggatactctaggcagcgcgtcggtgatagcgtccaccattcttacttactttatgccttgggcaggctgggaccctctcgcctcgtttctgattgcttacttgatcctcattacagccatgcccctggtgaaatcgtcagcacaacgcttgttgttgaccaatcccgcggatacggaatacaacctacgaaacatactgtccgagattacgaatcagcgaggtgtggcatcgtatgcggtacccaaattctgggctgacgatagggccggtagcgaagctggagcactgcaaggtgtaatgcatgtggctgccgtgagaggcgtagagctgcaagaggttcgcgaacgagtctcaggatacctatcccggcaaggcatggacctgacgatccaggtcgaacgtgaaggcgacacaagttgctggtgcgggatgggacgcacgagtcccttatcacccaagccacctgtctctttttga

SEQ ID NO: 28482 - protein, 545 aa, Muscodor strobelii
  misc_feature: SGI Peptide ID NO. 569771
  misc_feature (202)..(526): Pfam Id: PF01545 Pfam Desc: Cation efflux family
  misc_feature (202)..(438): Pfam Id: PF01545 Pfam Desc: Cation efflux family
  misc_feature (172)..(538): NCBI GI: 170940203 Blast Desc: protein product [Podospora anserina]
  misc_feature (174)..(542): NCBI GI: 46136233 Blast Desc: FG09632.1 [Gibberella zeae PH-1]
  misc_feature (1)..(529): NCBI GI: 256727618 Blast Desc: NECHADRAFT_23366 [Nectria haematococca mpVI 77-13-4]
  misc_feature (151)..(532): NCBI GI: 154270895 Blast Desc: [Ajellomyces capsulatus NAm1] gi|150409524|gb|EDN04968.1| [Ajellomyces capsulatus NAm1]
  misc_feature (174)..(532): NCBI GI: 239610357 Blast Desc: cation efflux protein/zinc transporter [Ajellomyces dermatitidis ER-3]
  misc_feature (208)..(530): NCBI GI: 154293822 Blast Desc: BC1G_14239 [Botryotinia fuckeliana B05.10] gi|150845212|gb|EDN20405.1| BC1G_14239 [Botryotinia fuckeliana B05.10]
  misc_feature (161)..(532): NCBI GI: 240110721 Blast Desc: cation efflux family protein [Coccidioides posadasii C735 delta SOWgp]
  misc_feature (174)..(532): NCBI GI: 261195750 Blast Desc: cation efflux protein/zinc transporter [Ajellomyces dermatitidis SLH14081] gi|239588151|gb|EEQ70794.1| cation efflux protein/zinc transporter [Ajellomyces dermatitidis SLH14081]
  misc_feature (124)..(474): NCBI GI: 159130255 Blast Desc: CDF zinc transporter (Msc2), [Aspergillus fumigatus A1163]
  misc_feature (124)..(474): NCBI GI: 119473262 Blast Desc: cation efflux protein/ zinc transporter [Neosartorya fischeri NRRL 181] gi|119406698|gb|EAW16649.1| cation efflux protein/ zinc transporter [Neosartorya fischeri NRRL 181]
MASSYALPQAPLAHGHSPHGSIEHLHSQSHTASFGDARSSRPSFSGGTTARSHDHNHSHGHTHSHSTHSNHSNHSHSHSQDSADEDGSSHARQNMSHYRANSFVPLQRRENRPSPLRHTTEELPSPAEKQVEYSSTHSHAHSHDHGHDHDDCDHDHHDHHEHHGRSHSHSQDYSKMTALLLPYTSKWPLIHAIMTEKDSRRIFYFMGVNFTFMMVQAAYGYLTDSLGLLSDSIHMFFDCVALAVGLFASVMSKWPPSQRFPYGFGKIETLSGFANGVFLILISLEIMFEAFERLLEGRQTKRLGELFVVSTMGLVVNLLGIFAFGSHSHHGHSHGHDHGHGHSHPHDHHAHEKEGHGHSHGHSHGHSHHGHSHDNENMHGIYLHILADTLGSASVIASTILTYFMPWAGWDPLASFLIAYLILITAMPLVKSSAQRLLLTNPADTEYNLRNILSEITNQRGVASYAVPKFWADDRAGSEAGALQGVMHVAAVRGVELQEVRERVSGYLSRQGMDLTIQVEREGDTSCWCGMGRTSPLSPKPPVSF

SEQ ID NO: 28483 - DNA, 2394 bp, Muscodor strobelii
  misc_feature: SGI EST ID NO. CUFF.67144.0
  misc_feature: Variant of the nucleotide sequence at SEQ ID NO 28481
ggagattactaaggcacagcgggctgagttgggcaaggggtagtacgacccgaactaacctattgttgcctcctacctcattcagaagtaccccaacgcctctccccgtatctgcgaatgtccttcctttccagcatctttgaccgtcaattgctcttgcagattgcgctggctggagttatttggctgcgtgtgttcttttgatttcctcacatgtagcatggattttctggcgaacttataaccgtacggttgggcccttaattccccgacgatatctatctttctgctcgccaacccttaaccagcgtgtcgtgccgcgccgaatgcgggagtctcagatcaataagtgaccaactgagcccgaccaatctccccaattacgatcgtcttgataggaagccatcacgcctacacgctttgacgaatactgccattgacgctgcgccggtccttgctttgggaatcgttcattcgacgagaccacgacccctcggaaactggaaatcgtcgttgagccacactctgaacgtttccgctccctcatacggccctatcttgcctggttcgatcaaaaaggataggagacattcaagatggcctcatcttatgctctcccgcaggcgccgctggcacacggtcatagccctcacggctccatcgagcatctccattcccagagccacacggcctcgttcggcgacgcaaggtcttcacgcccgagcttttctggcggcacaaccgctcgttcccacgatcacaaccatagccacggtcatacccatagtcacagcacccacagcaaccacagcaaccatagccatagtcacagtcaggatagcgccgacgaagatggttcgagtcatgcacggcagaacatgtcacactaccgagccaattcttttgtcccgctgcaacggcgagaaaaccgcccctcgccattgaggcatacgaccgaagaactaccaagcccagcagagaagcaggttgaatactcttctacgcactcacacgctcactcgcatgatcacgggcacgaccacgacgattgcgatcacgatcatcacgatcaccatgagcatcatggacgctcccactcccactctcaagactactccaagatgacggccttattattaccatatacctccaagtggccgctcattcacgccatcatgaccgaaaaagactctcggcgcatattctacttcatgggggttaatttcacatttatgatggtgcaagctgcatatggttatctcacagactcgttaggtctcctgagtgacagcatacatatgtttttcgattgcgttgccttagccgtcggcctttttgcatccgttatgagcaaatggccgcccagtcaaagattcccatatggattcggcaagatcgaaactttgagtgggtttgctaatggtgtctttctaatccttatcagcctcgagatcatgttcgaggccttcgaaagattactcgagggaaggcagacaaagcgactgggggagctgtttgtcgttagtacgatgggactggtggtgaatctcctcggcatattcgcttttgggtcgcacagtcaccatgggcatagtcatggccatgaccatggccacggacattctcatcctcacgaccaccacgcccatgagaaagagggacacggtcacagtcatggtcactctcatgggcactctcatcacggacacagtcacgataatgagaacatgcatggcatttacctgcatattctcgcggatactctaggcagcgcgtcggtgatagcgtccaccattcttacttactttatgccttgggcaggctgggaccctctcgcctcgtttctgattgcttacttgatcctcattacagccatgcccctggtgaaatcgtcagcacaacgcttgttgttgaccaatcccgcggatacggaatacaacctacgaaacatactgtccgagattacgaatcagcgaggtgtggcatcgtatgcggtacccaaattctgggctgacgatagggccggtagcgaagctggagcactgcaaggtgtaatgcatgtggctgccgtgagaggcgtagagctgcaagaggttcgcgaacgagtctcaggatacctatcccggcaaggcatggacctgacgatccaggtcgaacgtgaaggcgacacaagttgctggtgcgggatgggacgcacgagtcccttatcacccaagccacctgtctctttttgacgcgtatgttgagtttcaccacgccatgacagaggcttatacatatttactgggtgtagagtgcatcggggcagagcgccatggcaaacgtacataacattaagacgcttaaaagacatttatacatataacgagaggcaataataatgatgatacccta

SEQ ID NO: 28484 - DNA, 1059 bp, Muscodor strobelii
  misc_feature: SGI cDNA ID NO. 569772
  misc_feature: Reduced expression when VOC is produced
  misc_feature: Encodes the peptide sequence at SEQ ID NO 28485
atgtcgacctcctcgtcacccaaaggcgtcaatgagaagctcaacgcgacgcttcctgctcccgtcgcagagcgcctacctcacattccggagaccaaggatgagctcaaggccgaggtgaaagctgaggctaaagccgccgccaatagcctggcctctcaactcaggtcttttgccgcaggcggctttggtggtgtttgcgctgttgtcgtcggccatccgttcgatctcgtcaaggtccgtttgcagactgcggacaagggcgtctactcgtctgccatcgatgtcgtcaagaagagtgttgcgagggatggcctgaggaagggtctctacgctggcgtgagcgctcccttagttggtgttacgcctatgttcgccgtgtccttctggggctacgatctcggcaagcaaatagtaacttcatggtcgccgccgggccccgacggcggcctatccatcgcccagatctccaccgcgggtttcttcagcgccatccccatgacggccatcacagcgcccttcgagcgcgtaaaagtcatcctacaggtccagggtcagaagctgaagccgggcgaggagcccaagtacaaaggcggtgtggatgtagttcgccaactctacaaagaaggaggaatccggtccgttttccgcggcagcgctgccacgttagcccgcgacggccccggtagcgccgcatacttcgccgcttacgagtacatcaagcgacggctcacacccagggacccggttaccggaaaaccgtcgggcgacctgagtctcacggctgtgacatgcgctggtggtgctgccggtatcgctatgtggatccctgtcttccccgtcgacaccgtcaagagccgactacagactgctgagggaaatccatcgattggctccgtcatgcgcgagctgtacggccgtggaggtgtcaaggcgttcttcccgggttttggcccggcgcttgctagagctgtccccgctaatgctgcgacgttcttgggcgttgagctggcacatcaggctatgaggaaggcgtttgataaagaggatgtgttgtga

SEQ ID NO: 28485 - protein, 352 aa, Muscodor strobelii
  misc_feature: SGI Peptide ID NO. 569772
  misc_feature (152)..(248): Pfam Id: PF00153 Pfam Desc: Mitochondrial carrier protein
  misc_feature (53)..(143): Pfam Id: PF00153 Pfam Desc: Mitochondrial carrier protein
  misc_feature (259)..(346): Pfam Id: PF00153 Pfam Desc: Mitochondrial carrier protein
  misc_feature (3)..(347): NCBI GI: 170940204 Blast Desc: protein product [Podospora anserina]
  misc_feature (2)..(347): NCBI GI: 85106216 Blast Desc: NCU07263 [Neurospora crassa OR74A] gi|28923713|gb|EAA32881.1| NCU07263 [Neurospora crassa OR74A]
  misc_feature (26)..(347): NCBI GI: 39969765 Blast Desc: MGG_10492 [Magnaporthe grisea 70-15] gi|145012081|gb|EDJ96737.1| MGG_10492 [Magnaporthe grisea 70-15] gi|283496144|gb|ADB25056.1| transportor [Magnaporthe oryzae]
  misc_feature (15)..(346): NCBI GI: 46136235 Blast Desc: FG09633.1 [Gibberella zeae PH-1]
  misc_feature (15)..(347): NCBI GI: 256727617 Blast Desc: [Nectria haematococca mpVI 77-13-4]
  misc_feature (1)..(346): NCBI GI: 261352460 Blast Desc: mitochondrial carnitine carrier [Verticillium albo-atrum VaMs.102]
  misc_feature (10)..(346): NCBI GI: 156061747 Blast Desc: SS1G_03019 [Sclerotinia sclerotiorum 1980] gi|154700420|gb|EDO00159.1| SS1G_03019 [Sclerotinia sclerotiorum 1980]
  misc_feature (34)..(347): NCBI GI: 255946660 Blast Desc: Pc22g00520 [Penicillium chrysogenum Wisconsin 54-1255] gi|211591114|emb|CAP97340.1| Pc22g00520 [Penicillium chrysogenum Wisconsin 54-1255]
  misc_feature (22)..(347): NCBI GI: 238844660 Blast Desc: carnitine/acyl carnitine carrier [Microsporum canis CBS 113480]
  misc_feature (31)..(347): NCBI GI: 242824784 Blast Desc: mitochondrial carnitine:acyl carnitine carrier, [Talaromyces stipitatus ATCC 10500] gi|218713249|gb|EED12674.1| mitochondrial carnitine:acyl carnitine carrier, [Talaromyces ATCC
  misc_feature: Useful for introducing or modulating the production of volatile compounds
MSTSSSPKGVNEKLNATLPAPVAERLPHIPETKDELKAEVKAEAKAAANSLASQLRSFAAGGFGGVCAVVVGHPFDLVKVRLQTADKGVYSSAIDVVKKSVARDGLRKGLYAGVSAPLVGVTPMFAVSFWGYDLGKQIVTSWSPPGPDGGLSIAQISTAGFFSAIPMTAITAPFERVKVILQVQGQKLKPGEEPKYKGGVDVVRQLYKEGGIRSVFRGSAATLARDGPGSAAYFAAYEYIKRRLTPRDPVTGKPSGDLSLTAVTCAGGAAGIAMWIPVFPVDTVKSRLQTAEGNPSIGSVMRELYGRGGVKAFFPGFGPALARAVPANAATFLGVELAHQAMRKAFDKEDVL

SEQ ID NO: 28486 - DNA, 3965 bp, Muscodor strobelii
  misc_feature: SGI EST ID NO. CUFF.67352.0
  misc_feature: Variant of the nucleotide sequence at SEQ ID NO 28484
gacgtcgtttgcctgcgtttccgcttggccgccaattgccgactaaacccaaaatcctggacagaagggacgaaaaacagcagcggcattttcttaaggagcctccattcctgtgtttgttcgtgttgctttctttcttctccgacgggacaatcgtatagacgcctcttcatctcggtctcgtagtctgcaacggtacggaggtagacggaacgaggggccccgccgcctcagggatttagagttcagacggacaagcgacaaggaaacaccggctggtctagacgaacaccgcgactatgtcgacctcctcgtcacccaaaggcgtcaatgagaagctcaacgcgacgcttcctgctcccgtcgcagagcgcctacctcacattccggagaccaaggatgagctcaaggccgaggtgaaagctgaggctaaagccgccgccaatagcctggcctctcaactcaggtcttttgccgcaggcggctttggtggtgtttgcgctgttgtcgtcggccatccgttcgatctcgtcaaggtccgtttgcagactgcggacaagggcgtctactcgtctgccatcgatgtcgtcaagaagagtgttgcgagggatggcctgaggaagggtctctacgctggcgtgagcgctcccttagttggtgttacgcctatgttcgccgtgtccttctggggctacgatctcggcaagcaaatagtaacttcatggtcgccgccgggccccgacggcggcctatccatcgcccagatctccaccgcgggtttcttcagcgccatccccatgacggccatcacagcgcccttcgagcgcgtaaaagtcatcctacaggtccagggtcagaagctgaagccgggcgaggagcccaagtacaaaggcggtgtggatgtagttcgccaactctacaaagaaggaggaatccggtccgttttccgcggcagcgctgccacgttagcccgcgacggccccggtagcgccgcatacttcgccgcttacgagtacatcaagcgacggctcacacccagggacccggttaccggaaaaccgtcgggcgacctgagtctcacggctgtgacatgcgctggtggtgctgccggtatcgctatgtggatccctgtcttccccgtcgacaccgtcaagagccgactacagactgctgagggaaatccatcgattggctccgtcatgcgcgagctgtacggccgtggaggtgtcaaggcgttcttcccgggttttggcccggcgcttgctagagctgtccccgctaatgctgcgacgttcttgggcgttgagctggcacatcaggctatgaggaaggcgtttgataaagaggatgtgttgtgaagtttgggtccaaatccacaaaagtcctgagcaggagttgaatggcggagggctgcggctaaatctgatggcgcacattcatagatcggcgtggtgtccagttgtgttacggtggcggcatcatggcatcattctattttttgcattttcggtgcttcagcatggtgagaagcgtgtatatactgcgattcgcgaattcggcgttgatttctgagatgatacgtatagaaatgaaaatcatggacagacgagaaatgacatgattttgcactgctcacatgtggctctacgtttctagtttttcgcttgtcactcaacggcatattgctcatttgacctcttgtgatgtcagcatatctcaatcgtctgcataatctagaggttggtaagaatgactctcatattccatttttatacgcctattccatatgtaatgctatcatgatgccgaatcacccgctatgtccattcttttctcgccatgcctatgcactcacctctcattgacagtccatcgtctcttactagtcctaaagtcccgtagcctctcagctggacctggtgggagtggtgcaccccataagccgccattccctgtgcctgcccataagtgcggtaccgagtcctcgtcaaactgatcatgctcttcatcggcatgattttcatgtatatgattctgagcgctcgttgaattatcctctgttggcggtggttcagcatccgcttttgtccccagatcaggggacgggggtttctcgtggctgaagtcaagcaacatgggcatatctgattctttctccgcctctgcttcgtcctcttgcttgggactccatagcccgaaggacccgagccgcgccgtgcgggtcattgtgaaactggaaacaccactaccaacagtgatgcctcccgcgtttgatgaagagttcgatggccggaagtttagggtcatgcctccactatgtcgcctatcatcccctagtgaagcgctggcagagttactgcgactgcccgacggatggcctcctcgttcagtcgcaccgaaattgatctctttaagcgcggaggtaaatctggaggtctcgggacgcgtgtgtgggttcgcccctgcgagagacgtcgaccgaccgatggtgaccggcgcaggagaaacggaacgtaggtgttcggtattagcgaacaacttaagctcatacatatctggcatgctcgctctgtgcttggtcaaagcggcatccagagaagctgcggacttgacccgtgcgaagctactatttcgatagtcaaactctggtcgtctcttagccatagttagtgaagacatggccacatccgcaagtacaggctggtgcgtaatcgcacccgtcagcgcattgcagccagcaccatgtgagaccaggacgacaacatcttcgatctcaccgtcttcgtcctcaccgatgatgctgccgcgatcggccatttcaacagcgttcgcagtcttggtcaccatttcgccggggttttctgtcgtggcgtaccagtctatcattcgcctcaggccccttcgaaatctttggtgcattagcgcccattcctcggggaggtgaccaccatctccccatcctatgttgtcgcgagatgagtcccactgatagtccgttgatgcgcatgcgtctcgagcgtgggcaacataccctttaggtattggttcggatgtagagagagcatacgatggacggggcgcgacataggtaggggctcctttctgatttcgagatgctaacggacccgtcttcggtagactatggccaaggtcggggagagtgtcgagcgaatccgggtcagcagaactcagtgttgaatatgcgaccaaaggtttgatatggctggacgaagcgttccatagctgattgctagcagctgagtgaacacgtgcgtggaagtgagactcgtgatgactctcgcgtcgtagcagctcagctttggcggttgccagcatgagcgaagactcaggaggtggggtgatgtgctcgaagtactcgggggagagccattcgcctaggaaggcgtctagtcgtaggacggacttgggactggcgcggtctgggtcggaggctagaccggaagctatggcgatggaagtttggacgcagcgtagaaaaggcgagctgtggaggatgacgcggaagcgccgcttcttaggaggggaggagggaggtatggtatcatcgtggggttcgtgggctgctttctgtagtatcgatgctatgcgagcgcccacggtcctggactgtaaccaacccccataagtgagcggcggatcatatggtgtgggcgatgtcaagtgccactgcttgtcggccgcgtcaagacgagcgccatgtctacaccacggtcagaaatcagttaccaggtgtatatgtgagattacaaaccaggcacacgtacctcacaacaaagacataagctggcgggcgccccatgacaaggcgatgtcgagcaggaagactggacgtagacaagagaaaatgatgtgaagtatgttaccagaggagaagcaaaggagcaaagtaaataagaatcagagctgtttcggagcttactctgcctttacctggttcacagtcg

SEQ ID NO: 28487 - DNA, 1905 bp, Muscodor strobelii
  misc_feature: SGI cDNA ID NO. 569773
  misc_feature: Reduced expression when VOC is produced
  misc_feature: Encodes the peptide sequence at SEQ ID NO 28488
atggggcgcccgccagcttatgtctttgttgtgagacatggcgctcgtcttgacgcggccgacaagcagtggcacttgacatcgcccacaccatatgatccgccgctcacttatgggggttggttacagtccaggaccgtgggcgctcgcatagcatcgatactacagaaagcagcccacgaaccccacgatgataccatacctccctcctcccctcctaagaagcggcgcttccgcgtcatcctccacagctcgccttttctacgctgcgtccaaacttccatcgccatagcttccggtctagcctccgacccagaccgcgccagtcccaagtccgtcctacgactagacgccttcctaggcgaatggctctcccccgagtacttcgagcacatcaccccacctcctgagtcttcgctcatgctggcaaccgccaaagctgagctgctacgacgcgagagtcatcacgagtctcacttccacgcacgtgttcactcagctgctagcaatcagctatggaacgcttcgtccagccatatcaaacctttggtcgcatattcaacactgagttctgctgacccggattcgctcgacactctccccgaccttggccatagtctaccgaagacgggtccgttagcatctcgaaatcagaaaggagcccctacctatgtcgcgccccgtccatcgtatgctctctctacatccgaaccaatacctaaagggtatgttgcccacgctcgagacgcatgcgcatcaacggactatcagtgggactcatctcgcgacaacataggatggggagatggtggtcacctccccgaggaatgggcgctaatgcaccaaagatttcgaaggggcctgaggcgaatgatagactggtacgccacgacagaaaaccccggcgaaatggtgaccaagactgcgaacgctgttgaaatggccgatcgcggcagcatcatcggtgaggacgaagacggtgagatcgaagatgttgtcgtcctggtctcacatggtgctggctgcaatgcgctgacgggtgcgattacgcaccagcctgtacttgcggatgtggccatgtcttcactaactatggctaagagacgaccagagtttgactatcgaaatagtagcttcgcacgggtcaagtccgcagcttctctggatgccgctttgaccaagcacagagcgagcatgccagatatgtatgagcttaagttgttcgctaataccgaacacctacgttccgtttctcctgcgccggtcaccatcggtcggtcgacgtctctcgcaggggcgaacccacacacgcgtcccgagacctccagatttacctccgcgcttaaagagatcaatttcggtgcgactgaacgaggaggccatccgtcgggcagtcgcagtaactctgccagcgcttcactaggggatgataggcgacatagtggaggcatgaccctaaacttccggccatcgaactcttcatcaaacgcgggaggcatcactgttggtagtggtgtttccagtttcacaatgacccgcacggcgcggctcgggtccttcgggctatggagtcccaagcaagaggacgaagcagaggcggagaaagaatcagatatgcccatgttgcttgacttcagccacgagaaacccccgtcccctgatctggggacaaaagcggatgctgaaccaccgccaacagaggataattcaacgagcgctcagaatcatatacatgaaaatcatgccgatgaagagcatgatcagtttgacgaggactcggtaccgcacttatgggcaggcacagggaatggcggcttatggggtgcaccactcccaccaggtccagctgagaggctacgggactttaggactagtaagagacgatggactgtcaatgagaggtga

SEQ ID NO: 28488 - protein, 634 aa, Muscodor strobelii
  misc_feature: SGI Peptide ID NO. 569773
  misc_feature (7)..(345): Pfam Id: PF00300 Pfam Desc: Phosphoglycerate mutase family
  misc_feature (1)..(634): NCBI GI: 170940207 Blast Desc: protein product [Podospora anserina]
  misc_feature (1)..(634): NCBI GI: 116195590 Blast Desc: CHGG_04393 [Chaetomium globosum CBS 148.51] gi|88180306|gb|EAQ87774.1| CHGG_04393 [Chaetomium globosum CBS 148.51]
  misc_feature (1)..(525): NCBI GI: 85106195 Blast Desc: NCU07258 [Neurospora crassa OR74A] gi|28923708|gb|EAA32876.1| [Neurospora crassa OR74A]
  misc_feature (1)..(549): NCBI GI: 256727041 Blast Desc: NECHADRAFT_91178 [Nectria haematococca mpVI 77-13-4]
  misc_feature (1)..(423): NCBI GI: 46136237 Blast Desc: FG09634.1 [Gibberella zeae PH-1]
  misc_feature (1)..(609): NCBI GI: 261352459 Blast Desc: phosphoglycerate mutase family protein [Verticillium albo-atrum VaMs.102]
  misc_feature (4)..(634): NCBI GI: 145603972 Blast Desc: MGG_10489 [Magnaporthe grisea 70-15] gi|145012084|gb|EDJ96740.1| MGG_10489 [Magnaporthe grisea 70-15]
  misc_feature (1)..(634): NCBI GI: 156061687 Blast Desc: SS1G_02989 [Sclerotinia sclerotiorum 1980] gi|154700390|gb|EDO00129.1| SS1G_02989 [Sclerotinia sclerotiorum 1980]
  misc_feature (1)..(418): NCBI GI: 154270885 Blast Desc: conserved [Ajellomyces capsulatus NAm1] gi|150409519|gb|EDN04963.1| conserved [Ajellomyces capsulatus NAm1]
  misc_feature (1)..(418): NCBI GI: 225555561 Blast Desc: phosphoglycerate mutase [Ajellomyces capsulatus G186AR]
  misc_feature: Useful for introducing or modulating the production of volatile compounds
MGRPPAYVFVVRHGARLDAADKQWHLTSPTPYDPPLTYGGWLQSRTVGARIASILQKAAHEPHDDTIPPSSPPKKRRFRVILHSSPFLRCVQTSIAIASGLASDPDRASPKSVLRLDAFLGEWLSPEYFEHITPPPESSLMLATAKAELLRRESHHESHFHARVHSAASNQLWNASSSHIKPLVAYSTLSSADPDSLDTLPDLGHSLPKTGPLASRNQKGAPTYVAPRPSYALSTSEPIPKGYVAHARDACASTDYQWDSSRDNIGWGDGGHLPEEWALMHQRFRRGLRRMIDWYATTENPGEMVTKTANAVEMADRGSIIGEDEDGEIEDVVVLVSHGAGCNALTGAITHQPVLADVAMSSLTMAKRRPEFDYRNSSFARVKSAASLDAALTKHRASMPDMYELKLFANTEHLRSVSPAPVTIGRSTSLAGANPHTRPETSRFTSALKEINFGATERGGHPSGSRSNSASASLGDDRRHSGGMTLNFRPSNSSSNAGGITVGSGVSSFTMTRTARLGSFGLWSPKQEDEAEAEKESDMPMLLDFSHEKPPSPDLGTKADAEPPPTEDNSTSAQNHIHENHADEEHDQFDEDSVPHLWAGTGNGGLWGAPLPPGPAERLRDFRTSKRRWTVNER

SEQ ID NO: 28489 - DNA, 3229 bp, Muscodor strobelii
  misc_feature: SGI EST ID NO. CUFF.67353.1
  misc_feature: Variant of the nucleotide sequence at SEQ ID NO 28487
ctgtgaaccaggtaaaggcagagtaagctccgaaacagctctgattcttatttactttgctcctttgcttctcctctggtaacatacttcacatcattttctcttgtctacgtccagtcttcctgctcgacatcgccttgtcatggggcgcccgccagcttatgtctttgttgtgagacatggcgctcgtcttgacgcggccgacaagcagtggcacttgacatcgcccacaccatatgatccgccgctcacttatgggggttggttacagtccaggaccgtgggcgctcgcatagcatcgatactacagaaagcagcccacgaaccccacgatgataccatacctccctcctcccctcctaagaagcggcgcttccgcgtcatcctccacagctcgccttttctacgctgcgtccaaacttccatcgccatagcttccggtctagcctccgacccagaccgcgccagtcccaagtccgtcctacgactagacgccttcctaggcgaatggctctcccccgagtacttcgagcacatcaccccacctcctgagtcttcgctcatgctggcaaccgccaaagctgagctgctacgacgcgagagtcatcacgagtctcacttccacgcacgtgttcactcagctgctagcaatcagctatggaacgcttcgtccagccatatcaaacctttggtcgcatattcaacactgagttctgctgacccggattcgctcgacactctccccgaccttggccatagtctaccgaagacgggtccgttagcatctcgaaatcagaaaggagcccctacctatgtcgcgccccgtccatcgtatgctctctctacatccgaaccaatacctaaagggtatgttgcccacgctcgagacgcatgcgcatcaacggactatcagtgggactcatctcgcgacaacataggatggggagatggtggtcacctccccgaggaatgggcgctaatgcaccaaagatttcgaaggggcctgaggcgaatgatagactggtacgccacgacagaaaaccccggcgaaatggtgaccaagactgcgaacgctgttgaaatggccgatcgcggcagcatcatcggtgaggacgaagacggtgagatcgaagatgttgtcgtcctggtctcacatggtgctggctgcaatgcgctgacgggtgcgattacgcaccagcctgtacttgcggatgtggccatgtcttcactaactatggctaagagacgaccagagtttgactatcgaaatagtagcttcgcacgggtcaagtccgcagcttctctggatgccgctttgaccaagcacagagcgagcatgccagatatgtatgagcttaagttgttcgctaataccgaacacctacgttccgtttctcctgcgccggtcaccatcggtcggtcgacgtctctcgcaggggcgaacccacacacgcgtcccgagacctccagatttacctccgcgcttaaagagatcaatttcggtgcgactgaacgaggaggccatccgtcgggcagtcgcagtaactctgccagcgcttcactaggggatgataggcgacatagtggaggcatgaccctaaacttccggccatcgaactcttcatcaaacgcgggaggcatcactgttggtagtggtgtttccagtttcacaatgacccgcacggcgcggctcgggtccttcgggctatggagtcccaagcaagaggacgaagcagaggcggagaaagaatcagatatgcccatgttgcttgacttcagccacgagaaacccccgtcccctgatctggggacaaaagcggatgctgaaccaccgccaacagaggataattcaacgagcgctcagaatcatatacatgaaaatcatgccgatgaagagcatgatcagtttgacgaggactcggtaccgcacttatgggcaggcacagggaatggcggcttatggggtgcaccactcccaccaggtccagctgagaggctacgggactttaggactagtaagagacgatggactgtcaatgagaggtgagtgcataggcatggcgagaaaagaatggacatagcgggtgattcggcatcatgatagcattacatatggaataggcgtataaaaatggaatatgagagtcattcttaccaacctctagattatgcagacgattgagatatgctgacatcacaagaggtcaaatgagcaatatgccgttgagtgacaagcgaaaaactagaaacgtagagccacatgtgagcagtgcaaaatcatgtcatttctcgtctgtccatgattttcatttctatacgtatcatctcagaaatcaacgccgaattcgcgaatcgcagtatatacacgcttctcaccatgctgaagcaccgaaaatgcaaaaaatagaatgatgccatgatgccgccaccgtaacacaactggacaccacgccgatctatgaatgtgcgccatcagatttagccgcagccctccgccattcaactcctgctcaggacttttgtggatttggacccaaacttcacaacacatcctctttatcaaacgccttcctcatagcctgatgtgccagctcaacgcccaagaacgtcgcagcattagcggggacagctctagcaagcgccgggccaaaacccgggaagaacgccttgacacctccacggccgtacagctcgcgcatgacggagccaatcgatggatttccctcagcagtctgtagtcggctcttgacggtgtcgacggggaagacagggatccacatagcgataccggcagcaccaccagcgcatgtcacagccgtgagactcaggtcgcccgacggttttccggtaaccgggtccctgggtgtgagccgtcgcttgatgtactcgtaagcggcgaagtatgcggcgctaccggggccgtcgcgggctaacgtggcagcgctgccgcggaaaacggaccggattcctccttctttgtagagttggcgaactacatccacaccgcctttgtacttgggctcctcgcccggcttcagcttctgaccctggacctgtaggatgacttttacgcgctcgaagggcgctgtgatggccgtcatggggatggcgctgaagaaacccgcggtggagatctgggcgatggataggccgccgtcggggcccggcggcgaccatgaagttactatttgcttgccgagatcgtagccccagaaggacacggcgacta

SEQ ID NO: 28490 - DNA, 1485 bp, Muscodor strobelii
  misc_feature: SGI cDNA ID NO. 569774
  misc_feature: Elevated expression when VOC is produced
  misc_feature: Encodes the peptide sequence at SEQ ID NO 28491
atgctggcaaccgccaaagctgagctgctacgacgcgagagtcatcacgagtctcacttccacgcacgtgttcactcagctgctagcaatcagctatggaacgcttcgtccagccatatcaaacctttggtcgcatattcaacactgagttctgctgacccggattcgctcgacactctccccgaccttggccatagtctaccgaagacgggtccgttagcatctcgaaatcagaaaggagcccctacctatgtcgcgccccgtccatcgtatgctctctctacatccgaaccaatacctaaagggtatgttgcccacgctcgagacgcatgcgcatcaacggactatcagtgggactcatctcgcgacaacataggatggggagatggtggtcacctccccgaggaatgggcgctaatgcaccaaagatttcgaaggggcctgaggcgaatgatagactggtacgccacgacagaaaaccccggcgaaatggtgaccaagactgcgaacgctgttgaaatggccgatcgcggcagcatcatcggtgaggacgaagacggtgagatcgaagatgttgtcgtcctggtctcacatggtgctggctgcaatgcgctgacgggtgcgattacgcaccagcctgtacttgcggatgtggccatgtcttcactaactatggctaagagacgaccagagtttgactatcgaaatagtagcttcgcacgggtcaagtccgcagcttctctggatgccgctttgaccaagcacagagcgagcatgccagatatgtatgagcttaagttgttcgctaataccgaacacctacgttccgtttctcctgcgccggtcaccatcggtcggtcgacgtctctcgcaggggcgaacccacacacgcgtcccgagacctccagatttacctccgcgcttaaagagatcaatttcggtgcgactgaacgaggaggccatccgtcgggcagtcgcagtaactctgccagcgcttcactaggggatgataggcgacatagtggaggcatgaccctaaacttccggccatcgaactcttcatcaaacgcgggaggcatcactgttggtagtggtgtttccagtttcacaatgacccgcacggcgcggctcgggtccttcgggctatggagtcccaagcaagaggacgaagcagaggcggagaaagaatcagatatgcccatgttgcttgacttcagccacgagaaacccccgtcccctgatctggggacaaaagcggatgctgaaccaccgccaacagaggataattcaacgagcgctcagaatcatatacatgaaaatcatgccgatgaagagcatgatcagtttgacgaggactcggtaccgcacttatgggcaggcacagggaatggcggcttatggggtgcaccactcccaccaggtccagctgagaggctacgggactttaggactagtaagagacgatggactgtcaatgagaggtga

SEQ ID NO: 28491 - protein, 494 aa, Muscodor strobelii
  misc_feature: SGI Peptide ID NO. 569774
  misc_feature (1)..(494): NCBI GI: 170940207 Blast Desc: protein product [Podospora anserina]
  misc_feature (1)..(494): NCBI GI: 116195590 Blast Desc: CHGG_04393 [Chaetomium globosum CBS 148.51] gi|88180306|gb|EAQ87774.1| CHGG_04393 [Chaetomium globosum CBS 148.51]
  misc_feature (1)..(385): NCBI GI: 85106195 Blast Desc: NCU07258 [Neurospora crassa OR74A] gi|28923708|gb|EAA32876.1| [Neurospora crassa OR74A]
  misc_feature (1)..(409): NCBI GI: 256727041 Blast Desc: NECHADRAFT_91178 [Nectria haematococca mpVI 77-13-4]
  misc_feature (1)..(469): NCBI GI: 261352459 Blast Desc: phosphoglycerate mutase family protein [Verticillium albo-atrum VaMs.102]
  misc_feature (1)..(494): NCBI GI: 156061687 Blast Desc: SS1G_02989 [Sclerotinia sclerotiorum 1980] gi|154700390|gb|EDO00129.1| SS1G_02989 [Sclerotinia sclerotiorum 1980]
  misc_feature (1)..(283): NCBI GI: 46136237 Blast Desc: FG09634.1 [Gibberella zeae PH-1]
  misc_feature (1)..(494): NCBI GI: 145603972 Blast Desc: MGG_10489 [Magnaporthe grisea 70-15] gi|145012084|gb|EDJ96740.1| MGG_10489 [Magnaporthe grisea 70-15]
  misc_feature (1)..(405): NCBI GI: 154293834 Blast Desc: BC1G_14245 [Botryotinia fuckeliana B05.10] gi|150845218|gb|EDN20411.1| BC1G_14245 [Botryotinia fuckeliana B05.10]
  misc_feature (1)..(278): NCBI GI: 154270885 Blast Desc: conserved [Ajellomyces capsulatus NAm1] gi|150409519|gb|EDN04963.1| conserved [Ajellomyces capsulatus NAm1]
  misc_feature: Useful for introducing or modulating the production of volatile compounds
MLATAKAELLRRESHHESHFHARVHSAASNQLWNASSSHIKPLVAYSTLSSADPDSLDTLPDLGHSLPKTGPLASRNQKGAPTYVAPRPSYALSTSEPIPKGYVAHARDACASTDYQWDSSRDNIGWGDGGHLPEEWALMHQRFRRGLRRMIDWYATTENPGEMVTKTANAVEMADRGSIIGEDEDGEIEDVVVLVSHGAGCNALTGAITHQPVLADVAMSSLTMAKRRPEFDYRNSSFARVKSAASLDAALTKHRASMPDMYELKLFANTEHLRSVSPAPVTIGRSTSLAGANPHTRPETSRFTSALKEINFGATERGGHPSGSRSNSASASLGDDRRHSGGMTLNFRPSNSSSNAGGITVGSGVSSFTMTRTARLGSFGLWSPKQEDEAEAEKESDMPMLLDFSHEKPPSPDLGTKADAEPPPTEDNSTSAQNHIHENHADEEHDQFDEDSVPHLWAGTGNGGLWGAPLPPGPAERLRDFRTSKRRWTVNER

SEQ ID NO: 28492 - DNA, 3229 bp, Muscodor strobelii; identical to SEQ ID NO: 28489
  misc_feature: SGI EST ID NO. CUFF.67353.1
  misc_feature: Variant of the nucleotide sequence at SEQ ID NO 28490

SEQ ID NO: 28493 - DNA, 996 bp, Muscodor strobelii
  misc_feature: SGI cDNA ID NO. 569775
  misc_feature: Reduced expression when VOC is produced
  misc_feature: Encodes the peptide sequence at SEQ ID NO 28494
atggtgaccaagactgcgaacgctgttgaaatggccgatcgcggcagcatcatcggtgaggacgaagacggtgagatcgaagatgttgtcgtcctggtctcacatggtgctggctgcaatgcgctgacgggtgcgattacgcaccagcctgtacttgcggatgtggccatgtcttcactaactatggctaagagacgaccagagtttgactatcgaaatagtagcttcgcacgggtcaagtccgcagcttctctggatgccgctttgaccaagcacagagcgagcatgccagatatgtatgagcttaagttgttcgctaataccgaacacctacgttccgtttctcctgcgccggtcaccatcggtcggtcgacgtctctcgcaggggcgaacccacacacgcgtcccgagacctccagatttacctccgcgcttaaagagatcaatttcggtgcgactgaacgaggaggccatccgtcgggcagtcgcagtaactctgccagcgcttcactaggggatgataggcgacatagtggaggcatgaccctaaacttccggccatcgaactcttcatcaaacgcgggaggcatcactgttggtagtggtgtttccagtttcacaatgacccgcacggcgcggctcgggtccttcgggctatggagtcccaagcaagaggacgaagcagaggcggagaaagaatcagatatgcccatgttgcttgacttcagccacgagaaacccccgtcccctgatctggggacaaaagcggatgctgaaccaccgccaacagaggataattcaacgagcgctcagaatcatatacatgaaaatcatgccgatgaagagcatgatcagtttgacgaggactcggtaccgcacttatgggcaggcacagggaatggcggcttatggggtgcaccactcccaccaggtccagctgagaggctacgggactttaggactagtaagagacgatggactgtcaatgagaggtga

SEQ ID NO: 28494 - protein, 331 aa, Muscodor strobelii
  misc_feature: SGI Peptide ID NO. 569775
  misc_feature (21)..(331): NCBI GI: 116195590 Blast Desc: CHGG_04393 [Chaetomium globosum CBS 148.51] gi|88180306|gb|EAQ87774.1| CHGG_04393 [Chaetomium globosum CBS 148.51]
  misc_feature (1)..(331): NCBI GI: 170940207 Blast Desc: protein product [Podospora anserina]
  misc_feature (1)..(222): NCBI GI: 85106195 Blast Desc: NCU07258 [Neurospora crassa OR74A] gi|28923708|gb|EAA32876.1| [Neurospora crassa OR74A]
  misc_feature (1)..(331): NCBI GI: 156061687 Blast Desc: SS1G_02989 [Sclerotinia sclerotiorum 1980] gi|154700390|gb|EDO00129.1| SS1G_02989 [Sclerotinia sclerotiorum 1980]
  misc_feature (1)..(306): NCBI GI: 261352459 Blast Desc: phosphoglycerate mutase family protein [Verticillium albo-atrum VaMs.102]
  misc_feature (22)..(222): NCBI GI: 256727041 Blast Desc: NECHADRAFT_91178 [Nectria haematococca mpVI 77-13-4]
  misc_feature (1)..(120): NCBI GI: 46136237 Blast Desc: FG09634.1 [Gibberella zeae PH-1]
  misc_feature (2)..(331): NCBI GI: 145603972 Blast Desc: MGG_10489 [Magnaporthe grisea 70-15] gi|145012084|gb|EDJ96740.1| MGG_10489 [Magnaporthe grisea 70-15]
  misc_feature (16)..(172): NCBI GI: 225678440 Blast Desc: conserved [Paracoccidioides brasiliensis Pb03]
  misc_feature (16)..(172): NCBI GI: 226294859 Blast Desc: phosphoglycerate mutase family protein [Paracoccidioides brasiliensis Pb18]
  misc_feature: Useful for introducing or modulating the production of volatile compounds
MVTKTANAVEMADRGSIIGEDEDGEIEDVVVLVSHGAGCNALTGAITHQPVLADVAMSSLTMAKRRPEFDYRNSSFARVKSAASLDAALTKHRASMPDMYELKLFANTEHLRSVSPAPVTIGRSTSLAGANPHTRPETSRFTSALKEINFGATERGGHPSGSRSNSASASLGDDRRHSGGMTLNFRPSNSSSNAGGITVGSGVSSFTMTRTARLGSFGLWSPKQEDEAEAEKESDMPMLLDFSHEKPPSPDLGTKADAEPPPTEDNSTSAQNHIHENHADEEHDQFDEDSVPHLWAGTGNGGLWGAPLPPGPAERLRDFRTSKRRWTVNER

SEQ ID NO: 28495 - DNA, 3229 bp, Muscodor strobelii; identical to SEQ ID NO: 28489
  misc_feature: SGI EST ID NO. CUFF.67353.1
  misc_feature: Variant of the nucleotide sequence at SEQ ID NO 28493

SEQ ID NO: 28496 - DNA, 1176 bp, Muscodor strobelii
  misc_feature: SGI cDNA ID NO. 569776
  misc_feature: Reduced expression when VOC is produced
  misc_feature: Encodes the peptide sequence at SEQ ID NO 28497
atgagactctccagaatattgcagctgcctgtgctgctggcatcggcattactcgccccgaatgtttgcgccgagcacacgagcaactgggccgttttggttggcacctcgaggttctggtttaattatcgtcatctagccaacgtcctgtccatgtaccgcaccgtcaagcgcctcggcatccccgactcccagatcatcctcatgctccccgatgacatggcttgcaacccgcgtaacgcctttccaggcaccgtctacagtaattccgatcgcgccgtcgacctgtacggcgacaacatcgaagtcgactaccggggctacgaggtcaccgtcgagaatttcatccgcctgttgactgaccgtgtcggcgacgagatgccccgaagcaagcgcctgctgactgacgaccggagcaacatctttgtgtacatgactggtcacggtggtaatgaattcttgaaatttcaggacgcagaggagattggtgcattcgacttggccgatgcctttgagcagatgtgggagaagaggagatatcacgagattctttttatgatcgatacctgtcaggcaaacaccatgtacagcaaactttattcgcctaacatcattgccaccggttcgtcagaactcgaccagtcgtcatactctcatcacgccgataacgacgtcggtgtcgctgtcattgaccgctacacatactacaacctcgagttcctcgagcacgaagtcagagacctaggcagtaagaagaccattggcgacctcttcgacagctattcgtacgagaaaattcattctcacgctggcgtgagatatgatttgttccagggtggcgcagatgtcgcccgcagtcgattgttgactgactttttcggaaatatccaaaatgtcgaggtggatggtaacaaaaactcgacaatggatgaagagatggtgactctcagccgtactattgcacagctgcgccggttagcagacgaggaagagatgaagcctagcaatgctactgaacctacaaaggttgagtctcgaccacacaagaagatacagctagccagctctctcaaggacgatagctggtggagcaaaaagctcattggcgcaacaaccttgggcggctgtgctgcgctctggactctcggctcttatttagaaagctcgaggaggtag

SEQ ID NO: 28497 - protein, 391 aa, Muscodor strobelii
  misc_feature: SGI Peptide ID NO. 569776
  misc_feature (29)..(295): Pfam Id: PF01650 Pfam Desc: Peptidase C13 family
  misc_feature (29)..(120): Pfam Id: PF01650 Pfam Desc: Peptidase C13 family
  misc_feature (140)..(218): Pfam Id: PF01650 Pfam Desc: Peptidase C13 family
  misc_feature (1)..(391): NCBI GI: 116195588 Blast Desc: conserved [Chaetomium globosum CBS 148.51] gi|88180305|gb|EAQ87773.1| conserved [Chaetomium globosum CBS 148.51]
  misc_feature (1)..(387): NCBI GI: 170940206 Blast Desc: protein product [Podospora anserina]
  misc_feature (1)..(391): NCBI GI: 85106198 Blast Desc: GPI-anchor transamidase precursor [Neurospora crassa OR74A] gi|28923709|gb|EAA32877.1| GPI-anchor transamidase precursor [Neurospora crassa OR74A]
  misc_feature (1)..(387): NCBI GI: 256727616 Blast Desc: [Nectria haematococca mpVI 77-13-4]
  misc_feature (25)..(387): NCBI GI: 46136239 Blast Desc: FG09635.1 [Gibberella zeae PH-1]
  misc_feature (1)..(389): NCBI GI: 154293832 Blast Desc: BC1G_14244 [Botryotinia fuckeliana B05.10] gi|150845217|gb|EDN20410.1| BC1G_14244 [Botryotinia fuckeliana B05.10]
  misc_feature (25)..(386): NCBI GI: 39969761 Blast Desc: MGG_10490 [Magnaporthe grisea 70-15] gi|145012083|gb|EDJ96739.1| MGG_10490 [Magnaporthe grisea 70-15]
  misc_feature (22)..(388): NCBI GI: 169606554 Blast Desc: SNOG_06320 [Phaeosphaeria nodorum SN15] gi|111065031|gb|EAT86151.1| SNOG_06320 [Phaeosphaeria nodorum SN15]
  misc_feature (1)..(376): NCBI GI: 189192979 Blast Desc: GPI-anchor transamidase precursor [Pyrenophora tritici-repentis Pt-1C-BFP] gi|187978392|gb|EDU45018.1| GPI-anchor transamidase precursor [Pyrenophora tritici-repentis
  misc_feature (9)..(386): NCBI GI: 67517187 Blast Desc: AN0871.2 [Aspergillus nidulans FGSC A4] gi|40746744|gb|EAA65900.1| AN0871.2 [Aspergillus nidulans FGSC A4] gi|259488844|tpe|CBF88621.1| TPA: GPI anchor transamidase,
  misc_feature (29)..(289): SWISSPROT Homolog: EC 3.4.22.34 Legumain
  misc_feature: Useful for introducing or modulating the production of volatile compounds
MRLSRILQLPVLLASALLAPNVCAEHTSNWAVLVGTSRFWFNYRHLANVLSMYRTVKRLGIPDSQIILMLPDDMACNPRNAFPGTVYSNSDRAVDLYGDNIEVDYRGYEVTVENFIRLLTDRVGDEMPRSKRLLTDDRSNIFVYMTGHGGNEFLKFQDAEEIGAFDLADAFEQMWEKRRYHEILFMIDTCQANTMYSKLYSPNIIATGSSELDQSSYSHHADNDVGVAVIDRYTYYNLEFLEHEVRDLGSKKTIGDLFDSYSYEKIHSHAGVRYDLFQGGADVARSRLLTDFFGNIQNVEVDGNKNSTMDEEMVTLSRTIAQLRRLADEEEMKPSNATEPTKVESRPHKKIQLASSLKDDSWWSKKLIGATTLGGCAALWTLGSYLESSRR

SEQ ID NO: 28498 - DNA, 2630 bp, Muscodor strobelii
  misc_feature: SGI EST ID NO. CUFF.67157.0
  misc_feature: Variant of the nucleotide sequence at SEQ ID NO 28496
ccgctagcgtcgcgctagcattaccagtgaggggagaaatgaggtacccaagtaccagtccagaaggctaaacaatccccctggctctgtcatcgtgtgttcctccagggcagcgacgtgtctcagggtcgccagtagccattgcctcatcacatttccaccactgctgattgttgtctacgaagcgttgatgttgttaattttcctattgttcctagatatccttatggggattagtcctaactatcttcatcttctgattgctactccggataccgccacctcgtattacatctctcctaaacttcccattcgagtcgagccgcacctctctcacacttaacgatttcgacgaactcaaagcgacgtcggagcatccgccggctatgagactctccagaatattgcagctgcctgtgctgctggcatcggcattactcgccccgaatgtttgcgccgagcacacgagcaactgggccgttttggttggcacctcgaggttctggtttaattatcgtcatctagccaacgtcctgtccatgtaccgcaccgtcaagcgcctcggcatccccgactcccagatcatcctcatgctccccgatgacatggcttgcaacccgcgtaacgcctttccaggcaccgtctacagtaattccgatcgcgccgtcgacctgtacggcgacaacatcgaagtcgactaccggggctacgaggtcaccgtcgagaatttcatccgcctgttgactgaccgtgtcggcgacgagatgccccgaagcaagcgcctgctgactgacgaccggagcaacatctttgtgtacatgactggtcacggtggtaatgaattcttgaaatttcaggacgcagaggagattggtgcattcgacttggccgatgcctttgagcagatgtgggagaagaggagatatcacgagattctttttatgatcgatacctgtcaggcaaacaccatgtacagcaaactttattcgcctaacatcattgccaccggttcgtcagaactcgaccagtcgtcatactctcatcacgccgataacgacgtcggtgtcgctgtcattgaccgctacacatactacaacctcgagttcctcgagcacgaagtcagagacctaggcagtaagaagaccattggcgacctcttcgacagctattcgtacgagaaaattcattctcacgctggcgtgagatatgatttgttccagggtggcgcagatgtcgcccgcagtcgattgttgactgactttttcggaaatatccaaaatgtcgaggtggatggtaacaaaaactcgacaatggatgaagagatggtgactctcagccgtactattgcacagctgcgccggttagcagacgaggaagagatgaagcctagcaatgctactgaacctacaaaggttgagtctcgaccacacaagaagatacagctagccagctctctcaaggacgatagctggtggagcaaaaagctcattggcgcaacaaccttgggcggctgtgctgcgctctggactctcggctcttatttagaaagctcgaggaggtagaaatggcgtcgtagtagattgtaagaatgaactacggaaaacttgcatacatattatttgtccttgctgaggatatgactataaagtactaataaagcttaaggtcacattgtaatgaatttgtaccaaaggaagggtgtaagatcggataaaggagtataaggcttccaggtacacaaccgagaaatcaaacgctattgacggtttgtacataagatcaggtcctagaggctcaattgtgtcagatcaaggagcgtataatgatactacagcccgatatcagaaagcgcccgaaacatggttcggtgagactatcgctcttgtattaattcacaggtcaggcgtgttcgcctaggctgttgccagtgtgatgaagatttcaaggtcggtcaatcggggcaatttccactttacagaacctagcaccatcaactttgcgagacgcaagtagtagggcctaggcgaagtctgtagaagactgcttgcatatccgtaatttaagtatccatcatgtgtttcggtcaatgagacgaaccagtatgcaatcgatccaatacatcttcactcgtctgtagcttattagtattgcaggtaattcatcaattcgaccatggtcaatgagttgaactattcctctctctgatgagtgtggtgctgtttgtcggcgtccaggcttcgggattatcgcaatctatgatctgagtggcccaccctgaagacgcctcaactcaacaagtcgtcgtcgcaacacctcatcagccctaggggcagttcatcctgcctgggatgcagcctcttgtcgatttttgtggcataactcacatcgttgactgagcgctatggcggtactaagcccagacaacgcgcttcctctagaagcgtttgatctgtccctgcttccacgagtcggacacaatatcgcgtggtcgcccgatgctgaactggctgttgcagcggacgattgtgtgctaattttcgttcctaatttctcaacacggcccaaacagagaagtgaccggccaacatatgagggaccgcgccagtacaacgaggttacacttcgcttcc

SEQ ID NO: 28499 - DNA, 2037 bp, Muscodor strobelii
  misc_feature: SGI cDNA ID NO. 569777
  misc_feature: Encodes the peptide sequence at SEQ ID NO 28500
atggcggtactaagcccagacaacgcgcttcctctagaagcgtttgatctgtccctgcttccacgagtcggacacaatatcgcgtggtcgcccgatgctgaactggctgttgcagcggacgattgtgtgctaattttcgttcctaatttctcaacacggcccaaacagagaagtgaccggccaacatatgagggaccgcgccagtacaacgaggttacacttcgcttccctgtctccccactaaagcatgtcgagctaaatcgccatctatttgaggccgtggatgaagaatttgatggatttaagtacttcacaggagccggaaatggcgcggccagtggtaatggtagtaccatgaaccatgctgtcgctctagaatggtcaccaaccagcctgggccgcacaagccggtctgttctagctgtgctcacagccgctggcattatcacgatctactgtctagaggcctacggtggaaaagagtacatcaaagcattttcgtgggcaacagacaccgatgatgactttgccctgctgtcatatatgaatactgatgatgagatcgttatcctgtcggttcggtgtaagcatgacctcaaagccgatccagcgcatccaggaaagtggagggtcgtagaggtcgctcgattcatggtagaagggccgcatccaaaggttgatcctacagatcccgactatacgtcgagcagttcctcctttggacttagctggagtccttggctcaagggtctgacaaaacgtggtatcatatcatacgtttcccataaccacgttggattcaggcaaatctcagtgacgcatagaaggctgaagtctgaggacccgacggtagacgtaaatgaagatgatattagcggaatctgtcttcacctaagccccgatgccttcgttgtttgggaggacttggtctggactattggcaactccaaaatctgccgagggatcattgcaacacccataagagtgcaagcatttgaggtcccgttcgacggcacttcctctgttcccccacactcgacagatagatgtgacactacgtacccccaagaagatgatgtggcctacaccaataaccctattaccgggcttatcattcatccgccttctttgtcgcagaacacaacggcaccatcatactctttagttcgtctctctgcaacacaccaaaacacgtcatggcatcaaacgaatctccccctaccagccaatcctgaggatcctgacagtcaggttcgttgggctaccgaaatcagtcaaataattgagcgtcgacttccacgagcccttgctcatcagacaagaagtgaaggtagtggtggagacacctcatctaatgaggaggaatctgatagcgagcttgacgacgactctgaccctgattcggattccgaaactaagagtgaaatcctggaaatgagtggcatggatttgtcagaacaagtttatgtggaccgagtacgtatatggggcctcacgaccagtcctggtggaggcatcaccgccgtttttatttctatacacagtaccatcgacttggaaaaagacaagtcagcaggtcacaaatgccgtatcctatttggcacacatagtcgccctggaggcaaggatgacattgtgatgacgaaagatctaagcacagaagccaaagcttgggagtggttatatggcggtggccctcctgtagccgggcttagtgagctcgctgctgagaatggtgccgaagtgaagagtgtctttgagacaacagcttccaaccaagtctgcacattctgcgggtcgccccttgctcccaaagacgacttatgggtatgcgctaatggccatgcctttgagcgatgtgccaatacaggcgtccctattttggccccaaatatttccaatgtctgcggcgtctgcgggttgaagtgtctcgagcgggacacgcttatggagatggctcctcttctggcaagcatcatcaagcagagtatttcaactgacacgtgtggcgcttgcggtggaaagttgttggtctaa

SEQ ID NO: 28500 - protein, 678 aa, Muscodor strobelii
  misc_feature: SGI Peptide ID NO. 569777
  misc_feature (11)..(677): NCBI GI: 46136241 Blast Desc: FG09636.1 [Gibberella zeae PH-1]
  misc_feature (106)..(677): NCBI GI: 170940205 Blast Desc: protein product [Podospora anserina]
  misc_feature (8)..(602): NCBI GI: 145603970 Blast Desc: MGG_10491 [Magnaporthe grisea 70-15] gi|145012082|gb|EDJ96738.1| MGG_10491 [Magnaporthe grisea 70-15]
  misc_feature (106)..(649): NCBI GI: 85106203 Blast Desc: NCU07260 [Neurospora crassa OR74A] gi|28923710|gb|EAA32878.1| [Neurospora crassa OR74A]
  misc_feature (10)..(325): NCBI GI: 116195586 Blast Desc: CHGG_04391 [Chaetomium globosum CBS 148.51] gi|88180304|gb|EAQ87772.1| CHGG_04391 [Chaetomium globosum CBS 148.51]
  misc_feature (364)..(678): NCBI GI: 261352456 Blast Desc: conserved [Verticillium albo-atrum VaMs.102]
  misc_feature (11)..(369): NCBI GI: 256727615 Blast Desc: NECHADRAFT_99299 [Nectria haematococca mpVI 77-13-4]
  misc_feature (7)..(226): NCBI GI: 261352457 Blast Desc: conserved [Verticillium albo-atrum VaMs.102]
  misc_feature (461)..(654): NCBI GI: 116195586 Blast Desc: CHGG_04391 [Chaetomium globosum CBS 148.51] gi|88180304|gb|EAQ87772.1| CHGG_04391 [Chaetomium globosum CBS 148.51]
  misc_feature (10)..(194): NCBI GI: 239610361 Blast Desc: conserved [Ajellomyces dermatitidis ER-3]
MAVLSPDNALPLEAFDLSLLPRVGHNIAWSPDAELAVAADDCVLIFVPNFSTRPKQRSDRPTYEGPRQYNEVTLRFPVSPLKHVELNRHLFEAVDEEFDGFKYFTGAGNGAASGNGSTMNHAVALEWSPTSLGRTSRSVLAVLTAAGIITIYCLEAYGGKEYIKAFSWATDTDDDFALLSYMNTDDEIVILSVRCKHDLKADPAHPGKWRVVEVARFMVEGPHPKVDPTDPDYTSSSSSFGLSWSPWLKGLTKRGIISYVSHNHVGFRQISVTHRRLKSEDPTVDVNEDDISGICLHLSPDAFVVWEDLVWTIGNSKICRGIIATPIRVQAFEVPFDGTSSVPPHSTDRCDTTYPQEDDVAYTNNPITGLIIHPPSLSQNTTAPSYSLVRLSATHQNTSWHQTNLPLPANPEDPDSQVRWATEISQIIERRLPRALAHQTRSEGSGGDTSSNEEESDSELDDDSDPDSDSETKSEILEMSGMDLSEQVYVDRVRIWGLTTSPGGGITAVFISIHSTIDLEKDKSAGHKCRILFGTHSRPGGKDDIVMTKDLSTEAKAWEWLYGGGPPVAGLSELAAENGAEVKSVFETTASNQVCTFCGSPLAPKDDLWVCANGHAFERCANTGVPILAPNISNVCGVCGLKCLERDTLMEMAPLLASIIKQSISTDTCGACGGKLLV

SEQ ID NO: 28501 - DNA, 1857 bp, Muscodor strobelii
  misc_feature: SGI EST ID NO. CUFF.67164.0
  misc_feature: Variant of the nucleotide sequence at SEQ ID NO 28499
agtacatcaaagcattttcgtgggcaacagacaccgatgatgactttgccctgctgtcatatatgaatactgatgatgagatcgttatcctgtcggttcggtgtaagcatgacctcaaagccgatccagcgcatccaggaaagtggagggtcgtagaggtcgctcgattcatggtagaagggccgcatccaaaggttgatcctacagatcccgactatacgtcgagcagttcctcctttggacttagctggagtccttggctcaagggtctgacaaaacgtggtatcatatcatacgtttcccataaccacgttggattcaggcaaatctcagtgacgcatagaaggctgaagtctgaggacccgacggtagacgtaaatgaagatgatattagcggaatctgtcttcacctaagccccgatgccttcgttgtttgggaggacttggtctggactattggcaactccaaaatctgccgagggatcattgcaacacccataagagtgcaagcatttgaggtcccgttcgacggcacttcctctgttcccccacactcgacagatagatgtgacactacgtacccccaagaagatgatgtggcctacaccaataaccctattaccgggcttatcattcatccgccttctttgtcgcagaacacaacggcaccatcatactctttagttcgtctctctgcaacacaccaaaacacgtcatggcatcaaacgaatctccccctaccagccaatcctgaggatcctgacagtcaggttcgttgggctaccgaaatcagtcaaataattgagcgtcgacttccacgagcccttgctcatcagacaagaagtgaaggtagtggtggagacacctcatctaatgaggaggaatctgatagcgagcttgacgacgactctgaccctgattcggattccgaaactaagagtgaaatcctggaaatgagtggcatggatttgtcagaacaagtttatgtggaccgagtacgtatatggggcctcacgaccagtcctggtggaggcatcaccgccgtttttatttctatacacagtaccatcgacttggaaaaagacaagtcagcaggtcacaaatgccgtatcctatttggcacacatagtcgccctggaggcaaggatgacattgtgatgacgaaagatctaagcacagaagccaaagcttgggagtggttatatggcggtggccctcctgtagccgggcttagtgagctcgctgctgagaatggtgccgaagtgaagagtgtctttgagacaacagcttccaaccaagtctgcacattctgcgggtcgccccttgctcccaaagacgacttatgggtatgcgctaatggccatgcctttgagcgatgtgccaatacaggcgtccctattttggccccaaatatttccaatgtctgcggcgtctgcgggttgaagtgtctcgagcgggacacgcttatggagatggctcctcttctggcaagcatcatcaagcagagtatttcaactgacacgtgtggcgcttgcggtggaaagttgttggtctaagggaagaccaagccgtggatggacgttgaacagaccctctctttgcgggtgagtaaacgcagccgtacaaatagcccggcataacgaaattacacgtacaaacaaactaaaacagaatacctccaaatggacaataatcatacctaattcaaccggaactgcgatgttttcagctccgtctccataagcagaacatttctctcgatagctcaatgattttcctttccagaggataaggatggagctgaattgaaatccagcattgcaccatgatgtatattcatcggcccagttgaagttg

SEQ ID NO: 28502 - DNA, 861 bp, Muscodor strobelii
  misc_feature: SGI cDNA ID NO. 569778
  misc_feature: Encodes the peptide sequence at SEQ ID NO 28503
atgatttggtctcttagtctgtggtttttcgccacaattgcaattgccaaatgcgtaccgtcaaacccggcctcaatcgagctcttcatcgatttcgatggtactattgttacctccgatgcatatacaacattagctacagcagcatatgccacacttccgaaaaatagttcagtccttccctgggacgagatcgaagaaacctacgaggagcgtgccaatgctgcggccgccgcggtacctacaccgacatctctggcatcagccattgcgtacgcgaacgataaatcgctccgtgacgtggaagtgtggtctttcaactgggtcaaaggaatgggactcttcgagacagcccaagcccacgaattagtgaaattcgctcgcaatcaaacactacgcgacgggtggtgttcatttgcacaaacggccgaagaaaacggtgtccacatcaatgttgtaagcctcaactggtcaccgtcttggatccggcttgtgttggaggaagcttccggatgcgctgaagtcgtcccgcaagtctcgatttattgtcctgagatattgccgcgtggagttcttcccgtctctagtttgaatcacaatgtctcgcttttctcgggcggtgacaagacgaagcttatcagaaggctgttgaaggatgttccggcaccgcagaaagtagtttttgtctctgatagtgacgctgatctcgatccgctttgggatggtccgacgaatgttgggatcgttgctggatatgagaagagcgccgcccagacattcgaagagtatggggttagtatttggaaggccgctgaaggttggaaagggtttacgggtgctgagaacaacgctgtgtggtaa

SEQ ID NO: 28503 - protein, 286 aa, Muscodor strobelii
  misc_feature: SGI Peptide ID NO. 569778
  misc_feature (9)..(256): NCBI GI: 171684569 Blast Desc: protein product [Podospora anserina] gi|170942245|emb|CAP67897.1| protein product [Podospora anserina]
  misc_feature (31)..(270): NCBI GI: 190345435 Blast Desc: PGUG_01416 [Pichia guilliermondii ATCC 6260]
  misc_feature (31)..(270): NCBI GI: 146419568 Blast Desc: PGUG_01416 [Pichia guilliermondii ATCC 6260]
  misc_feature (28)..(272): NCBI GI: 50550935 Blast Desc: YALI0D17468p [Yarrowia lipolytica] gi|49648809|emb|CAG81133.1| YALI0D17468p [Yarrowia lipolytica]
  misc_feature (28)..(166): NCBI GI: 261357314 Blast Desc: conserved [Verticillium albo-atrum VaMs.102]
  misc_feature (27)..(255): NCBI GI: 156036418 Blast Desc: SS1G_12898 [Sclerotinia sclerotiorum 1980] gi|154698303|gb|EDN98041.1| SS1G_12898 [Sclerotinia sclerotiorum 1980]
  misc_feature (30)..(251): NCBI GI: 50424155 Blast Desc: DEHA0F07777g [Debaryomyces hansenii CBS767] gi|49656333|emb|CAG88998.1| DEHA2F07062p [Debaryomyces hansenii]
  misc_feature (5)..(266): NCBI GI: 255561995 Blast Desc: conserved [Ricinus communis] gi|223538810|gb|EEF40410.1| conserved [Ricinus communis]
  misc_feature (27)..(276): NCBI GI: 164427515 Blast Desc: NCU11240 [Neurospora crassa OR74A] gi|157071775|gb|EDO65299.1| [Neurospora crassa OR74A]
  misc_feature (31)..(236): NCBI GI: 255720342 Blast Desc: KLTH0H13684p [Lachancea thermotolerans] gi|238942417|emb|CAR30589.1| KLTH0H13684p [Lachancea thermotolerans]
MIWSLSLWFFATIAIAKCVPSNPASIELFIDFDGTIVTSDAYTTLATAAYATLPKNSSVLPWDEIEETYEERANAAAAAVPTPTSLASAIAYANDKSLRDVEVWSFNWVKGMGLFETAQAHELVKFARNQTLRDGWCSFAQTAEENGVHINVVSLNWSPSWIRLVLEEASGCAEVVPQVSIYCPEILPRGVLPVSSLNHNVSLFSGGDKTKLIRRLLKDVPAPQKVVFVSDSDADLDPLWDGPTNVGIVAGYEKSAAQTFEEYGVSIWKAAEGWKGFTGAENNAVW

SEQ ID NO: 28504 - DNA, 4294 bp, Muscodor strobelii
  misc_feature: SGI EST ID NO. CUFF.67227.0
  misc_feature: Variant of the nucleotide sequence at SEQ ID NO 28502
gacgccagcgtgttaacacattgaaagaagcaaaccacttgatgaatatcgtgaggttttcatgtgtttcgacaaatagcgtaatttagagcattttcgacaatggcgatgccggcacaggtttccaccttggcgatggcgctaatgagacaaattccgaaaattaaatcaccacaacttaccattattgtaataatttctgagaaaacaataacccaattatattaattccacttcgactttgaaccgtcttcactatgatttggtctcttagtctgtggtttttcgccacaattgcaattgccaaatgcgtaccgtcaaacccggcctcaatcgagctcttcatcgatttcgatggtactattgttacctccgatgcatatacaacattagctacagcagcatatgccacacttccgaaaaatagttcagtccttccctgggacgagatcgaagaaacctacgaggagcgtgccaatgctgcggccgccgcggtacctacaccgacatctctggcatcagccattgcgtacgcgaacgataaatcgctccgtgacgtggaagtgtggtctttcaactgggtcaaaggaatgggactcttcgagacagcccaagcccacgaattagtgaaattcgctcgcaatcaaacactacgcgacgggtggtgttcatttgcacaaacggccgaagaaaacggtgtccacatcaatgttgtaagcctcaactggtcaccgtcttggatccggcttgtgttggaggaagcttccggatgcgctgaagtcgtcccgcaagtctcgatttattgtcctgagatattgccgcgtggagttcttcccgtctctagtttgaatcacaatgtctcgcttttctcgggcggtgacaagacgaagcttatcagaaggctgttgaaggatgttccggcaccgcagaaagtagtttttgtctctgatagtgacgctgatctcgatccgctttgggatggtccgacgaatgttgggatcgttgctggatatgagaagagcgccgcccagacattcgaagagtatggggttagtatttggaaggccgctgaaggttggaaagggtttacgggtgctgagaacaacgctgtgtggtaagtagcgtcgtgacgatcatctccttcgttgtttacgttgaacatccacggcctcgacgctaacttaatgtctagtaagtcaaggcgaatcattttagatccgtgaaaagaatagctaaaatccgggccccttaaccttacgatataagacagctaacacgtaatttcttacctcattagatggattcgagagctgggttgatgttgcgaaactgttatggaagagttcatgagcgtaagagtacccaagatatcgcggatcatctgagtaaatacattgcatccgttcaggtctttagcttatagcttcacggtaccgctgccttttttctctatcgggccttatgaccggaaagatcgcctgatttctaatattctgggtagaccagtatattcacgaaataacctagattcagtaacgtttgagtggctcttcgaataagaacatcccgcctaatcttttctctctcgtccgcctcaagcgtgatgcattcaataatatctcatcgtgaggtgagcggaatgacttatggcaagttatcaggtgataattcagatccagaccaggggcttcggcacgttttaaaagaagggtattttctaagttggcgattccgattccgattccgaatttcgattctaaatgccagcgtccgtacttaagttatcatattttatgagccataccctcacaaccttggagggtccaaatttggtggtgcatcattgccttcaacaagatctgaacatggagtactgtattccgtagggtgaaacgaatgaactcgtttgtaattgtcagctaaaggcaggcacatgctttgttctttgctaacgatcgggagacggtcggtgcacggacagccacgggcttgggtaagaagagcttccggcgtgctggaatgccgaatgtagccactccactaacctcggtatcgacctgcacaagccttacccgtaggaggctgtccctgcatccctgctggcccggatattttcgcgtcaagggcggcttcagtattatatctcacatggtgatttcaagattattatacgataattttatatttccacttgcccgagcctcgaagaactcgaaaagcacttggaattatatcgcgcgctatacccaacctgcgttaacccatcagctttgaacagagaagtagtccaattctctgatcgcaacgatggtaacagtatcgaaaacaacgccccgtcaatcgttgacggtggttgataaccgcaccaacaagatttatgagtttccaatctctaataacgccatccaagcgactgacttcaagaagatcagagcccagcgaggcaatgatcgtgaagaggatgagacggagcaagggttgagggtttatgacgcagggtatctaaagtacgtatacttctcaggtcatgtccaagtatcggatctccattctatcgtggagagggcaagaataagcgacatgttcagtacactgacaggttaatacctatttagcacagccgtggtacagagtaagatcacatacatcaacggtcaagatggcgtgctacgttatcgaggatatccaattgagcaactcgtcaagaagagcaatttcttagaatcagccttcctgctgatttacggagagttgccgacaacgtcacagtatcaaacatggtcaaatgaagtcatgcatcacacttacatccacagtgacatcgagggcatgttcaagtcgtttcgctatgattctcatcctatgtccatgctgtcttctgcttttgcaacattaggagcgtttgcgcccgaggccaacccttctctccaaggccaaaagctttacacaaatgccgcgtctggagatattgcttcgctgcaaatgttagataaacagattctacggatcatcggtaaagcaccgacgctagcagcagcatcatatcggatgagacaaggccgacctttcaaccgcccagctcaaggtctatcttatactggcaactttttgtacctgctggatcatctctcaggcacggaatacagaccgcatcctgtgctagagaaagctcttgacgcacttttcatcattcacgctgaccacgaggtcaactgctcaactgcaactgttttgcaagttggtagctcgctagtcgatccgtatagcgttgtttcagctggctgtgctgctctttatggtccttctcatggcggagcttccgaaagtgctatacgcatgctgatggagatcggttcacctgagaacgtggtacgtgtatagattatcccgtgacgtacttcaaattgtcagttctaaaagatctaacgctaacaaaggtgatagtgagtgatcctctatttcggagaaaagacttgaaatgggccgggacactctgaaccgcagcaatttggccaacccgactaacatatcttgataccttaggccatcattcatggagaaggttgaacggcgagagcgtgtgctggtaggctttggccatcgtgtctacaaaaacgtggatccacgatcaacggcaatcaaaacactagccgaagaagtgttccaggtcacaggtcgtaacaaacttctcgacacggcgctgacgctcgccgactatgcgcgcaaaagtgaattcatgcgcagtagaaatctatatccgaacgtggatttctattcaggactaatttaccaggccatgggatttccgctagatttttatcccgtgctatttgcggtccctcgctgtgttggttggctggcgcattggcgccagatgatgttgaacaagtcaggcgttaagatctggcggccacgacagttatatattggcgagggagagcgccaatatgtggacgcctcacagcgtcgagagaaaccgaacgcgtcagtgtttgatacgccagtaactggtctgcatggagacgatagcaaaaggaatgagcttgcgacctacaaagatgagactggagtgaaatggggcagggcgaagttgtaacattgtgtagggaataggtgtgtttgtatcattcttatgtaaatacaagtctatatagacttccagaacggagttgtgcatgtagctcgtttggctgaaggacgtggtaatttctcctctgattctgagcattacttttaaagtattgagacttactagtattagtctttgcaacttttgtatcacaatcactgtgac

SEQ ID NO: 28505 - DNA, 1479 bp, Muscodor strobelii
  misc_feature: SGI cDNA ID NO. 569779
  misc_feature: Encodes the peptide sequence at SEQ ID NO 28506
atggtaacagtatcgaaaacaacgccccgtcaatcgttgacggtggttgataaccgcaccaacaagatttatgagtttccaatctctaataacgccatccaagcgactgacttcaagaagatcagagcccagcgaggcaatgatcgtgaagaggatgagacggagcaagggttgagggtttatgacgcaggcacagccgtggtacagagtaagatcacatacatcaacggtcaagatggcgtgctacgttatcgaggatatccaattgagcaactcgtcaagaagagcaatttcttagaatcagccttcctgctgatttacggagagttgccgacaacgtcacagtatcaaacatggtcaaatgaagtcatgcatcacacttacatccacagtgacatcgagggcatgttcaagtcgtttcgctatgattctcatcctatgtccatgctgtcttctgcttttgcaacattaggagcgtttgcgcccgaggccaacccttctctccaaggccaaaagctttacacaaatgccgcgtctggagatattgcttcgctgcaaatgttagataaacagattctacggatcatcggtaaagcaccgacgctagcagcagcatcatatcggatgagacaaggccgacctttcaaccgcccagctcaaggtctatcttatactggcaactttttgtacctgctggatcatctctcaggcacggaatacagaccgcatcctgtgctagagaaagctcttgacgcacttttcatcattcacgctgaccacgaggtcaactgctcaactgcaactgttttgcaagttggtagctcgctagtcgatccgtatagcgttgtttcagctggctgtgctgctctttatggtccttctcatggcggagcttccgaaagtgctatacgcatgctgatggagatcggttcacctgagaacgtggttgaacggcgagagcgtgtgctggtaggctttggccatcgtgtctacaaaaacgtggatccacgatcaacggcaatcaaaacactagccgaagaagtgttccaggtcacaggtcgtaacaaacttctcgacacggcgctgacgctcgccgactatgcgcgcaaaagtgaattcatgcgcagtagaaatctatatccgaacgtggatttctattcaggactaatttaccaggccatgggatttccgctagatttttatcccgtgctatttgcggtccctcgctgtgttggttggctggcgcattggcgccagatgatgttgaacaagtcaggcgttaagatctggcggccacgacagttatatattggcgagggagagcgccaatatgtggacgcctcacagcgtcgagagaaaccgaacgcgtcagtgtttgatacgccagtaactggtctgcatggagacgatagcaaaaggaatgagcttgcgacctacaaagatgagactggagtgaaatggggcagggcgaagttgtaa

SEQ ID NO: 28506 - protein, 492 aa, Muscodor strobelii
  misc_feature: SGI Peptide ID NO. 569779
  misc_feature (57)..(432): Pfam Id: PF00285 Pfam Desc: Citrate synthase
  misc_feature (63)..(432): Pfam Id: PF00285 Pfam Desc: Citrate synthase
  misc_feature (1)..(482): NCBI GI: 46110941 Blast Desc: FG02352.1 [Gibberella zeae PH-1]
  misc_feature (2)..(478): NCBI GI: 256727989 Blast Desc: [Nectria haematococca mpVI 77-13-4]
  misc_feature (12)..(456): NCBI GI: 170099291 Blast Desc: peroxysomal citrate synthase [Laccaria bicolor S238N-H82] gi|164644389|gb|EDR08639.1| peroxysomal citrate synthase [Laccaria bicolor S238N-H82]
  misc_feature (2)..(450): NCBI GI: 281204740 Blast Desc: citrate synthase [Polysphondylium pallidum PN500]
  misc_feature (7)..(450): NCBI GI: 284082539 Blast Desc: citrate synthase family member [Naegleria gruberi]
  misc_feature (5)..(481): NCBI GI: 66818329 Blast Desc: citrate synthase [Dictyostelium discoideum AX4] gi|74926760|sp|Q86AV6.1|CISYC_DICDI RecName: Full=Citrate synthase gi|60471014|gb|EAL68984.1| citrate synthase discoideum
  misc_feature (4)..(450): NCBI GI: 66828483 Blast Desc: citrate synthase [Dictyostelium discoideum AX4] gi|74932429|sp|Q8MQU6.1|CISYP_DICDI RecName: Full=Citrate synthase, peroxisomal; Flags: Precursor citrate synthase citrate
  misc_feature (4)..(450): NCBI GI: 281212270 Blast Desc: citrate synthase [Polysphondylium pallidum PN500]
  misc_feature (2)..(452): NCBI GI: 118363330 Blast Desc: citrate synthase I family protein [Tetrahymena thermophila] gi|89296657|gb|EAR94645.1| citrate synthase I family protein [Tetrahymena thermophila SB210]
  misc_feature (2)..(452): NCBI GI: 39930179 Blast Desc: citrate synthase [Tetrahymena thermophila]
  misc_feature (5)..(481): SWISSPROT Homolog: EC 2.3.3.1 Citrate (Si)-synthase
MVTVSKTTPRQSLTVVDNRTNKIYEFPISNNAIQATDFKKIRAQRGNDREEDETEQGLRVYDAGTAVVQSKITYINGQDGVLRYRGYPIEQLVKKSNFLESAFLLIYGELPTTSQYQTWSNEVMHHTYIHSDIEGMFKSFRYDSHPMSMLSSAFATLGAFAPEANPSLQGQKLYTNAASGDIASLQMLDKQILRIIGKAPTLAAASYRMRQGRPFNRPAQGLSYTGNFLYLLDHLSGTEYRPHPVLEKALDALFIIHADHEVNCSTATVLQVGSSLVDPYSVVSAGCAALYGPSHGGASESAIRMLMEIGSPENVVERRERVLVGFGHRVYKNVDPRSTAIKTLAEEVFQVTGRNKLLDTALTLADYARKSEFMRSRNLYPNVDFYSGLIYQAMGFPLDFYPVLFAVPRCVGWLAHWRQMMLNKSGVKIWRPRQLYIGEGERQYVDASQRREKPNASVFDTPVTGLHGDDSKRNELATYKDETGVKWGRAKL

SEQ ID NO: 28507 - DNA, 4294 bp, Muscodor strobelii; identical to SEQ ID NO: 28504
  misc_feature: SGI EST ID NO. CUFF.67227.0
  misc_feature: Variant of the nucleotide sequence at SEQ ID NO 28505

SEQ ID NO: 28508 - DNA, 1206 bp, Muscodor strobelii
  misc_feature: SGI cDNA ID NO. 569780
  misc_feature: Reduced expression when VOC is produced
  misc_feature: Encodes the peptide sequence at SEQ ID NO 28509
atgcctgctttaaacctccccccaagccattttcgggttctgattgctggtggctgttattcgggtcttgctgccgccattcaactccaagaactatgtgatacaatagaatcacctgtgtccgtggaaatagtcattgttgacgaaaaggacgggttttaccatgtcatcggttcgccgcttgcgttgtcttcgaaacagtattcagagaaagcatgggtccaatataaggatgtcaaagtgttgcagcgcccaaatgtcacttttgtacaaggctctctcacccacgtcgactgcgagaacaaagtggccacgatctcactcggcaagacacaaaaaaagaggctcgagagctatgactttttcgtcgcgggtacaggtttacgaagggcatggccggttgtaccccaggccttgattcgagatgaatacctggctgaggcagaggaacacataagcaaagtcatcaacagtactgctccagtccttgtcgtaggtggaggtgcagtaggaatcgagatggctgcggagttgaagctggttcagccagatgttcaagtaacattggcgcattccagggacaagttgctatctgctgagccgctaccagatatggtcaaagaatgtgctctggaacttgtagaagagagtggtgtggatgtgcttctgaatcatcgtcttgcaagtagcacacctatcgagactgccgacggatcgcaggtttacgaggttgaatttaccaatggtcacaaaatggtcgctagcgagattatagtggcaatttccaagagcgttcccacttcgacttatttgcctcaggatgccctcgacgaggaaggctacgtcaatatacgcccaacactccagatgcccacgtgcgtccccaatgccgattcgcacttcgccatcggtgacttggtgcactggtctggaatcaagcggtgtggtggagcgatgcaccaaggcaaactgtctagtgtaaatatgcaccaaatcatgttacagcaagtaaggggaaaggagcccgtcttcgaaactcttaacgaagtcccacctatgattggccttgccgtcggcaagaatggcctcgcatatgggccggatggcatgaagtcgggccctcaagttatgcaagtattttttgagaacgatttaggtttccggattgtttgggattaccttcgtcttggaggtgttacggcatag

SEQ ID NO: 28509 - protein, 401 aa, Muscodor strobelii
  misc_feature: SGI Peptide ID NO. 569780
  misc_feature (161)..(262): Pfam Id: PF00070 Pfam Desc: Pyridine nucleotide-disulphide oxidoreductase
  misc_feature (161)..(261): Pfam Id: PF00070 Pfam Desc: Pyridine nucleotide-disulphide oxidoreductase
  misc_feature (12)..(398): NCBI GI: 256729427 Blast Desc: NECHADRAFT_95702 [Nectria haematococca mpVI 77-13-4]
  misc_feature (12)..(398): NCBI GI: 46116986 Blast Desc: FG04335.1 [Gibberella zeae PH-1]
  misc_feature (9)..(398): NCBI GI: 39946442 Blast Desc: MGG_08290 [Magnaporthe grisea 70-15] gi|145020066|gb|EDK04294.1| MGG_08290 [Magnaporthe grisea 70-15]
  misc_feature (4)..(398): NCBI GI: 85094110 Blast Desc: NCU06061 [Neurospora crassa OR74A] gi|28921279|gb|EAA30588.1| conserved [Neurospora crassa OR74A]
  misc_feature (7)..(397): NCBI GI: 226283649 Blast Desc: conserved [Paracoccidioides brasiliensis Pb01]
  misc_feature (11)..(395): NCBI GI: 116200718 Blast Desc: CHGG_10904 [Chaetomium globosum CBS 148.51] gi|88175618|gb|EAQ83086.1| CHGG_10904 [Chaetomium globosum CBS 148.51]
  misc_feature (11)..(396): NCBI GI: 146322686 Blast Desc: pyridine nucleotide-disulphide oxidoreductase AMID-like, [Aspergillus fumigatus Af293] gi|129557791|gb|EAL91048.2| pyridine nucleotide-disulphide Af293]
  misc_feature (11)..(396): NCBI GI: 159131822 Blast Desc: pyridine nucleotide-disulphide oxidoreductase, [Aspergillus fumigatus A1163]
  misc_feature (7)..(397): NCBI GI: 225683223 Blast Desc: conserved [Paracoccidioides brasiliensis Pb03]
  misc_feature (11)..(396): NCBI GI: 119494287 Blast Desc: pyridine nucleotide-disulphide oxidoreductase, [Neosartorya fischeri NRRL 181] gi|119412201|gb|EAW22142.1| pyridine nucleotide-disulphide oxidoreductase, [Neosartorya NRRL
  misc_feature: Useful for introducing or modulating the production of volatile compounds
MPALNLPPSHFRVLIAGGCYSGLAAAIQLQELCDTIESPVSVEIVIVDEKDGFYHVIGSPLALSSKQYSEKAWVQYKDVKVLQRPNVTFVQGSLTHVDCENKVATISLGKTQKKRLESYDFFVAGTGLRRAWPVVPQALIRDEYLAEAEEHISKVINSTAPVLVVGGGAVGIEMAAELKLVQPDVQVTLAHSRDKLLSAEPLPDMVKECALELVEESGVDVLLNHRLASSTPIETADGSQVYEVEFTNGHKMVASEIIVAISKSVPTSTYLPQDALDEEGYVNIRPTLQMPTCVPNADSHFAIGDLVHWSGIKRCGGAMHQGKLSSVNMHQIMLQQVRGKEPVFETLNEVPPMIGLAVGKNGLAYGPDGMKSGPQVMQVFFENDLGFRIVWDYLRLGGVTA

SEQ ID NO: 28510 - DNA, 3550 bp, Muscodor strobelii
  misc_feature: SGI EST ID NO. CUFF.67512.0
  misc_feature: Variant of the nucleotide sequence at SEQ ID NO 28508
gccaatttcaacttttgtggacacgtacctatactgtgttcagttacgttatgactctatatactcgtattagggcttctgcagcttcatccctgtttcaggattcttattctcggagccaatgcctagtgatattcgaggaattctgggcaaacaatagtcgtcgcaacctgtcgaccgctagtttgcctctcctgatgcttgatcttcgtcgctcagtaagctcggcaacagactcgtggcttacttcataaatctcaatcaaaaaggcatagttccttcttcttcaacctctaacatttacagtattcattcgacacgtatcacgaaactttacgtcgacttgtactcgtcatgcctgctttaaacctccccccaagccattttcgggttctgattgctggtggctgttattcgggtcttgctgccgccattcaactccaagaactatgtgatacaatagaatcacctgtgtccgtggaaatagtcattgttgacgaaaaggacgggttttaccatgtcatcggttcgccgcttgcgttgtcttcgaaacagtattcagagaaagcatgggtccaatataaggatgtcaaagtgttgcagcgcccaaatgtcacttttgtacaaggctctctcacccacgtcgactgcgagaacaaagtggccacgatctcactcggcaagacacaaaaaaagaggctcgagagctatgactttttcgtcgcgggtacaggtttacgaagggcatggccggttgtaccccaggccttgattcgagatgaatacctggctgaggcagaggaacacataagcaaagtcatcaacagtactgctccagtccttgtcgtaggtggaggtgcagtaggaatcgagatggctgcggagttgaagctggttcagccagatgttcaagtaacattggcgcattccagggacaagttgctatctgctgagccgctaccagatatggtcaaagaatgtgctctggaacttgtagaagagagtggtgtggatgtgcttctgaatcatcgtcttgcaagtagcacacctatcgagactgccgacggatcgcaggtttacgaggttgaatttaccaatggtcacaaaatggtcgctagcgagattatagtggcaatttccaagagcgttcccacttcgacttatttgcctcaggatgccctcgacgaggaaggctacgtcaatatacgcccaacactccagatgcccacgtgcgtccccaatgccgattcgcacttcgccatcggtgacttggtgcactggtctggaatcaagcggtgtggtggagcgatgcaccaaggcaaactgtctagtgtaaatatgcaccaaatcatgttacagcaagtaaggggaaaggagcccgtcttcgaaactcttaacgaagtcccacctatgattggccttgccgtcggcaagaatggcctcgcatatgggccggatggcatgaagtcgggccctcaagttatgcaagtattttttgagaacgatttaggtttccggattgtttgggattaccttcgtcttggaggtgttacggcatagtcgaaggagcgtttaaatctgccagggggcgtttggagtcgggggcatcatctagcagtttgagagtggcacagacacgcttgttgtttaaatcgaccaaatatttcaagattttgtgactacattgagtttatttacactgaaaactgttgagcaccagggaccaatttcccagccaaactacaactttggtaacaatccaacgagagttccgccgacaaccttctcactctcatgtagaggtgaaagctggaagaaccgttcccttgagcaacgtacaaatgcagagcgtttgtgaggcagatccacaaacttgtccaatccgaaaccgttaatgaaatcatacgtaagtacagagctattagtgtatttcggttcacctatcaggtacatggtgcgcggatcgtcgagaaacagatagtgcattagactagaccaccaagccgtgactcggtgcggaccacggaaacgtacatcgcccaccagtgaatgccgaccgcggtcgaagtctccggcactgtagtaggcgccgagtttgtcctcctatgcagccattagttacgttagcaatgcttcaagagatatttcagtgttttagacttagttcgtgcgctacatcctacagccacggcgacctcgttgaacggaacggaatatcaagacttaccttgccccaatatacctcaaaatatgcaaagaatgtgtcgtcgaacgcagccaggatcgtaatctgatggggatctacgtgagcctttcggaggtactcgcggtgttgttcaagagtaccagtctcgttccaaccctgcgatacacgaggatcgttttgccattcatgaaataagcgaaggtgttcagtattctcccagtctaacgcgaccatgctgaaattctcgcgcaagtgcggaatccatcgactgtatataacagagcccggacgtggcttcgcaggacgtcgaggatgccatgtcaggacttgaccaggctctgcggtcatcatgttctcaagaggcgtgagtggatacgaagagagcggcttgggggatgtcaagtcttctggaatccaagcggtgcggggcccaaaaggtgatcccgcgccctgccagaacgtcctacgaaggaccagcagctcgtctgtcaagcctgttgcgataggatgatcaattgcaaggagcacggctttcagttgagttgatagctcccttttcccattaccattgagagacaaacggaacccttctattgacgggcgaagagtgaatatgacgtagatcaacagccatgcctggccaagagttggactttcttcaccgtcccagacccaggtcgaacagggcgagcggcgagcgcggccccagggggtattgttggattccgggggacgttcgctcgacttgagctctataggctcagtgaaaaatagctgatcattgtgaaggggttctggaggagaaatggcctggttttcaggatttagcggcttgagttggaaaaaggacgttgcagactccgttattcgtgatgacttggtcaacgcgtagggggtttggtatgggtgtgggagcttcagtataggctcgttgtcagacggagccgtcattgtgtcaatggaactggtcggtaatgattcaattgctccaagggacaatatggcgaattgggttgaacgcacttggacagaaatgttgagtgtaagggaaagagagggatgtagacttgcttgctctcggccctcgactatccacgataattttcgaccctaacactcgaagctctagtgggggccggttcgcacaagcagggcaatatcgtacggtaggataccatgatggcactaccaatccaccaaagaaagtctctttctgaaaggctagtttgagacccttcccaaactaacagagtaagccgccggcattatccaatacatctcatgacgtgctggtgacactcgaggtgccgtcataactctggacaaaataggacggtgtcaatg

SEQ ID NO: 28511 - DNA, 1293 bp, Muscodor strobelii
  misc_feature: SGI cDNA ID NO. 569781
  misc_feature: Reduced expression when VOC is produced
  misc_feature: Encodes the peptide sequence at SEQ ID NO 28512
atgacggctccgtctgacaacgagcctatactgaagctcccacacccataccaaaccccctacgcgttgaccaagtcatcacgaataacggagtctgcaacgtcctttttccaactcaagccgctaaatcctgaaaaccaggccatttctcctccagaaccccttcacaatgatcagctatttttcactgagcctatagagctcaagtcgagcgaacgtcccccggaatccaacaataccccctggggccgcgctcgccgctcgccctgttcgacctgggtctgggacggtgaagaaagtccaactcttggccaggcatggctgttgatctacgtcatattcactcttcgcccgtcaatagaagggttccgtttgtctctcaatggtaatgggaaaagggagctatcaactcaactgaaagccgtgctccttgcaattgatcatcctatcgcaacaggcttgacagacgagctgctggtccttcgtaggacgttctggcagggcgcgggatcaccttttgggccccgcaccgcttggattccagaagacttgacatcccccaagccgctctcttcgtatccactcacgcctcttgagaacatgatgaccgcagagcctggtcaagtcctgacatggcatcctcgacgtcctgcgaagccacgtccgggctctgttatatacagtcgatggattccgcacttgcgcgagaatttcagcatggtcgcgttagactgggagaatactgaacaccttcgcttatttcatgaatggcaaaacgatcctcgtgtatcgcagggttggaacgagactggtactcttgaacaacaccgcgagtacctccgaaaggctcacgtagatccccatcagattacgatcctggctgcgttcgacgacacattctttgcatattttgaggtatattggggcaaggaggacaaactcggcgcctactacagtgccggagacttcgaccgcggtcggcattcactggtgggcgatgtacgtttccgtggtccgcaccgagtcacggcttggtggtctagtctaatgcactatctgtttctcgacgatccgcgcaccatgtacctgataggtgaaccgaaatacactaatagctctgtacttacgtatgatttcattaacggtttcggattggacaagtttgtggatctgcctcacaaacgctctgcatttgtacgttgctcaagggaacggttcttccagctttcacctctacatgagagtgagaaggttgtcggcggaactctcgttggattgttaccaaagttgtag

SEQ ID NO: 28512 - protein, 430 aa, Muscodor strobelii
  misc_feature: SGI Peptide ID NO. 569781
  misc_feature (5)..(430): NCBI GI: 85094114 Blast Desc: NCU06062 [Neurospora crassa OR74A] gi|28921280|gb|EAA30589.1| conserved [Neurospora crassa OR74A]
  misc_feature (5)..(430): NCBI GI: 171680773 Blast Desc: protein product [Podospora anserina] gi|27764282|emb|CAD60562.1| protein product [Podospora anserina] gi|170940014|emb|CAP65240.1| protein product [Podospora anserina]
  misc_feature (1)..(430): NCBI GI: 256729426 Blast Desc: [Nectria haematococca mpVI 77-13-4]
  misc_feature (10)..(430): NCBI GI: 39946444 Blast Desc: MGG_08289 [Magnaporthe grisea 70-15] gi|145020067|gb|EDK04295.1| MGG_08289 [Magnaporthe grisea 70-15]
  misc_feature (8)..(430): NCBI GI: 46116984 Blast Desc: FG04334.1 [Gibberella zeae PH-1]
  misc_feature (1)..(412): NCBI GI: 115397323 Blast Desc: conserved [Aspergillus terreus NIH2624] gi|114192444|gb|EAU34144.1| conserved [Aspergillus terreus NIH2624]
  misc_feature (5)..(371): NCBI GI: 261354516 Blast Desc: aerobactin siderophore biosynthesis protein iucB [Verticillium albo-atrum VaMs.102]
  misc_feature (3)..(412): NCBI GI: 67516653 Blast Desc: AN0608.2 [Aspergillus nidulans FGSC A4] gi|40747551|gb|EAA66707.1| AN0608.2 [Aspergillus nidulans FGSC A4] gi|259489125|tpe|CBF89139.1| TPA: conserved [Aspergillus FGSC
  misc_feature (4)..(413): NCBI GI: 119183962 Blast Desc: CIMG_06851 [Coccidioides immitis RS]
  misc_feature (4)..(413): NCBI GI: 240109751 Blast Desc: acetylase, [Coccidioides posadasii C735 delta SOWgp]
  misc_feature: Useful for introducing or modulating the production of volatile compounds
MTAPSDNEPILKLPHPYQTPYALTKSSRITESATSFFQLKPLNPENQAISPPEPLHNDQLFFTEPIELKSSERPPESNNTPWGRARRSPCSTWVWDGEESPTLGQAWLLIYVIFTLRPSIEGFRLSLNGNGKRELSTQLKAVLLAIDHPIATGLTDELLVLRRTFWQGAGSPFGPRTAWIPEDLTSPKPLSSYPLTPLENMMTAEPGQVLTWHPRRPAKPRPGSVIYSRWIPHLRENFSMVALDWENTEHLRLFHEWQNDPRVSQGWNETGTLEQHREYLRKAHVDPHQITILAAFDDTFFAYFEVYWGKEDKLGAYYSAGDFDRGRHSLVGDVRFRGPHRVTAWWSSLMHYLFLDDPRTMYLIGEPKYTNSSVLTYDFINGFGLDKFVDLPHKRSAFVRCSRERFFQLSPLHESEKVVGGTLVGLLPKL

SEQ ID NO: 28513 - DNA, 3601 bp, Muscodor strobelii
  misc_feature: SGI EST ID NO. CUFF.67513.1
  misc_feature: Variant of the nucleotide sequence at SEQ ID NO 28511
cattgacaccgtcctattttgtccagagttatgacggcacctcgagtgtcaccagcacgtcatgagatgtattggataatgccggcggcttactctgttagtttgggaagggtctcaaactagcctttcagaaagagactttctttggtggattggtagtgccatcatggtatcctaccgtacgatattgccctgcttgtgcgaaccggcccccactagagcttcgagtgttagggtcgaaaattatcgtggatagtcgagggccgagagcaagcaagtctacatccctctctttcccttacactcaacatttctgtccaagtgcgttcaacccaattcgccatattgtcccttggagcaattgaatcattaccgaccagttccattgacacaatgacggctccgtctgacaacgagcctatactgaagctcccacacccataccaaaccccctacgcgttgaccaagtcatcacgaataacggagtctgcaacgtcctttttccaactcaagccgctaaatcctgaaaaccaggccatttctcctccagaaccccttcacaatgatcagctatttttcactgagcctatagagctcaagtcgagcgaacgtcccccggaatccaacaataccccctggggccgcgctcgccgctcgccctgttcgacctgggtctgggacggtgaagaaagtccaactcttggccaggcatggctgttgatctacgtcatattcactcttcgcccgtcaatagaagggttccgtttgtctctcaatggtaatgggaaaagggagctatcaactcaactgaaagccgtgctccttgcaattgatcatcctatcgcaacaggcttgacagacgagctgctggtccttcgtaggacgttctggcagggcgcgggatcaccttttgggccccgcaccgcttggattccagaagacttgacatcccccaagccgctctcttcgtatccactcacgcctcttgagaacatgatgaccgcagagcctggtcaagtcctgacatggcatcctcgacgtcctgcgaagccacgtccgggctctgttatatacagtcgatggattccgcacttgcgcgagaatttcagcatggtcgcgttagactgggagaatactgaacaccttcgcttatttcatgaatggcaaaacgatcctcgtgtatcgcagggttggaacgagactggtactcttgaacaacaccgcgagtacctccgaaaggctcacgtagatccccatcagattacgatcctggctgcgttcgacgacacattctttgcatattttgaggtatattggggcaaggaggacaaactcggcgcctactacagtgccggagacttcgaccgcggtcggcattcactggtgggcgatgtacgtttccgtggtccgcaccgagtcacggcttggtggtctagtctaatgcactatctgtttctcgacgatccgcgcaccatgtacctgataggtgaaccgaaatacactaatagctctgtacttacgtatgatttcattaacggtttcggattggacaagtttgtggatctgcctcacaaacgctctgcatttgtacgttgctcaagggaacggttcttccagctttcacctctacatgagagtgagaaggttgtcggcggaactctcgttggattgttaccaaagttgtagtttggctgggaaattggtccctggtgctcaacagttttcagtgtaaataaactcaatgtagtcacaaaatcttgaaatatttggtcgatttaaacaacaagcgtgtctgtgccactctcaaactgctagatgatgcccccgactccaaacgccccctggcagatttaaacgctccttcgactatgccgtaacacctccaagacgaaggtaatcccaaacaacttttagatatgttagtgttgtcttctgaatgtgaaccggatgataataacttactccggaaacctaaatcgttctcaaaaaatacttgcataacttgagggcccgacttcatgccatccggcccatatgcgaggccattcttgccgacggcaaggccaatcataggtgggacttcgttaagagtttcgaagacgggctcctttccccttacttgctgtaacatgatttggtgcatatttacactagacagtttgccttggtgcatcgctccaccacaccgcttgattccagaccagtgcaccaagtcaccgatggcgaagtgcgaatcggcattggggacgcacgtgggcatctggagtgttgggcgtatattgacgtagccttcctcgtcgagggcatcctgaggcaaataagtcgaagtgggaacgctcttggaaattgccactataatctcgctagcgaccattttgtgaccattggtaaattcaacctcgtaaacctgcgatccgtcggcagtctcgataggtgtgctacttgcaagacgatgattcagaagcacatccacaccactctcttctacaagttccagagcacattctttgaccatatctggtagcggctcagcagatagcaacttgtccctggaatgcgccaatgttacttgaacatctggctgaaccagcttcaactccgcagccatctcgattcctactgcacctagaagcactgtcagggacaataactactagacaaccagttgggatagggggaaaatacctccacctacgacaaggactggagcagtactgttgatgactttgcttatgtgttcctctgcctcagccaggtattcatctcgaatcaaggcctggggtacaaccggccatgcccttcgtaaacctgtacccgcgacgaaaaagtcatagctctcgagcctctttttttgtgtcttgccgagtgagatcgtggccactttgttctcgcagtcgacgtgggtgagagagccttgtacaaaagtgacatttgggcgctgcaacactttgacatccttatattggacccatgctttctctgaatactgtttcgaagacaacgcaagcggcgaaccgatgacatggtctagcgacagtgctgtcagtaacatgatccgaatgaatttttgataatattgtaacgtacaaaacccgtccttttcgtcaacaatgactatttccacggacacaggtgattctattgtatcacatagttcttggagttgaatggcggcagcaagacccgaataacagccaccagcaatcagaacccgaaaatggcttggggggaggtttaaagcaggcatgacgagtacaagtcgacgtaaagtttcgtgatacgtgtcgaatgaatactgtaaatgttagaggttgaagaagaaggaactatgcctttttgattgagatttatgaagtaagccacgagtctgttgccgagcttactgagcgacgaagatcaagcatcaggagaggcaaactagcggtcgacaggttgcgacgactattgtttgcccagaattcctcgaatatcactaggcattggctccgagaataagaatcctgaaacagggatgaagctgcagaagccctaatacgagtatatagagtcataacgtaactgaacacagtataggtacgtgtccacaaaagttgaaattggc

SEQ ID NO: 28514 - DNA, 501 bp, Muscodor strobelii
  misc_feature: SGI cDNA ID NO. 569782
  misc_feature: Encodes the peptide sequence at SEQ ID NO 28515
atggctccatttacacctggattagctcgtcatgcagggctcccacgcaagcctaagacctctgcaagtgccatcagaaaacccattcgccgttcaggactcctagacaagcatacgatctcaacaggcatcgccaagcccactttgaaatctgtccatgctgtacttagggctggtggaatgaaactgacagctaaggagcgacaatttcttcatggaactatgcagaccaatacatccacgttgatgattgctgtcatggagctcgtcttgaagcagctccccttcgacaacaacgccaaactttgcttgggattcatcagagtcttgaagaaaacacatcaatttgacgtgctccgatcatatctcgagaaggcgcttttggcattcgacatgcgagatgcattcgaccgagagatgatgaagattgacgaagtagatttcctcatgagctgtcagcttgagctcgagtcaattagtggaggagaaaaagtaatttga

SEQ ID NO: 28515 - protein, 166 aa, Muscodor strobelii
  misc_feature: SGI Peptide ID NO. 569782
MAPFTPGLARHAGLPRKPKTSASAIRKPIRRSGLLDKHTISTGIAKPTLKSVHAVLRAGGMKLTAKERQFLHGTMQTNTSTLMIAVMELVLKQLPFDNNAKLCLGFIRVLKKTHQFDVLRSYLEKALLAFDMRDAFDREMMKIDEVDFLMSCQLELESISGGEKVI

SEQ ID NO: 28516 - DNA, 320 bp, Muscodor strobelii
  misc_feature: SGI EST ID NO. CUFF.67179.0
  misc_feature: Variant of the nucleotide sequence at SEQ ID NO 28514
gttcttcatggaactatgcagaccaatacatccacgttgatgattgctgtcatggagctcgtcttgaagcagctccccttcgacaacaacgccaaactttgcttgggattcatcagagtcttgaagaaaacacatcaatttgacgtgctccgatcatatctcgagaaggcgcttttggcattcgacatgcgagatgcattcgaccgagagatgatgaagattgacgaagtagatttcctcatgagctgtcagcttgagctcgagtcaattagtggaggagaaaaagtaatttgatcaactctagtgctctagatgtgaag

SEQ ID NO: 28517 - DNA, 1689 bp, Muscodor strobelii
  misc_feature: SGI cDNA ID NO. 569783
  misc_feature: Reduced expression when VOC is produced
  misc_feature: Encodes the peptide sequence at SEQ ID NO 28518
atgcattacatccttgtgtctggcggtgtcatttctggcgttgggaaaggcatcattgcctcatcaactggcctactacttcaatctcttggctttcgcgtcagctgcatcaagatcgatccgtatgtatcggtcgatgcagggcttatgtccccggctgaacatggcgaatgttttgtcctcggatctggctctgaagttgacttagacttgggcaattatgagaggtatttgtcgcttaccttgactggtgacaacaacatcacaactggcaaggtctatttggacgtcatcaataaggagagagagggtgcctatcttgggcggactgtccagatcgttccacatgtggtcgatgccattaaagactggattaagcgtgtggctcacacgagtgtcgatggatctggagtagagcctgatgtttgcatcattgagcttggtggaacggtcggcgatattgagagtatgccattcctggaggcgctgactcagatgcgtcatgaggttggcaataaagcctttgtcaatatcatggtcagctacgttcctgtagtgcatggagagcagaagaccaaaccgacgcaacatgcggtgaagaatattcgcagtcacggcttgatccctgatgtgatcgcctgtcgctgcgagaaccccctcgacgaaggtacggtccgtaaaatctcccttcattgccaagtggagagagaccaagtagtagttgttcgggacatgccgacaatctaccaggttccacttcttctccacgatcaagaattagtaggccgtctgctatcgaggatggatctttccccatggtcaattcctccatacatgaaggaaaagggccatgaggtctggcaagcttggaagactgtcgccactgcagttggacgagcaactgttgacatcgcgcttgtcggtaaatacgtgagctcgcctgatgcatatatgagtgtcaccaaggccctcgagcattcctcaatgcacctacgttacacacttaatctcatatggattgatgcagagcacctagagcccgagatggaggcgtctgactccgcgaagtataagtcggcctgggaacgattgcgcactgcttcgggcttgattgtacccggcgggtttggtaagagaggcgttttaggcatgatgctggcatcgcaatgggctagaaccgagaacgttccatttttaggagtctgtcttggttttcaagttgccgtcatgcagtttgcgcgagatctctgctcattgccgaatgccgactcgcaagagtttgacgagcagacgaatgaacctatcattatctacatgccagaaatagatcgccaaaagatgggtggcacaatgcgtctaggtctacacgaaactatcttccagccaggtagtgaatggtccaaaatacgtgcgctttacggaggaggccagtcgtgtaaagagagacaccgccacagatacgaggtcaatcctcaatttgtggaccagctacaagccgctggaatacagttcgttggtaaagacgagacaggtcaacgcatggagattttcgagctgaaggatcatccatacttcgttggaactcaattccacgcggagtatcagtcacgcgtccttgatccaagtaagccgtaccttggtttcatagccgccagtgccggtcgcttggatgaagctcttgcggcgtga

SEQ ID NO: 28518 - protein, 562 aa, Muscodor strobelii
  misc_feature: SGI Peptide ID NO. 569783
  misc_feature (1)..(282): Pfam Id: PF06418 Pfam Desc: CTP synthase N-terminus
  misc_feature (312)..(551): Pfam Id: PF00117 Pfam Desc: Glutamine amidotransferase class-I
  misc_feature (14)..(560): NCBI GI: 116214427 Blast Desc: CHGG_11054 [Chaetomium globosum CBS 148.51] gi|88175409|gb|EAQ82878.1| CHGG_11054 [Chaetomium globosum CBS 148.51]
  misc_feature (1)..(558): NCBI GI: 121711477 Blast Desc: CTP synthase, [Aspergillus clavatus NRRL 1] gi|119401505|gb|EAW11928.1| CTP synthase, [Aspergillus clavatus NRRL 1]
  misc_feature (1)..(558): NCBI GI: 39972487 Blast Desc: MGG_07545 [Magnaporthe grisea 70-15] gi|145016742|gb|EDK01172.1| MGG_07545 [Magnaporthe grisea 70-15]
  misc_feature (1)..(558): NCBI GI: 259489258 Blast Desc: TPA: CTP synthase, (AFU_orthologue; AFUA_7G05210) [Aspergillus nidulans FGSC A4]
  misc_feature (1)..(558): NCBI GI: 70987006 Blast Desc: CTP synthase [Aspergillus fumigatus Af293] gi|66846618|gb|EAL86950.1| CTP synthase, [Aspergillus fumigatus Af293] gi|159123243|gb|EDP48363.1| CTP synthase, [Aspergillus
  misc_feature (1)..(558): NCBI GI: 119482862 Blast Desc: CTP synthase, [Neosartorya fischeri NRRL 181] gi|119409614|gb|EAW19562.1| CTP synthase, [Neosartorya fischeri NRRL 181]
  misc_feature (1)..(558): NCBI GI: 256730933 Blast Desc: NECHADRAFT_105268 [Nectria haematococca mpVI 77-13-4]
  misc_feature (1)..(561): NCBI GI: 255945919 Blast Desc: Pc20g12420 [Penicillium chrysogenum Wisconsin 54-1255] gi|211588462|emb|CAP86571.1| Pc20g12420 [Penicillium chrysogenum Wisconsin 54-1255]
  misc_feature (1)..(558): NCBI GI: 119190901 Blast Desc: CTP synthase [Coccidioides immitis RS]
  misc_feature (1)..(562): NCBI GI: 238496247 Blast Desc: CTP synthase, [Aspergillus flavus NRRL3357] gi|220694239|gb|EED50583.1| CTP synthase, [Aspergillus flavus NRRL3357]
  misc_feature (34)..(558): SWISSPROT Homolog: EC 6.3.4.2 CTP synthase
  misc_feature: Useful for introducing or modulating the production of volatile compounds
MHYILVSGGVISGVGKGIIASSTGLLLQSLGFRVSCIKIDPYVSVDAGLMSPAEHGECFVLGSGSEVDLDLGNYERYLSLTLTGDNNITTGKVYLDVINKEREGAYLGRTVQIVPHVVDAIKDWIKRVAHTSVDGSGVEPDVCIIELGGTVGDIESMPFLEALTQMRHEVGNKAFVNIMVSYVPVVHGEQKTKPTQHAVKNIRSHGLIPDVIACRCENPLDEGTVRKISLHCQVERDQVVVVRDMPTIYQVPLLLHDQELVGRLLSRMDLSPWSIPPYMKEKGHEVWQAWKTVATAVGRATVDIALVGKYVSSPDAYMSVTKALEHSSMHLRYTLNLIWIDAEHLEPEMEASDSAKYKSAWERLRTASGLIVPGGFGKRGVLGMMLASQWARTENVPFLGVCLGFQVAVMQFARDLCSLPNADSQEFDEQTNEPIIIYMPEIDRQKMGGTMRLGLHETIFQPGSEWSKIRALYGGGQSCKERHRHRYEVNPQFVDQLQAAGIQFVGKDETGQRMEIFELKDHPYFVGTQFHAEYQSRVLDPSKPYLGFIAASAGRLDEALAA

SEQ ID NO: 28519 - DNA, 4048 bp, Muscodor strobelii
  misc_feature: SGI EST ID NO. CUFF.67271.0
  misc_feature: Variant of the nucleotide sequence at SEQ ID NO 28517
atttcccttgactcaaccttacctcgccagatcttcacgcgtcgcattcgtccagccatcagacccgagtttctgtgccgagtgtcattgcttccttcccattcgttcggaatttgcaaccgccttatcaaaatgcattacatccttgtgtctggcggtgtcatttctggcgttgggaaaggcatcattgcctcatcaactggcctactacttcaatctcttggctttcgcgtcagctgcatcaagatcgatccgtatgtatcggtcgatgcagggcttatgtccccggctgaacatggcgaatgttttgtcctcggatctggctctgaagttgacttagacttgggcaattatgagaggtatttgtcgcttaccttgactggtgacaacaacatcacaactggcaaggtctatttggacgtcatcaataaggagagagagggtgcctatcttgggcggactgtccagatcgttccacatgtggtcgatgccattaaagactggattaagcgtgtggctcacacgagtgtcgatggatctggagtagagcctgatgtttgcatcattgagcttggtggaacggtcggcgatattgagagtatgccattcctggaggcgctgactcagatgcgtcatgaggttggcaataaagcctttgtcaatatcatggtcagctacgttcctgtagtgcatggagagcagaagaccaaaccgacgcaacatgcggtgaagaatattcgcagtcacggcttgatccctgatgtgatcgcctgtcgctgcgagaaccccctcgacgaaggtacggtccgtaaaatctcccttcattgccaagtggagagagaccaagtagtagttgttcgggacatgccgacaatctaccaggttccacttcttctccacgatcaagaattagtaggccgtctgctatcgaggatggatctttccccatggtcaattcctccatacatgaaggaaaagggccatgaggtctggcaagcttggaagactgtcgccactgcagttggacgagcaactgttgacatcgcgcttgtcggtaaatacgtgagctcgcctgatgcatatatgagtgtcaccaaggccctcgagcattcctcaatgcacctacgttacacacttaatctcatatggattgatgcagagcacctagagcccgagatggaggcgtctgactccgcgaagtataagtcggcctgggaacgattgcgcactgcttcgggcttgattgtacccggcgggtttggtaagagaggcgttttaggcatgatgctggcatcgcaatgggctagaaccgagaacgttccatttttaggagtctgtcttggttttcaagttgccgtcatgcagtttgcgcgagatctctgctcattgccgaatgccgactcgcaagagtttgacgagcagacgaatgaacctatcattatctacatgccagaaatagatcgccaaaagatgggtggcacaatgcgtctaggtctacacgaaactatcttccagccaggtagtgaatggtccaaaatacgtgcgctttacggaggaggccagtcgtgtaaagagagacaccgccacagatacgaggtcaatcctcaatttgtggaccagctacaagccgctggaatacagttcgttggtaaagacgagacaggtcaacgcatggagattttcgagctgaaggatcatccatacttcgttggaactcaattccacgcggagtatcagtcacgcgtccttgatccaagtaagccgtaccttggtttcatagccgccagtgccggtcgcttggatgaagctcttgcggcgtgattcaataacaagccgcgaaaatatctggtcctacggtggctagatttggttttagagaaaaaggggcgagggccagggcccattgtcctaacgttcaatccagaggaagtcgtcgatcgctacgctagtcgtacaaacatgatcgcaaaataatgcgcgtaggtagtaaccagaggatggtaaaagtccatgggggtatagaatatcaaacgtgaaaaagactcatgataaacctgtatatatttttaaactctagagctctatgcacattttctatctagacgctatgtggctctatgcccaggcacaaaacattgtctatagcttttctaaccgtctctttctcaaaatctcttccccgaatcgtgccatctcgaatttcttcacctttccacttccagtgagaggagcatcggcaggaacaccatcctctccaagccagaagacgtgagcgggagacttatgccggcccaatttctgctgaacccagtctttgatgtcttgaatactcggccgtgccttgatcgggccgtcgctctgtaggaaagcagcaacggcctcgccataatgggtgtctttgacccctgtaacaatagcgcgagagatgtgtgagtgagccacgagtctctcctcgatttcaagggggtaaatattttcgccaccacgaataataatgtccttgaaacggccggtgatggtacaatacccttggtcgtcgaacacagcttcgtctcctgtgtgaagccaaagcagccccgcttcgtcacggaccataacctctgctgtcttctcagagttattccaatatccagcttgtagttggtaacctgcaatgcaaagttctccacggactccaattgggacaatgttgccttcatggtcgatgattttggcatgtgcatggggcataagggtaccaacagttgtcaatcgcttctcgatagcgtcatcggtgaatgcattgaagcacgtaggggaggcttcggtaagcccataactgcttgtgaactccgacattccaaaacgtgatatgagcagctccatcagatatcgtggcactgcggctccggcaataatacctgttctcagatcatcgcaattaaaccccggaggtgtcggaagactaaatagcgtatcaaacatggcgggtactccatgtattgcagtgcatctctcgtctgaaatggcttgcagtaccgcggctgggtcgaatgtttctccggggtagacaatcttcgcaccgtgtgtaatgattgccatcatcccgaggaccagtccaaaacaatggaataatggtggttggcagcagagcacatcgtcaggtgtaagacgcatacggtctccgatgaaacgagcgttgttgacaatattgtgatgcgttaacatggctgctttagggagccccgtagttccgcttgtaaattgcaggttgcacacattatgcggaaggactttgcgactgagcctgaacaattgatcgggatttattgtacggcctttcttaataaggtcgccgtaagttggatatgtgccagcgtcccctcgtagtattacaacatcagggcgttgtttctggcccgatagttcttcgagtagtttggagttatctgtttttccgattttcttggtagtgaagaacaatttgcagtctatagtcagagtcagttcatcgatactacgcaactacagcaaaaattgtctacctgaaaattttaatgcatattgagcttcggtcggcgtgtatgtattattgaggatgaccaagatagcgccaatacgagccacagcgaagaagacggccgcatattgctcgcaatttccggccattatccctacgcggtccccaacatcgatgccaatagatatcaaggctcgggcgagttgcgagctctgttggttgagttcattataggtccaacgtgctcctgtccatggcgtcactatgcagtcctgggatccgtggtgtaggcattgtagatctaacaattctcccagcgtcaaatcaactaatggagggtcaaccggtccgtataggcgagatacatgctgattttgggatggcaggcgtgcctgtggcgggaatatctcagctattgattgtgttgccattattgacaatagagctccaaatgaaatagacacagataatcatcaaaggtaccaaactggccctgaggctgctataaaccacgcattatcttaaagaacctgccgttgtctaggcggc

SEQ ID NO: 28520 - DNA, 1737 bp, Muscodor strobelii
  misc_feature: SGI cDNA ID NO. 569784
  misc_feature: Reduced expression when VOC is produced
  misc_feature: Encodes the peptide sequence at SEQ ID NO 28521
atggcaacacaatcaatagctgagatattcccgccacaggcacgcctgccatcccaaaatcagcatgtatctcgcctatacggaccggttgaccctccattagttgatttgacgctgggagaattgttagatctacaatgcctacaccacggatcccaggactgcatagtgacgccatggacaggagcacgttggacctataatgaactcaaccaacagagctcgcaactcgcccgagccttgatatctattggcatcgatgttggggaccgcgtagggataatggccggaaattgcgagcaatatgcggccgtcttcttcgctgtggctcgtattggcgctatcttggtcatcctcaataatacatacacgccgaccgaagctcaatatgcattaaaattttcagactgcaaattgttcttcactaccaagaaaatcggaaaaacagataactccaaactactcgaagaactatcgggccagaaacaacgccctgatgttgtaatactacgaggggacgctggcacatatccaacttacggcgaccttattaagaaaggccgtacaataaatcccgatcaattgttcaggctcagtcgcaaagtccttccgcataatgtgtgcaacctgcaatttacaagcggaactacggggctccctaaagcagccatgttaacgcatcacaatattgtcaacaacgctcgtttcatcggagaccgtatgcgtcttacacctgacgatgtgctctgctgccaaccaccattattccattgttttggactggtcctcgggatgatggcaatcattacacacggtgcgaagattgtctaccccggagaaacattcgacccagccgcggtactgcaagccatttcagacgagagatgcactgcaatacatggagtacccgccatgtttgatacgctatttagtcttccgacacctccggggtttaattgcgatgatctgagaacaggtattattgccggagccgcagtgccacgatatctgatggagctgctcatatcacgttttggaatgtcggagttcacaagcagttatgggcttaccgaagcctcccctacgtgcttcaatgcattcaccgatgacgctatcgagaagcgattgacaactgttggtacccttatgccccatgcacatgccaaaatcatcgaccatgaaggcaacattgtcccaattggagtccgtggagaactttgcattgcaggttaccaactacaagctggatattggaataactctgagaagacagcagaggttatggtccgtgacgaagcggggctgctttggcttcacacaggagacgaagctgtgttcgacgaccaagggtattgtaccatcaccggccgtttcaaggacattattattcgtggtggcgaaaatatttacccccttgaaatcgaggagagactcgtggctcactcacacatctctcgcgctattgttacaggggtcaaagacacccattatggcgaggccgttgctgctttcctacagagcgacggcccgatcaaggcacggccgagtattcaagacatcaaagactgggttcagcagaaattgggccggcataagtctcccgctcacgtcttctggcttggagaggatggtgttcctgccgatgctcctctcactggaagtggaaaggtgaagaaattcgagatggcacgattcggggaagagattttgagaaagagacggttagaaaagctatag

SEQ ID NO: 28521 - protein, 578 aa, Muscodor strobelii
  misc_feature: SGI Peptide ID NO. 569784
  misc_feature (66)..(489): Pfam Id: PF00501 Pfam Desc: AMP-binding enzyme
  misc_feature (1)..(574): NCBI GI: 261354517 Blast Desc: 4-coumarate-CoA ligase [Verticillium albo-atrum VaMs.102]
  misc_feature (14)..(574): NCBI GI: 85094118 Blast Desc: NCU06063 [Neurospora crassa OR74A] gi|28921281|gb|EAA30590.1| NCU06063 [Neurospora crassa OR74A]
  misc_feature (19)..(574): NCBI GI: 46116982 Blast Desc: FG04333.1 [Gibberella zeae PH-1]
  misc_feature (13)..(570): NCBI GI: 171680775 Blast Desc: protein product [Podospora anserina] gi|27764283|emb|CAD60563.1| protein product [Podospora anserina] gi|170940015|emb|CAP65241.1| protein product [Podospora anserina]
  misc_feature (19)..(578): NCBI GI: 145612990 Blast Desc: MGG_08288 [Magnaporthe grisea 70-15] gi|145020068|gb|EDK04296.1| MGG_08288 [Magnaporthe grisea 70-15]
  misc_feature (19)..(570): NCBI GI: 116200716 Blast Desc: conserved [Chaetomium globosum CBS 148.51] gi|88175617|gb|EAQ83085.1| conserved [Chaetomium globosum CBS 148.51]
  misc_feature (4)..(577): NCBI GI: 70996664 Blast Desc: long-chain-fatty-acid-CoA ligase [Aspergillus fumigatus Af293] gi|66850722|gb|EAL91049.1| long-chain-fatty-acid-CoA ligase, [Aspergillus fumigatus Af293]
  misc_feature (17)..(573): NCBI GI: 145236613 Blast Desc: An06g01320 [Aspergillus niger] gi|134075413|emb|CAK39200.1| protein product [Aspergillus niger]
  misc_feature (4)..(578): NCBI GI: 119494285 Blast Desc: long-chain-fatty-acid-CoA ligase, [Neosartorya fischeri NRRL 181] gi|119412200|gb|EAW22141.1| long-chain-fatty-acid-CoA ligase, [Neosartorya fischeri NRRL 181]
  misc_feature (4)..(574): NCBI GI: 115397321 Blast Desc: ATEG_05074 [Aspergillus terreus NIH2624] gi|114192443|gb|EAU34143.1| ATEG_05074 [Aspergillus terreus NIH2624]
  misc_feature (54)..(549): SWISSPROT Homolog: EC 6.2.1.3 Long-chain-fatty-acid--CoA ligase
  misc_feature: Useful for introducing or modulating the production of volatile compounds
MATQSIAEIFPPQARLPSQNQHVSRLYGPVDPPLVDLTLGELLDLQCLHHGSQDCIVTPWTGARWTYNELNQQSSQLARALISIGIDVGDRVGIMAGNCEQYAAVFFAVARIGAILVILNNTYTPTEAQYALKFSDCKLFFTTKKIGKTDNSKLLEELSGQKQRPDVVILRGDAGTYPTYGDLIKKGRTINPDQLFRLSRKVLPHNVCNLQFTSGTTGLPKAAMLTHHNIVNNARFIGDRMRLTPDDVLCCQPPLFHCFGLVLGMMAIITHGAKIVYPGETFDPAAVLQAISDERCTAIHGVPAMFDTLFSLPTPPGFNCDDLRTGIIAGAAVPRYLMELLISRFGMSEFTSSYGLTEASPTCFNAFTDDAIEKRLTTVGTLMPHAHAKIIDHEGNIVPIGVRGELCIAGYQLQAGYWNNSEKTAEVMVRDEAGLLWLHTGDEAVFDDQGYCTITGRFKDIIIRGGENIYPLEIEERLVAHSHISRAIVTGVKDTHYGEAVAAFLQSDGPIKARPSIQDIKDWVQQKLGRHKSPAHVFWLGEDGVPADAPLTGSGKVKKFEMARFGEEILRKRRLEKL

SEQ ID NO: 28522 - DNA, 2234 bp, Muscodor strobelii
  misc_feature: SGI EST ID NO. CUFF.67272.1
  misc_feature: Variant of the nucleotide sequence at SEQ ID NO 28520
gccgcctagacaacggcaggttctttaagataatgcgtggtttatagcagcctcagggccagtttggtacctttgatgattatctgtgtctatttcatttggagctctattgtcaataatggcaacacaatcaatagctgagatattcccgccacaggcacgcctgccatcccaaaatcagcatgtatctcgcctatacggaccggttgaccctccattagttgatttgacgctgggagaattgttagatctacaatgcctacaccacggatcccaggactgcatagtgacgccatggacaggagcacgttggacctataatgaactcaaccaacagagctcgcaactcgcccgagccttgatatctattggcatcgatgttggggaccgcgtagggataatggccggaaattgcgagcaatatgcggccgtcttcttcgctgtggctcgtattggcgctatcttggtcatcctcaataatacatacacgccgaccgaagctcaatatgcattaaaattttcagactgcaaattgttcttcactaccaagaaaatcggaaaaacagataactccaaactactcgaagaactatcgggccagaaacaacgccctgatgttgtaatactacgaggggacgctggcacatatccaacttacggcgaccttattaagaaaggccgtacaataaatcccgatcaattgttcaggctcagtcgcaaagtccttccgcataatgtgtgcaacctgcaatttacaagcggaactacggggctccctaaagcagccatgttaacgcatcacaatattgtcaacaacgctcgtttcatcggagaccgtatgcgtcttacacctgacgatgtgctctgctgccaaccaccattattccattgttttggactggtcctcgggatgatggcaatcattacacacggtgcgaagattgtctaccccggagaaacattcgacccagccgcggtactgcaagccatttcagacgagagatgcactgcaatacatggagtacccgccatgtttgatacgctatttagtcttccgacacctccggggtttaattgcgatgatctgagaacaggtattattgccggagccgcagtgccacgatatctgatggagctgctcatatcacgttttggaatgtcggagttcacaagcagttatgggcttaccgaagcctcccctacgtgcttcaatgcattcaccgatgacgctatcgagaagcgattgacaactgttggtacccttatgccccatgcacatgccaaaatcatcgaccatgaaggcaacattgtcccaattggagtccgtggagaactttgcattgcaggttaccaactacaagctggatattggaataactctgagaagacagcagaggttatggtccgtgacgaagcggggctgctttggcttcacacaggagacgaagctgtgttcgacgaccaagggtattgtaccatcaccggccgtttcaaggacattattattcgtggtggcgaaaatatttacccccttgaaatcgaggagagactcgtggctcactcacacatctctcgcgctattgttacaggggtcaaagacacccattatggcgaggccgttgctgctttcctacagagcgacggcccgatcaaggcacggccgagtattcaagacatcaaagactgggttcagcagaaattgggccggcataagtctcccgctcacgtcttctggcttggagaggatggtgttcctgccgatgctcctctcactggaagtggaaaggtgaagaaattcgagatggcacgattcggggaagagattttgagaaagagacggttagaaaagctatagacaatgttttgtgcctgggcatagagccacatagcgtctagatagaaaatgtgcatagagctctagagtttaaaaatatatacaggtttatcatgagtctttttcacgtttgatattctatacccccatggacttttaccatcctctggttactacctacgcgcattattttgcgatcatgtttgtacgactagcgtagcgatcgacgacttcctctggattgaacgttaggacaatgggccctggccctcgcccctttttctctaaaaccaaatctagccaccgtaggaccagatattttcgcggcttgttattgaatcacgccgcaagagcttcatccaagcgaccggcactggcggctatgaaaccaaggtacggc

SEQ ID NO: 28523 - DNA, 825 bp, Muscodor strobelii
  misc_feature: SGI cDNA ID NO. 569785
  misc_feature: Reduced expression when VOC is produced
  misc_feature: Encodes the peptide sequence at SEQ ID NO 28524
atgtttgatacgctatttagtcttccgacacctccggggtttaattgcgatgatctgagaacaggtattattgccggagccgcagtgccacgatatctgatggagctgctcatatcacgttttggaatgtcggagttcacaagcagttatgggcttaccgaagcctcccctacgtgcttcaatgcattcaccgatgacgctatcgagaagcgattgacaactgttggtacccttatgccccatgcacatgccaaaatcatcgaccatgaaggcaacattgtcccaattggagtccgtggagaactttgcattgcaggttaccaactacaagctggatattggaataactctgagaagacagcagaggttatggtccgtgacgaagcggggctgctttggcttcacacaggagacgaagctgtgttcgacgaccaagggtattgtaccatcaccggccgtttcaaggacattattattcgtggtggcgaaaatatttacccccttgaaatcgaggagagactcgtggctcactcacacatctctcgcgctattgttacaggggtcaaagacacccattatggcgaggccgttgctgctttcctacagagcgacggcccgatcaaggcacggccgagtattcaagacatcaaagactgggttcagcagaaattgggccggcataagtctcccgctcacgtcttctggcttggagaggatggtgttcctgccgatgctcctctcactggaagtggaaaggtgaagaaattcgagatggcacgattcggggaagagattttgagaaagagacggttagaaaagctatag

SEQ ID NO: 28524 - protein, 274 aa, Muscodor strobelii
  misc_feature: SGI Peptide ID NO. 569785
  misc_feature (1)..(185): Pfam Id: PF00501 Pfam Desc: AMP-binding enzyme
  misc_feature (1)..(270): NCBI GI: 261354517 Blast Desc: 4-coumarate-CoA ligase [Verticillium albo-atrum VaMs.102]
  misc_feature (1)..(269): NCBI GI: 46116982 Blast Desc: FG04333.1 [Gibberella zeae PH-1]
  misc_feature (1)..(266): NCBI GI: 171680775 Blast Desc: protein product [Podospora anserina] gi|27764283|emb|CAD60563.1| protein product [Podospora anserina] gi|170940015|emb|CAP65241.1| protein product [Podospora anserina]
  misc_feature (1)..(270): NCBI GI: 85094118 Blast Desc: NCU06063 [Neurospora crassa OR74A] gi|28921281|gb|EAA30590.1| NCU06063 [Neurospora crassa OR74A]
  misc_feature (1)..(266): NCBI GI: 116200716 Blast Desc: conserved [Chaetomium globosum CBS 148.51] gi|88175617|gb|EAQ83085.1| conserved [Chaetomium globosum CBS 148.51]
  misc_feature (1)..(274): NCBI GI: 145612990 Blast Desc: MGG_08288 [Magnaporthe grisea 70-15] gi|145020068|gb|EDK04296.1| MGG_08288 [Magnaporthe grisea 70-15]
  misc_feature (1)..(274): NCBI GI: 119494285 Blast Desc: long-chain-fatty-acid-CoA ligase, [Neosartorya fischeri NRRL 181] gi|119412200|gb|EAW22141.1| long-chain-fatty-acid-CoA ligase, [Neosartorya fischeri NRRL 181]
  misc_feature (1)..(273): NCBI GI: 70996664 Blast Desc: long-chain-fatty-acid-CoA ligase [Aspergillus fumigatus Af293] gi|66850722|gb|EAL91049.1| long-chain-fatty-acid-CoA ligase, [Aspergillus fumigatus Af293]
  misc_feature (1)..(271): NCBI GI: 156032527 Blast Desc: SS1G_13961 [Sclerotinia sclerotiorum 1980] gi|154699363|gb|EDN99101.1| SS1G_13961 [Sclerotinia sclerotiorum 1980]
  misc_feature (1)..(270): NCBI GI: 259489124 Blast Desc: TPA: acyl CoA synthetase (Eurofung) [Aspergillus nidulans FGSC A4]
  misc_feature (1)..(245): SWISSPROT Homolog: EC 6.2.1.3 Long-chain-fatty-acid--CoA ligase
  misc_feature: Useful for introducing or modulating the production of volatile compounds
MFDTLFSLPTPPGFNCDDLRTGIIAGAAVPRYLMELLISRFGMSEFTSSYGLTEASPTCFNAFTDDAIEKRLTTVGTLMPHAHAKIIDHEGNIVPIGVRGELCIAGYQLQAGYWNNSEKTAEVMVRDEAGLLWLHTGDEAVFDDQGYCTITGRFKDIIIRGGENIYPLEIEERLVAHSHISRAIVTGVKDTHYGEAVAAFLQSDGPIKARPSIQDIKDWVQQKLGRHKSPAHVFWLGEDGVPADAPLTGSGKVKKFEMARFGEEILRKRRLEKL

SEQ ID NO: 28525 - DNA, 2234 bp, Muscodor strobelii; identical to SEQ ID NO: 28522
  misc_feature: SGI EST ID NO. CUFF.67272.1
  misc_feature: Variant of the nucleotide sequence at SEQ ID NO 28523

SEQ ID NO: 28526 - DNA, 1830 bp, Muscodor strobelii
  misc_feature: SGI cDNA ID NO. 569786
  misc_feature: Encodes the peptide sequence at SEQ ID NO 28527
atggaagatcttggccgggcgccactacttggtcatggcaggagcaggagcagtagcagtggcaagaggagcaataacgaagacaacaccgaatccagggatctctatggctcgacctcaacaaaatcgagccctaccacaacaacacattccgtgcccccttctccaggcgagataggaagcgatgccgacaacgacgacgagtattcttcaccgcgaattgcttcccagagcggagtagagcaggcagatgcgatcaatcaagtttggtccaaaacttctctcattatagcctacatatttatatttatttcttcctttgccaatgcgttacaatggcaagttttgtcgaacttgatgcccttcgtcgtcagcgatttttcctcacattccttgatacctaccattgctattgtttctaatgtgagtactattgcttcgattctctccggagtcttgaaacttccggttgcaaagttaattgatagctgggggcgtgcgcagggttttgcttgcgtcacacttttggcagcttttggattactgctcatgtcgcagtgtcagaatgttgagacttacgccgctgcacaggtactcgacatcatcattgcagatacatcttccttgaagaatcgaactcttgcttttgctttcagctcaaccccgaaccttattactacattcatcggcccagttattgctggtatatacaatgaacacaaccgctggagatgggctttcgcggcatcggccatctttcttgtggttctctcaataccattattctgtatactcatcttgcatatgagaaaggcaagaagactcgggttattacggaaacataaaaaaacaaagatctggtctgtcgagcgatttcagcaatatttgatagaatttgatgttatgggaatggcaacccttagcgcgagtatgacactaatcttagttccgctttcgctcaccaataaatcaacggcaaatattaacctaaatgcgtacacgacaactatattactcggtgttgtttttctgatcttgttcgtcttccacgaacggaagactgaaaagccgtttttgaaattctcccttctttgctcgcgcaatgtagcaggtgcctgcctgttatctgttgtcatttttattgcatactttgcatgggatggctattacacgtcctacttacaagtggttcatggccttaacatcacacaagcgggctatattggccacatttacggcataggatcctcgatctgggcttttgtcgtggggtatcttattcgtcgttctgatcgctttaaatggcttgcagtagctgcactaccggtacatattctcggtggtgttctaatgattttttttcgtcgacccgacacacatattatctgggtcatactttgtcaagtacttataaccatcggcggaagcaccttagttgtgtgtgaccaaatggctgtcatgtctgtcgcgaaacataccgagttagcgtcagtcatggcgattttgtcactatctgcctatatcgggtcggctgtcggttcatcgctgagcggcgccatttggaactcaacacttcctggagccctcgctgagatgctcccgaatctgacccagatggaaattgaccagattgcgtcagatttaaagaagcagctgagttatcctatgggtagtgcaacgcgcgatgctataatcacagcttatggcacttctcaaatcagaatgtgtatcgcagggagtctcatatctcttctcgagatcgtggctgttttcatctggtccgatcgacgagttagtctttccacgcaggtcgctggaacggttctttga

SEQ ID NO: 28527 - protein, 609 aa, Muscodor strobelii
  misc_feature: SGI Peptide ID NO. 569786
  misc_feature (102)..(514): Pfam Id: PF07690 Pfam Desc: Major Facilitator Superfamily
  misc_feature (11)..(606): NCBI GI: 58269144 Blast Desc: CNG00120 [Cryptococcus neoformans var. neoformans JEC21] gi|134114467|ref|XP_774162.1| CNBG4620 [Cryptococcus neoformans var. neoformans B-3501A] gi|50256795|gb|EAL19515.1|
  misc_feature (44)..(609): NCBI GI: 119474439 Blast Desc: siderophore transporter, [Neosartorya fischeri NRRL 181] gi|119407248|gb|EAW17198.1| siderophore transporter, [Neosartorya fischeri NRRL 181]
  misc_feature (61)..(609): NCBI GI: 116204041 Blast Desc: CHGG_09904 [Chaetomium globosum CBS 148.51] gi|88176032|gb|EAQ83500.1| CHGG_09904 [Chaetomium globosum CBS 148.51]
  misc_feature (44)..(609): NCBI GI: 159128193 Blast Desc: MFS siderophore transporter MirB-like, [Aspergillus fumigatus A1163]
  misc_feature (24)..(608): NCBI GI: 156054394 Blast Desc: SS1G_06045 [Sclerotinia sclerotiorum 1980] gi|154703825|gb|EDO03564.1| SS1G_06045 [Sclerotinia sclerotiorum 1980]
  misc_feature (44)..(609): NCBI GI: 146323231 Blast Desc: MFS siderophore iron transporter [Aspergillus fumigatus Af293] gi|129556530|gb|EAL86626.2| MFS siderophore iron transporter, [Aspergillus fumigatus Af293]
  misc_feature (38)..(609): NCBI GI: 67540136 Blast Desc: AN6238.2 [Aspergillus nidulans FGSC A4] gi|40739432|gb|EAA58622.1| AN6238.2 [Aspergillus nidulans FGSC A4] gi|259479554|tpe|CBF69883.1| TPA: MFS siderophore iron FGSC
  misc_feature (61)..(609): NCBI GI: 171679896 Blast Desc: protein product [Podospora anserina] gi|170939574|emb|CAP64801.1| protein product [Podospora anserina]
  misc_feature (44)..(606): NCBI GI: 169614021 Blast Desc: SNOG_10145 [Phaeosphaeria nodorum SN15] gi|160707260|gb|EAT82480.2| SNOG_10145 [Phaeosphaeria nodorum SN15]
  misc_feature (18)..(609): NCBI GI: 121711898 Blast Desc: siderochrome-iron transporter, [Aspergillus clavatus NRRL 1] gi|119401716|gb|EAW12138.1| siderochrome-iron transporter, [Aspergillus clavatus NRRL 1]
MEDLGRAPLLGHGRSRSSSSGKRSNNEDNTESRDLYGSTSTKSSPTTTTHSVPPSPGEIGSDADNDDEYSSPRIASQSGVEQADAINQVWSKTSLIIAYIFIFISSFANALQWQVLSNLMPFVVSDFSSHSLIPTIAIVSNVSTIASILSGVLKLPVAKLIDSWGRAQGFACVTLLAAFGLLLMSQCQNVETYAAAQVLDIIIADTSSLKNRTLAFAFSSTPNLITTFIGPVIAGIYNEHNRWRWAFAASAIFLVVLSIPLFCILILHMRKARRLGLLRKHKKTKIWSVERFQQYLIEFDVMGMATLSASMTLILVPLSLTNKSTANINLNAYTTTILLGVVFLILFVFHERKTEKPFLKFSLLCSRNVAGACLLSVVIFIAYFAWDGYYTSYLQVVHGLNITQAGYIGHIYGIGSSIWAFVVGYLIRRSDRFKWLAVAALPVHILGGVLMIFFRRPDTHIIWVILCQVLITIGGSTLVVCDQMAVMSVAKHTELASVMAILSLSAYIGSAVGSSLSGAIWNSTLPGALAEMLPNLTQMEIDQIASDLKKQLSYPMGSATRDAIITAYGTSQIRMCIAGSLISLLEIVAVFIWSDRRVSLSTQVAGTVL

SEQ ID NO: 28528 - DNA, 1450 bp, Muscodor strobelii
  misc_feature: SGI EST ID NO. CUFF.67192.0
  misc_feature: Variant of the nucleotide sequence at SEQ ID NO 28526
ttaggtactcgacatcatcattgcagatacatcttccttgaagaatcgaactcttgcttttgctttcagctcaaccccgaaccttattactacattcatcggcccagttattgctggtatatacaatgaacacaaccgctggagatgggctttcgcggcatcggccatctttcttgtggttctctcaataccattattctgtatactcatcttgcatatgagaaaggcaagaagactcgggttattacggaaacataaaaaaacaaagatctggtctgtcgagcgatttcagcaatatttgatagaatttgatgttatgggaatggcaacccttagcgcgagtatgacactaatcttagttccgctttcgctcaccaataaatcaacggcaaatattaacctaaatgcgtacacgacaactatattactcggtgttgtttttctgatcttgttcgtcttccacgaacggaagactgaaaagccgtttttgaaattctcccttctttgctcgcgcaatgtagcaggtgcctgcctgttatctgttgtcatttttattgcatactttgcatgggatggctattacacgtcctacttacaagtggttcatggccttaacatcacacaagcgggctatattggccacatttacggcataggatcctcgatctgggcttttgtcgtggggtatcttattcgtcgttctgatcgctttaaatggcttgcagtagctgcactaccggtacatattctcggtggtgttctaatgattttttttcgtcgacccgacacacatattatctgggtcatactttgtcaagtacttataaccatcggcggaagcaccttagttgtgtgtgaccaaatggctgtcatgtctgtcgcgaaacataccgagttagcgtcagtcatggcgattttgtcactatctgcctatatcgggtcggctgtcggttcatcgctgagcggcgccatttggaactcaacacttcctggagccctcgctgagatgctcccgaatctgacccagatggaaattgaccagattgcgtcagatttaaagaagcagctgagttatcctatgggtagtgcaacgcgcgatgctataatcacagcttatggcacttctcaaatcagaatgtgtatcgcagggagtctcatatctcttctcgagatcgtggctgttttcatctggtccgatcgacgagttagtctttccacgcaggtcgctggaacggttctttgataccctgatagacatgaagacatcattacgtttttcagacttagaagacaatagctttgtgtagattgacttagcgctccattaaaccagagcctttgtcttctgactttgtgatacatatgctgaaacaggtataccaatattgactgtccaattctcaattagcgacaagcgcatcaatgtccccgaacagcgcattcattttac

SEQ ID NO: 28529 - DNA, 4053 bp, Muscodor strobelii
  misc_feature: SGI cDNA ID NO. 569787
  misc_feature: Reduced expression when VOC is produced
  misc_feature: Encodes the peptide sequence at SEQ ID NO 28530
atgggtgcgaagactggggacaacccagatacaagcattttgacgtcgaaggctcatgacgctgatggtcacaaagttcaagcggatggagaaaaagaaacgttaacttcaaaattttcaagtgctttcaacggcatttttcgttatttccacctgcttggctatgcggagccctccaaattggacatctctctgcttgtggtcggcaccatcacctcagtaggcgctggcataccttttcccatccttggtattcttttcggtcagcttgtcgatgatttgaacgatgcgacatgtgccgccaacgatgacacttcgagattaacgcgccgaactgattatcaaactgagataacgcaaaaagtcatccttgtcgttgccacagcattggcacaatgggcattgatctatatatattcagtatgttggaatctatttggggaaagactggcgcatagacttcgagagaagtattttcggtcgttactccgccaagaagtatcgtttttcgacaaattaccagcaggcgaggtctcatcgcgattgagtgctgacatcaataccatcaaaaatgggacatctgaaaaggtcggcgtatatctcggtgtttctgcactgttcgtcacctcatacatcattgctttcatcaagggtgctaggctcgccggcattcttgtttctctggtacccgctgcctttatcatgacaatcggtggtggccattatattggtaagtatgctacgcgtgcctcagaacacatcgcctctgcgtctgccattgccctggaaagcttgtcaaatgtcatggtcgttcatgctttcagagcaaacgaccgcctcgaggcgaagtttgccgctaagctcaaggctgcaaagagtgaagggttcaaaaaatcccttgccgctgcgatacaagctggacttctctattttatagccttttctgcatcggggttggcatattggcagggaagtcttagtattgcagacgtcgtcggcggccggaaccagaacgtaactgtcggatcaatatatacaatcatctttctcctagttgatgcttccattgtcatcagccaagtctcacaatatttacaaatatttagtgctgcatcagctgccctagagaagctcaaaagcgatatagatcgacaatccaaaatcgatggcacagttgaggtggcagagcgatcatgccaaatatcccagggcagtgttcaactcgacaacgtgacgtttacttatccttctcgtcctaatgttcctgttatacgcgatgtgtctctcgagtttcccgctgggcagacaactgcgatagttgggttgtcaggaagtggaaaatcgacagttgctggactcctgacgcgcctatatgaccctgacgctggcaagctacttgtagacgggcaagatatacagaacatcaacgtacgccagctcagaagctacattggacttgttcaacaagacccaatgcttctaaataggtccgtccttgagaacattgctctaggcttgatcaactcaccgcgcgaagagcattcgggtttccaaactattttacttggcactcagttatcacaggtcgcttctgaggtacgagcgggtaaaagccttcttgacgcaggcgaaatacatggtcccaagacggttgaagtcattcgtatggtccagcacgcggcggacttggctgatgcaggcgtattcctcgacaccttggagttcggacttggtactacagtgggaccaaacggagatttacttagtggtggtcaaaagcagcgggtagctctcgctagagctttagtcaaggacccaaagatcttagtgctggacgaagcgacttcatctttagattccgccagcgagcaacggattcaacaaggcattgaaaaggcatcggccggaagaaccgtcatatccattgcacatcggctcgcaactgtcaagaatgcccacaaaatcgttgttatgcgcaacggttccgtaacggagcaaggcaatcacattgacttgattgcgaaggacggagaatacgcagcactcgtgaggctccagaacatggggtccgagacttccagcgtgagcacagccaagggaagcaagcaatccgaaattgagatggaagtattatctgagaagttcaccaatgaagaggagcagaccgcctgcgaaaaggtcaaatccgagacgcaagatgaaaggagcaaaagctcaccaaaaactgacactcttgtcccagctacatcggtgcttgaaagaatgggatcacttacacggccccatctgctatatctgttctttgctttctttgcatcgctagttgtcggcgggacatatctcggctcagcattgatcttcggcaacactatcggggctctgagcccttgtcacaccgaacaggccatccgagcagctggaagccttttcggcatactcttcttcgtccttggaatcatagaattcttcgctaatgggactagctggtcgatatttgggctagttgcagagaaaatcctatatgtgcttcgaatcctctctttccgatctctattcgagcaggatttgcaatggcaccaatccgatgatcgaactccggcatccttgctgtcgtttatcacgagtgacactgccgctattggggccctaacaggttctatcattggaactatcttctcaattgctgtcaatttcatcggcgccatcatacttgctcacattgttgcctggaaaattgctgtggtatgtctcgcgatcgtacccctcatgcttggatcgggcattatgaggctgtggatcatttcaagttatgatgcgaaacacgaaaaggccttcgagggttctgtcgggattaccgttgaagctattacctcgattaaaactgtcgcggccttgtctttagaacaagaaatcctgggaaattaccatcgctcgctttccgggccccgcaccgaaatggttcgcacgattctctggtccaacgtctggctgtcgctctctatgagtctatctaatctcctctacgcgctcgtctactggtggggatccaaacaaattgttgctggactctacacacaaactcaatttttcattgttctgatctcactccttgtgagcgcgcagctttggggccagctcttcactctcgcgccagagattacaaaagccggacaagcagtaagtcgtgtttgcgatctcattgggcttggatcatcacagtctctacggactgttcagaagtcttcagaagacctcgaaaagactgcagattctgctcctcaatccccaccaggtggacacggccttgcagtacaatttaatcaagtcaaattctcttatccagcgcgacctaatcgtcaagttctgaaggggctcaatctagacgtccgaccaggccaattctgcgctctcgttggatctagtggtgcagggaagtccactatcatctcattattggagcgaatgtattctatagaatctggttctatcgaagtgggcggattcaatatcagtgccaagaaagagccagtatttcgagacgacattggccttgtgccccaggataacgtcttgtttgacgggactattgggttcaatgttgcgctcggggcccgcccaggagtcgaaccgacgaaggatgagattatagaagcatgcaagctcgcaaatttacacgagacaatcattgcgctacctgacggatatgatacgcaatgtggaaatagtggtggtcagctttcaggtggacagcgacaacgtctgtccattgcccgagctctcgtgcgcaaaccccgactgttgctacttgacgaatcgacaagtgctctggatgcagagtccgagcgactacttcaagacgggctcgaaaaagcgacacgtggaatcaccgttgtggccattgcacatcgacttcatactataaggcgggctgatgttattttcatgatcgaggacggccgatgcgtagagaagggctctcacgaggagctcatggttcgcagtgaaagttatcgagtaaatgtactgcaccagacattagactcaagggcatag

SEQ ID NO: 28530 - protein, 1350 aa, Muscodor strobelii
  misc_feature: SGI Peptide ID NO. 569787
  misc_feature (66)..(355): Pfam Id: PF00664 Pfam Desc: ABC transporter transmembrane region
  misc_feature (766)..(1046): Pfam Id: PF00664 Pfam Desc: ABC transporter transmembrane region
  misc_feature (1132)..(1319): Pfam Id: PF00005 Pfam Desc: ABC transporter
  misc_feature (434)..(661): Pfam Id: PF00005 Pfam Desc: ABC transporter
  misc_feature (49)..(1346): NCBI GI: 121711900 Blast Desc: ABC multidrug transporter SitT [Aspergillus clavatus NRRL 1] gi|119401717|gb|EAW12139.1| ABC multidrug transporter SitT [Aspergillus clavatus NRRL 1]
  misc_feature (49)..(1347): NCBI GI: 258575299 Blast Desc: UREG_01347 [Uncinocarpus reesii 1704] gi|237902097|gb|EEP76498.1| UREG_01347 [Uncinocarpus reesii 1704]
  misc_feature (49)..(1346): NCBI GI: 70986338 Blast Desc: ABC multidrug transporter SitT [Aspergillus fumigatus Af293] gi|66846292|gb|EAL86625.1| ABC multidrug transporter SitT [Aspergillus fumigatus Af293]
  misc_feature (49)..(1346): NCBI GI: 119474437 Blast Desc: ABC multidrug transporter SitT [Neosartorya fischeri NRRL 181] gi|119407247|gb|EAW17197.1| ABC multidrug transporter SitT [Neosartorya fischeri NRRL 181]
  misc_feature (49)..(1346): NCBI GI: 159128194 Blast Desc: ABC multidrug transporter SitT [Aspergillus fumigatus A1163]
  misc_feature (46)..(1346): NCBI GI: 154301191 Blast Desc: BC1G_10568 [Botryotinia fuckeliana B05.10] gi|150856316|gb|EDN31508.1| BC1G_10568 [Botryotinia fuckeliana B05.10]
  misc_feature (49)..(1346): NCBI GI: 242812750 Blast Desc: ABC multidrug transporter SitT [Talaromyces stipitatus ATCC 10500] gi|218714361|gb|EED13784.1| ABC multidrug transporter SitT [Talaromyces stipitatus ATCC 10500]
  misc_feature (49)..(1346): NCBI GI: 238508216 Blast Desc: ABC multidrug transporter SidT [Aspergillus flavus NRRL3357] gi|220688827|gb|EED45179.1| ABC multidrug transporter SidT [Aspergillus flavus NRRL3357]
  misc_feature (49)..(1347): NCBI GI: 154271358 Blast Desc: HCAG_08314 [Ajellomyces capsulatus NAm1] gi|150409202|gb|EDN04652.1| HCAG_08314 [Ajellomyces capsulatus NAm1]
  misc_feature (49)..(1346): NCBI GI: 169784602 Blast Desc: [Aspergillus oryzae RIB40] gi|83775509|dbj|BAE65629.1| protein product [Aspergillus oryzae]
  misc_feature (61)..(1337): SWISSPROT Homolog: EC 3.6.3.44 Xenobiotic-transporting ATPase
  misc_feature: Useful for introducing or modulating the production of volatile compounds
MGAKTGDNPDTSILTSKAHDADGHKVQADGEKETLTSKFSSAFNGIFRYFHLLGYAEPSKLDISLLVVGTITSVGAGIPFPILGILFGQLVDDLNDATCAANDDTSRLTRRTDYQTEITQKVILVVATALAQWALIYIYSVCWNLFGERLAHRLREKYFRSLLRQEVSFFDKLPAGEVSSRLSADINTIKNGTSEKVGVYLGVSALFVTSYIIAFIKGARLAGILVSLVPAAFIMTIGGGHYIGKYATRASEHIASASAIALESLSNVMVVHAFRANDRLEAKFAAKLKAAKSEGFKKSLAAAIQAGLLYFIAFSASGLAYWQGSLSIADVVGGRNQNVTVGSIYTIIFLLVDASIVISQVSQYLQIFSAASAALEKLKSDIDRQSKIDGTVEVAERSCQISQGSVQLDNVTFTYPSRPNVPVIRDVSLEFPAGQTTAIVGLSGSGKSTVAGLLTRLYDPDAGKLLVDGQDIQNINVRQLRSYIGLVQQDPMLLNRSVLENIALGLINSPREEHSGFQTILLGTQLSQVASEVRAGKSLLDAGEIHGPKTVEVIRMVQHAADLADAGVFLDTLEFGLGTTVGPNGDLLSGGQKQRVALARALVKDPKILVLDEATSSLDSASEQRIQQGIEKASAGRTVISIAHRLATVKNAHKIVVMRNGSVTEQGNHIDLIAKDGEYAALVRLQNMGSETSSVSTAKGSKQSEIEMEVLSEKFTNEEEQTACEKVKSETQDERSKSSPKTDTLVPATSVLERMGSLTRPHLLYLFFAFFASLVVGGTYLGSALIFGNTIGALSPCHTEQAIRAAGSLFGILFFVLGIIEFFANGTSWSIFGLVAEKILYVLRILSFRSLFEQDLQWHQSDDRTPASLLSFITSDTAAIGALTGSIIGTIFSIAVNFIGAIILAHIVAWKIAVVCLAIVPLMLGSGIMRLWIISSYDAKHEKAFEGSVGITVEAITSIKTVAALSLEQEILGNYHRSLSGPRTEMVRTILWSNVWLSLSMSLSNLLYALVYWWGSKQIVAGLYTQTQFFIVLISLLVSAQLWGQLFTLAPEITKAGQAVSRVCDLIGLGSSQSLRTVQKSSEDLEKTADSAPQSPPGGHGLAVQFNQVKFSYPARPNRQVLKGLNLDVRPGQFCALVGSSGAGKSTIISLLERMYSIESGSIEVGGFNISAKKEPVFRDDIGLVPQDNVLFDGTIGFNVALGARPGVEPTKDEIIEACKLANLHETIIALPDGYDTQCGNSGGQLSGGQRQRLSIARALVRKPRLLLLDESTSALDAESERLLQDGLEKATRGITVVAIAHRLHTIRRADVIFMIEDGRCVEKGSHEELMVRSESYRVNVLHQTLDSRA

SEQ ID NO: 28531 - DNA, 4827 bp, Muscodor strobelii
  misc_feature: SGI EST ID NO. CUFF.67202.0
  misc_feature: Variant of the nucleotide sequence at SEQ ID NO 28529
ccgtattccgccttcggcagcgagcacaagtggcggacggacccatcacttgcccattccaattacatttcatggtcgccaacgcattgtgttcgtcattacaccgtccataagttgtcaagtacacctgcgtacccagcagatcctagcgaccatgagttacttgccaagatgccaagctggtcccatcatggccaaagacccagaattgagagaaaacttcttgttctacctttaatgggcacatttcttttcaaatagtcattaatataggtccgtctggtccaattctgaacttttgatgcctctcaatcctcgtgggtcttcaataccgggtccttagctcctatgcaatgctaaacaaatccacatacaattacgtgatgaaattggttgcatactaccacatgtttctttctctcaatgacatagcagttttaccgtctctagtcccctctcgctatgcctgacttctaatattttcttgaacttgttgaagtgcgaagagcaggtcaaacacccgcgttcacgactagctgattgacgatgggtgcgaagactggggacaacccagatacaagcattttgacgtcgaaggctcatgacgctgatggtcacaaagttcaagcggatggagaaaaagaaacgttaacttcaaaattttcaagtgctttcaacggcatttttcgttatttccacctgcttggctatgcggagccctccaaattggacatctctctgcttgtggtcggcaccatcacctcagtaggcgctggcataccttttcccatccttggtattcttttcggtcagcttgtcgatgatttgaacgatgcgacatgtgccgccaacgatgacacttcgagattaacgcgccgaactgattatcaaactgagataacgcaaaaagtcatccttgtcgttgccacagcattggcacaatgggcattgatctatatatattcagtatgttggaatctatttggggaaagactggcgcatagacttcgagagaagtattttcggtcgttactccgccaagaagtatcgtttttcgacaaattaccagcaggcgaggtctcatcgcgattgagtgctgacatcaataccatcaaaaatgggacatctgaaaaggtcggcgtatatctcggtgtttctgcactgttcgtcacctcatacatcattgctttcatcaagggtgctaggctcgccggcattcttgtttctctggtacccgctgcctttatcatgacaatcggtggtggccattatattggtaagtatgctacgcgtgcctcagaacacatcgcctctgcgtctgccattgccctggaaagcttgtcaaatgtcatggtcgttcatgctttcagagcaaacgaccgcctcgaggcgaagtttgccgctaagctcaaggctgcaaagagtgaagggttcaaaaaatcccttgccgctgcgatacaagctggacttctctattttatagccttttctgcatcggggttggcatattggcagggaagtcttagtattgcagacgtcgtcggcggccggaaccagaacgtaactgtcggatcaatatatacaatcatctttctcctagttgatgcttccattgtcatcagccaagtctcacaatatttacaaatatttagtgctgcatcagctgccctagagaagctcaaaagcgatatagatcgacaatccaaaatcgatggcacagttgaggtggcagagcgatcatgccaaatatcccagggcagtgttcaactcgacaacgtgacgtttacttatccttctcgtcctaatgttcctgttatacgcgatgtgtctctcgagtttcccgctgggcagacaactgcgatagttgggttgtcaggaagtggaaaatcgacagttgctggactcctgacgcgcctatatgaccctgacgctggcaagctacttgtagacgggcaagatatacagaacatcaacgtacgccagctcagaagctacattggacttgttcaacaagacccaatgcttctaaataggtccgtccttgagaacattgctctaggcttgatcaactcaccgcgcgaagagcattcgggtttccaaactattttacttggcactcagttatcacaggtcgcttctgaggtacgagcgggtaaaagccttcttgacgcaggcgaaatacatggtcccaagacggttgaagtcattcgtatggtccagcacgcggcggacttggctgatgcaggcgtattcctcgacaccttggagttcggacttggtactacagtgggaccaaacggagatttacttagtggtggtcaaaagcagcgggtagctctcgctagagctttagtcaaggacccaaagatcttagtgctggacgaagcgacttcatctttagattccgccagcgagcaacggattcaacaaggcattgaaaaggcatcggccggaagaaccgtcatatccattgcacatcggctcgcaactgtcaagaatgcccacaaaatcgttgttatgcgcaacggttccgtaacggagcaaggcaatcacattgacttgattgcgaaggacggagaatacgcagcactcgtgaggctccagaacatggggtccgagacttccagcgtgagcacagccaagggaagcaagcaatccgaaattgagatggaagtattatctgagaagttcaccaatgaagaggagcagaccgcctgcgaaaaggtcaaatccgagacgcaagatgaaaggagcaaaagctcaccaaaaactgacactcttgtcccagctacatcggtgcttgaaagaatgggatcacttacacggccccatctgctatatctgttctttgctttctttgcatcgctagttgtcggcgggacatatctcggctcagcattgatcttcggcaacactatcggggctctgagcccttgtcacaccgaacaggccatccgagcagctggaagccttttcggcatactcttcttcgtccttggaatcatagaattcttcgctaatgggactagctggtcgatatttgggctagttgcagagaaaatcctatatgtgcttcgaatcctctctttccgatctctattcgagcaggatttgcaatggcaccaatccgatgatcgaactccggcatccttgctgtcgtttatcacgagtgacactgccgctattggggccctaacaggttctatcattggaactatcttctcaattgctgtcaatttcatcggcgccatcatacttgctcacattgttgcctggaaaattgctgtggtatgtctcgcgatcgtacccctcatgcttggatcgggcattatgaggctgtggatcatttcaagttatgatgcgaaacacgaaaaggccttcgagggttctgtcgggattaccgttgaagctattacctcgattaaaactgtcgcggccttgtctttagaacaagaaatcctgggaaattaccatcgctcgctttccgggccccgcaccgaaatggttcgcacgattctctggtccaacgtctggctgtcgctctctatgagtctatctaatctcctctacgcgctcgtctactggtggggatccaaacaaattgttgctggactctacacacaaactcaatttttcattgttctgatctcactccttgtgagcgcgcagctttggggccagctcttcactctcgcgccagagattacaaaagccggacaagcagtaagtcgtgtttgcgatctcattgggcttggatcatcacagtctctacggactgttcagaagtcttcagaagacctcgaaaagactgcagattctgctcctcaatccccaccaggtggacacggccttgcagtacaatttaatcaagtcaaattctcttatccagcgcgacctaatcgtcaagttctgaaggggctcaatctagacgtccgaccaggccaattctgcgctctcgttggatctagtggtgcagggaagtccactatcatctcattattggagcgaatgtattctatagaatctggttctatcgaagtgggcggattcaatatcagtgccaagaaagagccagtatttcgagacgacattggccttgtgccccaggataacgtcttgtttgacgggactattgggttcaatgttgcgctcggggcccgcccaggagtcgaaccgacgaaggatgagattatagaagcatgcaagctcgcaaatttacacgagacaatcattgcgctacctgacggatatgatacgcaatgtggaaatagtggtggtcagctttcaggtggacagcgacaacgtctgtccattgcccgagctctcgtgcgcaaaccccgactgttgctacttgacgaatcgacaagtgctctggatgcagagtccgagcgactacttcaagacgggctcgaaaaagcgacacgtggaatcaccgttgtggccattgcacatcgacttcatactataaggcgggctgatgttattttcatgatcgaggacggccgatgcgtagagaagggctctcacgaggagctcatggttcgcagtgaaagttatcgagtaaatgtactgcaccagacattagactcaagggcataggcctctatatttgtgcaacacagcatctactcagtcgagaaacactgataaatttgtaaaataaaaagtatatataatggacggattgactgctactggctggaattacttcaatcagaagatcgaagttgggagctgtatttataaaaatgccctttatctcctataaagtttcctaactcgaggttattgttccatgaggctcatttgatcaatggcacttctaaa

SEQ ID NO: 28532 - DNA, 1785 bp, Muscodor strobelii
  misc_feature: SGI cDNA ID NO. 569788
  misc_feature: Reduced expression when VOC is produced
  misc_feature: Encodes the peptide sequence at SEQ ID NO 28533
atgaaattcgctgctcttatgaccgccgccgtcctggctggcacctccaacgcccacttcggcggacatggaggccacggtggccacggccatggaatgggtggcccccacggtcttcctcacctcacaccggatatgcctgctcctgacgctgttcccgagagcaagcccgaagtcagctacaccgtccccgccgagctgcctactttcactcctaccactctgaaagcacccttcctcgagcaattcacagacgactgggagaccaggtggaagccttcccacgccaagaaggacacaaagggctctgacaccgaagaggagtgggcgtacgtgggtgagtgggctgttgaggagccctaccaatacagcggtcttgtcggtgacaagagcttggttgccaagaacgccgctgcccaccacgccatctcggcccagttccccaagaagatcgaccccaagggcaagacgctcgtcgtccagtatgaggtcaagctgcagaagggtctggaatgcggcggtgcctacatgaagctcttgcgtgacaccaaggctctgaagaaggatgagttcagcaatgcctctccctatgtcatcatgttcggccccgacaagtgcggccacaacaacaaggtgcacttcatcttcaaccacaagaaccccaagactggcgagtacgaggagaagcacttgacttcccctcctgtcgccaccttggacaaggcctccaacctctacaccttgattgtccagcccaacaacaccttcaccatccagaagaacggtgagactgcccgagagggcagcctgctggagcagtttagccccgccgtcactcccgatgaggagattgacgaccctaaggatgagaagcctgaggactgggttgatgtctcccgaatccccgaccctgaagctaagaagcccgaggattgggacgaggatgccccatacgagattgttgacgaggatgccgagaagcctgaggactggctcgagtctgagcccctcactgtccccgacccggatgccgagaagcccgtcgattgggatgacgaggaagacggcgactgggttgcccctaccgtccccaaccccaagtgcgccgatgtctctggctgtggcccctggtcgaagcctatgatcaagaaccctgactacaagggcaagtggacggcgccatacattgacaaccccgagttcaagggtccttgggctccccgcaagatcaagaaccccgattacttcgaggacaagacccctgccaacttcgagcccatgggtgctattggtttcgagctctggactatgcaggctgacatttctttcgacaatatctacattggtcactctgttgatgacgccaagaagcttgctgatgagactttcttcgtcaagtaccctgttgagaaggcccttgagcaagctgagaagcctgtcaaggaagacaagcccgcatcaccctccgacctcaagttccttgacaaccccctattctatatcaaggagaagttggacctcttcttgaccattgccgccaaggaccctgttgaggctatcaagtttgttcctgaggttcctgctaccgtggtctcacttgtagtcctcgtcattggtggtatccttgctctcaccggtggcagcgcccccgcgcccgtcaagaaggctgccgcggatgtgaaggagacggcagagaaggctgccgaggctgtcgccaccggcgccgacaagggcgtcgagaaggtcaaggaagctactaagcgtaccacgcgagcttcgtcataa

SEQ ID NO: 28533 - protein, 594 aa, Muscodor strobelii
  misc_feature: SGI Peptide ID NO. 569788
  misc_feature (77)..(448): Pfam Id: PF00262 Pfam Desc: Calreticulin family
  misc_feature (67)..(560): NCBI GI: 171696130 Blast Desc: protein product [Podospora anserina] gi|170948307|emb|CAP60471.1| protein product [Podospora anserina]
  misc_feature (66)..(594): NCBI GI: 116181716 Blast Desc: CHGG_01486 [Chaetomium globosum CBS 148.51] gi|88185783|gb|EAQ93251.1| CHGG_01486 [Chaetomium globosum CBS 148.51]
  misc_feature (63)..(594): NCBI GI: 208658295 Blast Desc: calreticulin [Beauveria bassiana]
  misc_feature (64)..(594): NCBI GI: 38567017 Blast Desc: calcium-binding protein precursor cnx1 [Neurospora crassa]
  misc_feature (58)..(594): NCBI GI: 46107216 Blast Desc: FG00491.1 [Gibberella zeae PH-1]
  misc_feature (54)..(594): NCBI GI: 256734542 Blast Desc: [Nectria haematococca mpVI 77-13-4]
  misc_feature (66)..(594): NCBI GI: 39951929 Blast Desc: MGG_01607 [Magnaporthe grisea 70-15] gi|145020545|gb|EDK04674.1| MGG_01607 [Magnaporthe grisea 70-15]
  misc_feature (14)..(594): NCBI GI: 156057907 Blast Desc: calreticulin [Sclerotinia sclerotiorum 1980] gi|154702470|gb|EDO02209.1| calreticulin [Sclerotinia sclerotiorum 1980]
  misc_feature (66)..(593): NCBI GI: 154323366 Blast Desc: calnexin precursor [Botryotinia fuckeliana B05.10] gi|150842311|gb|EDN17504.1| calnexin precursor [Botryotinia fuckeliana B05.10]
  misc_feature (64)..(594): NCBI GI: 164423065 Blast Desc: NCU09265 [Neurospora crassa OR74A] gi|157069933|gb|EAA35464.2| NCU09265 [Neurospora crassa OR74A]
  misc_feature: Useful for introducing or modulating the production of volatile compounds
MKFAALMTAAVLAGTSNAHFGGHGGHGGHGHGMGGPHGLPHLTPDMPAPDAVPESKPEVSYTVPAELPTFTPTTLKAPFLEQFTDDWETRWKPSHAKKDTKGSDTEEEWAYVGEWAVEEPYQYSGLVGDKSLVAKNAAAHHAISAQFPKKIDPKGKTLVVQYEVKLQKGLECGGAYMKLLRDTKALKKDEFSNASPYVIMFGPDKCGHNNKVHFIFNHKNPKTGEYEEKHLTSPPVATLDKASNLYTLIVQPNNTFTIQKNGETAREGSLLEQFSPAVTPDEEIDDPKDEKPEDWVDVSRIPDPEAKKPEDWDEDAPYEIVDEDAEKPEDWLESEPLTVPDPDAEKPVDWDDEEDGDWVAPTVPNPKCADVSGCGPWSKPMIKNPDYKGKWTAPYIDNPEFKGPWAPRKIKNPDYFEDKTPANFEPMGAIGFELWTMQADISFDNIYIGHSVDDAKKLADETFFVKYPVEKALEQAEKPVKEDKPASPSDLKFLDNPLFYIKEKLDLFLTIAAKDPVEAIKFVPEVPATVVSLVVLVIGGILALTGGSAPAPVKKAAADVKETAEKAAEAVATGADKGVEKVKEATKRTTRASS

SEQ ID NO: 28534 - DNA, 2444 bp, Muscodor strobelii
  misc_feature: SGI EST ID NO. CUFF.67230.0
  misc_feature: Variant of the nucleotide sequence at SEQ ID NO 28532
cttaagtgactttatccagccacgccccagtcagacagctctccccacgtacctacctcacgcttagcttatcactctcgcagccaaaaaggccacgttggtgcttctctgcttctcctccaaggccagtgcaattacggcggtttcgcacgcacgcagaccaccataaattccaattcactgcctctcttccccatataatcattgtctctcccccctctccaatcccgccaggagattcttttttttctcccttgtagctctgggagcccatctatcattacgcaacctccatcgtcaacctccttactgacgtcgtcgcgtgtaggctttagctgtctaccaccggccattgctgtcgtcgcctctcacccctcgtttctcaattgattccacacacccgcggcaaacatgaaattcgctgctcttatgaccgccgccgtcctggctggcacctccaacgcccacttcggcggacatggaggccacggtggccacggccatggaatgggtggcccccacggtcttcctcacctcacaccggatatgcctgctcctgacgctgttcccgagagcaagcccgaagtcagctacaccgtccccgccgagctgcctactttcactcctaccactctgaaagcacccttcctcgagcaattcacagacgactgggagaccaggtggaagccttcccacgccaagaaggacacaaagggctctgacaccgaagaggagtgggcgtacgtgggtgagtgggctgttgaggagccctaccaatacagcggtcttgtcggtgacaagagcttggttgccaagaacgccgctgcccaccacgccatctcggcccagttccccaagaagatcgaccccaagggcaagacgctcgtcgtccagtatgaggtcaagctgcagaagggtctggaatgcggcggtgcctacatgaagctcttgcgtgacaccaaggctctgaagaaggatgagttcagcaatgcctctccctatgtcatcatgttcggccccgacaagtgcggccacaacaacaaggtgcacttcatcttcaaccacaagaaccccaagactggcgagtacgaggagaagcacttgacttcccctcctgtcgccaccttggacaaggcctccaacctctacaccttgattgtccagcccaacaacaccttcaccatccagaagaacggtgagactgcccgagagggcagcctgctggagcagtttagccccgccgtcactcccgatgaggagattgacgaccctaaggatgagaagcctgaggactgggttgatgtctcccgaatccccgaccctgaagctaagaagcccgaggattgggacgaggatgccccatacgagattgttgacgaggatgccgagaagcctgaggactggctcgagtctgagcccctcactgtccccgacccggatgccgagaagcccgtcgattgggatgacgaggaagacggcgactgggttgcccctaccgtccccaaccccaagtgcgccgatgtctctggctgtggcccctggtcgaagcctatgatcaagaaccctgactacaagggcaagtggacggcgccatacattgacaaccccgagttcaagggtccttgggctccccgcaagatcaagaaccccgattacttcgaggacaagacccctgccaacttcgagcccatgggtgctattggtttcgagctctggactatgcaggctgacatttctttcgacaatatctacattggtcactctgttgatgacgccaagaagcttgctgatgagactttcttcgtcaagtaccctgttgagaaggcccttgagcaagctgagaagcctgtcaaggaagacaagcccgcatcaccctccgacctcaagttccttgacaaccccctattctatatcaaggagaagttggacctcttcttgaccattgccgccaaggaccctgttgaggctatcaagtttgttcctgaggttcctgctaccgtggtctcacttgtagtcctcgtcattggtggtatccttgctctcaccggtggcagcgcccccgcgcccgtcaagaaggctgccgcggatgtgaaggagacggcagagaaggctgccgaggctgtcgccaccggcgccgacaagggcgtcgagaaggtcaaggaagctactaagcgtaccacgcgagcttcgtcataagccggtagtttgacaagagcgtaacaaagtaggccgtagagaaacgaactgtgtcttgtccatgacgacaaagaaaagccagaaattgtgtgatggttggtcatcgctgtactaagggtcaactggcgcggcgcagatgtattgataccacgaaaagaattagggattttattattttgttcagcatctgaaataaggtcatgtttaaatctaaatagatggttgtgatccgtaatggccgcccgttc

SEQ ID NO: 28535 - DNA, 786 bp, Muscodor strobelii
  misc_feature: SGI cDNA ID NO. 569789
  misc_feature: Encodes the peptide sequence at SEQ ID NO 28536
atgagtgcacagggaggtcaaacaaacaacgatagcctggtgttgtcagacaatcacgatcacccggcgaacctcattccctcgctatgtgctaaattctggaccctgggctgggtgacagggacaggtggagggtgctcgattcgcgatggtgatctagtgtacatagcaccgtcgggcgtgcaaaaggagctcatgaaagcttccgatctctacgtcctgtcgatcgagcagcaacagggagacttcaaaaaccgcacgtacgtgcgctcaccacacgacggaaggccttcgcagtgcacgccgctgtttcttgcagctttcacgagacgtggtgcaggatgctgcatccacacgcactctcaatgggcggtgctcgtaacgctcttgcttgaggcgcaagaacctggccgtgacaaggtgtttgagatcaacaacattgagcagatcaagggctttggccgtggtgtccagaaatctggtaatttgggctatcacgatacgctgcgcatccctgtcattgagaatacggcgcatgaggaagatctgactgagttccttgaggaggcgatggataagtatcctgatacttatgctgttcttgtccggagacatggtgtttatgtttggggggacaatgtgcacaaggcgaagactatgtgtgagagtcttgattatctatttcaattagcagttgagatgaaaaagcttggtatcccatggataagtgacgtcgcagagactctaccaacgtctaaggagggagtcaagaagcaaaaaatatag

SEQ ID NO: 28536 - protein, 261 aa, Muscodor strobelii
  misc_feature: SGI Peptide ID NO. 569789
  misc_feature (24)..(254): Pfam Id: PF00596 Pfam Desc: Class II Aldolase and Adducin N-terminal domain
  misc_feature (1)..(250): NCBI GI: 46107220 Blast Desc: FG00493.1 [Gibberella zeae PH-1]
  misc_feature (2)..(250): NCBI GI: 116181714 Blast Desc: conserved [Chaetomium globosum CBS 148.51] gi|88185782|gb|EAQ93250.1| conserved [Chaetomium globosum CBS 148.51]
  misc_feature (1)..(254): NCBI GI: 171696132 Blast Desc: protein product [Podospora anserina] gi|170948308|emb|CAP60472.1| protein product [Podospora anserina]
  misc_feature (11)..(253): NCBI GI: 85114445 Blast Desc: NCU09264 [Neurospora crassa OR74A] gi|28926490|gb|EAA35463.1| NCU09264 [Neurospora crassa OR74A] gi|38567016|emb|CAE76315.1| conserved [Neurospora crassa]
  misc_feature (9)..(245): NCBI GI: 154323368 Blast Desc: BC1G_00083 [Botryotinia fuckeliana B05.10] gi|150842312|gb|EDN17505.1| BC1G_00083 [Botryotinia fuckeliana B05.10]
  misc_feature (9)..(245): NCBI GI: 156057905 Blast Desc: SS1G_04684 [Sclerotinia sclerotiorum 1980] gi|154702469|gb|EDO02208.1| SS1G_04684 [Sclerotinia sclerotiorum 1980]
  misc_feature (8)..(222): NCBI GI: 39951931 Blast Desc: MGG_01608 [Magnaporthe grisea 70-15] gi|145020544|gb|EDK04673.1| MGG_01608 [Magnaporthe grisea 70-15]
  misc_feature (9)..(242): NCBI GI: 154275210 Blast Desc: class II aldolase/adducin domain protein [Ajellomyces capsulatus NAm1] gi|150414896|gb|EDN10258.1| class II aldolase/adducin domain protein [Ajellomyces capsulatus NAm1] II
  misc_feature (9)..(242): NCBI GI: 225558990 Blast Desc: class II Aldolase and Adducin N-terminal domain-containing protein [Ajellomyces capsulatus G186AR]
  misc_feature (9)..(242): NCBI GI: 225682527 Blast Desc: APAF1-interacting protein [Paracoccidioides brasiliensis Pb03]
  misc_feature (91)..(237): SWISSPROT Homolog: EC 4.2.1.109 Methylthioribulose 1-phosphate dehydratase
MSAQGGQTNNDSLVLSDNHDHPANLIPSLCAKFWTLGWVTGTGGGCSIRDGDLVYIAPSGVQKELMKASDLYVLSIEQQQGDFKNRTYVRSPHDGRPSQCTPLFLAAFTRRGAGCCIHTHSQWAVLVTLLLEAQEPGRDKVFEINNIEQIKGFGRGVQKSGNLGYHDTLRIPVIENTAHEEDLTEFLEEAMDKYPDTYAVLVRRHGVYVWGDNVHKAKTMCESLDYLFQLAVEMKKLGIPWISDVAETLPTSKEGVKKQKI

SEQ ID NO: 28537 - DNA, 2225 bp, Muscodor strobelii
  misc_feature: SGI EST ID NO. CUFF.67267.0
  misc_feature: Variant of the nucleotide sequence at SEQ ID NO 28535
caacagctctgtgtttataacacctgctcagaaataccctgtcatgatagcatagaggaacttgactgttgcaatcatgagtgcacagggaggtcaaacaaacaacgatagcctggtgttgtcagacaatcacgatcacccggcgaacctcattccctcgctatgtgctaaattctggaccctgggctgggtgacagggacaggtggagggtgctcgattcgcgatggtgatctagtgtacatagcaccgtcgggcgtgcaaaaggagctcatgaaagcttccgatctctacgtcctgtcgatcgagcagcaacagggagacttcaaaaaccgcacgtacgtgcgctcaccacacgacggaaggccttcgcagtgcacgccgctgtttcttgcagctttcacgagacgtggtgcaggatgctgcatccacacgcactctcaatgggcggtgctcgtaacgctcttgcttgaggcgcaagaacctggccgtgacaaggtgtttgagatcaacaacattgagcagatcaagggctttggccgtggtgtccagaaatctggtaatttgggctatcacgatacgctgcgcatccctgtcattgagaatacggcgcatgaggaagatctgactgagttccttgaggaggcgatggataagtatcctgatacttatgctgttcttgtccggagacatggtgtttatgtttggggggacaatgtgcacaaggcgaagactatgtgtgagagtcttgattatctatttcaattagcagttgagatgaaaaagcttggtatcccatggataagtgacgtcgcagagactctaccaacgtctaaggagggagtcaagaagcaaaaaatatagctctgtcagcaggaggttcggcattcacatgctccaaaagcctagcaacagctcatgaataaatcaacattcttcatttgtattcaaatttcacaaagtgccttcggtctgatttataaaacaaggtatcgccccatctactcatcaacagcgtcacgatcttgttcttcttcgctaatccaagtcctctcacaatggcaatatagaagtatcatgccaaatctttgatcctcccttcttagcgggttcataatatcgtgaagctgatagatgaaaggtccatgtttaaatgcgtgtccacttctcaatcaagttcaccaagagcagtgttttgcctcacagcagtaacccggcgattagaccgaatagacccagaccagcgggtccatagacggctgcagcaccatgggaggacgaggtagtggtatctgagtccgagtctgagtttgagccagtttgagaagcagccggatgaacagtgctagaaaccgacgtgaccagagtggaaccgctctgagtgatcgtggtcttcacttctgtgaccgtagcactggcagtgctgccactgccgctggcggtgctgctcgagccagagcctgagccaggagcggcagtggagagatttggggtgttcccgtctcggtgtagtagtattggccaatgcatccgttcacgcagtcggcatatttcttgttgtcggcagcggtgccgctacccttaggacaagcagccacgcaggcattggtggcgttcacattcgcggtgtcaggactcgggacggcaatacaatgagctcggcacgcggtgtcactatcgtcacctgtgaagtgtggtcagcgtattcgatcatggagtatcatgctatttccgtgttctttggatgttatagctacttacacttcttgagacattccgtcatcgcagaatcagcagagctctgagccgcactgacgctaacggtggaggttgcagcatctgtggaagttgaggactctgcattgacagcaatgacgaacaaaccagcggcaatgaaagtagtgaaacgcatcttgattatatggctgaattaagatattatggaataatgcaagtgtattattgtatatatctcgttgtatggtccagcgattgtataagcgacgaaagatgaacaatgacagtttaattgctcattaaatagaagcgagcgatagtcaggagaaaatcgagaaggagagtctacgaggagtaataaaacacgggggcagttagggagatagaagaggatgaagaacagctacgggagttgagggacggtacttgtctaataaaaagaaatcatataagacgccagagggtatcagtcgtctataccaaactgccc

SEQ ID NO: 28538 - DNA, 441 bp, Muscodor strobelii
  misc_feature: SGI cDNA ID NO. 569790
  misc_feature: Reduced expression when VOC is produced
  misc_feature: Encodes the peptide sequence at SEQ ID NO 28539
atgcgtttcactactttcattgccgctggtttgttcgtcattgctgtcaatgcagagtcctcaacttccacagatgctgcaacctccaccgttagcgtcagtgcggctcagagctctgctgattctgcgatgacggaatgtctcaagaagtgtgacgatagtgacaccgcgtgccgagctcattgtattgccgtcccgagtcctgacaccgcgaatgtgaacgccaccaatgcctgcgtggctgcttgtcctaagggtagcggcaccgctgccgacaacaagaaatatgccgactgcgtgaacggatgcattggccaatactactacaccgagacgggaacaccccaaatctctccactgccgctcctggctcaggctctggctcgagcagcaccgccagcggcagtggcagcactgccagtgctacggtcacagaagtga

SEQ ID NO: 28539 - protein, 146 aa, Muscodor strobelii
  misc_feature: SGI Peptide ID NO. 569790
  misc_feature (1)..(116): NCBI GI: 116181712 Blast Desc: CHGG_01484 [Chaetomium globosum CBS 148.51] gi|88185781|gb|EAQ93249.1| CHGG_01484 [Chaetomium globosum CBS 148.51]
  misc_feature (1)..(112): NCBI GI: 85114440 Blast Desc: NCU09263 [Neurospora crassa OR74A] gi|28926489|gb|EAA35462.1| [Neurospora crassa OR74A] gi|38567015|emb|CAE76314.1| conserved [Neurospora crassa]
  misc_feature (1)..(121): NCBI GI: 46107218 Blast Desc: FG00492.1 [Gibberella zeae PH-1]
  misc_feature (1)..(116): NCBI GI: 256734541 Blast Desc: NECHADRAFT_98822 [Nectria haematococca mpVI 77-13-4]
  misc_feature (1)..(116): NCBI GI: 39951933 Blast Desc: [Magnaporthe grisea 70-15] gi|145020543|gb|EDK04672.1| [Magnaporthe grisea 70-15]
  misc_feature (1)..(114): NCBI GI: 238483463 Blast Desc: conserved [Aspergillus flavus NRRL3357] gi|220701020|gb|EED57358.1| conserved [Aspergillus flavus NRRL3357]
  misc_feature (1)..(114): NCBI GI: 169766700 Blast Desc: [Aspergillus oryzae RIB40] gi|83765676|dbj|BAE55819.1| protein product [Aspergillus oryzae]
  misc_feature (47)..(112): NCBI GI: 225562912 Blast Desc: conserved [Ajellomyces capsulatus G186AR]
  misc_feature (47)..(112): NCBI GI: 240279737 Blast Desc: conserved [Ajellomyces capsulatus H143]
  misc_feature (1)..(114): NCBI GI: 119497163 Blast Desc: NFIA_021580 [Neosartorya fischeri NRRL 181] gi|119413508|gb|EAW23449.1| conserved [Neosartorya fischeri NRRL 181]
  misc_feature: Useful for introducing or modulating the production of volatile compounds
MRFTTFIAAGLFVIAVNAESSTSTDAATSTVSVSAAQSSADSAMTECLKKCDDSDTACRAHCIAVPSPDTANVNATNACVAACPKGSGTAADNKKYADCVNGCIGQYYYTETGTPQISPLPLLAQALARAAPPAAVAALPVLRSQK

SEQ ID NO: 28540 - DNA, 2448 bp, Muscodor strobelii
  misc_feature: SGI EST ID NO. CUFF.67268.1
  misc_feature: Variant of the nucleotide sequence at SEQ ID NO 28538
gtctagggaagtgcaaaacaagacgaaaagagaattggactttgcatgtgcaatgagataaaccaggtactgaataccttgatttacttatgcgtgtactcaaccttcccgtcgcagtacagcctatgccgtgagccgatcgtgccggtgctcctgtatatggtctgggcagtttggtatagacgactgataccctctggcgtcttatatgatttctttttattagacaagtaccgtccctcaactcccgtagctgttcttcatcctcttctatctccctaactgcccccgtgttttattactcctcgtagactctccttctcgattttctcctgactatcgctcgcttctatttaatgagcaattaaactgtcattgttcatctttcgtcgcttatacaatcgctggaccatacaacgagatatatacaataatacacttgcattattccataatatcttaattcagccatataatcaagatgcgtttcactactttcattgccgctggtttgttcgtcattgctgtcaatgcagagtcctcaacttccacagatgctgcaacctccaccgttagcgtcagtgcggctcagagctctgctgattctgcgatgacggaatgtctcaagaagtgtgacgatagtgacaccgcgtgccgagctcattgtattgccgtcccgagtcctgacaccgcgaatgtgaacgccaccaatgcctgcgtggctgcttgtcctaagggtagcggcaccgctgccgacaacaagaaatatgccgactgcgtgaacggatgcattggccaatactactacaccgagacgggaacaccccaaatctctccactgccgctcctggctcaggctctggctcgagcagcaccgccagcggcagtggcagcactgccagtgctacggtcacagaagtgaagaccacgatcactcagagcggttccactctggtcacgtcggtttctagcactgttcatccggctgcttctcaaactggctcaaactcagactcggactcagataccactacctcgtcctcccatggtgctgcagccgtctatggacccgctggtctgggtctattcggtctaatcgccgggttactgctgtgaggcaaaacactgctcttggtgaacttgattgagaagtggacacgcatttaaacatggacctttcatctatcagcttcacgatattatgaacccgctaagaagggaggatcaaagatttggcatgatacttctatattgccattgtgagaggacttggattagcgaagaagaacaagatcgtgacgctgttgatgagtagatggggcgataccttgttttataaatcagaccgaaggcactttgtgaaatttgaatacaaatgaagaatgttgatttattcatgagctgttgctaggcttttggagcatgtgaatgccgaacctcctgctgacagagctatattttttgcttcttgactccctccttagacgttggtagagtctctgcgacgtcacttatccatgggataccaagctttttcatctcaactgctaattgaaatagataatcaagactatcaaaaatatcctaggttagcacagtacgcgatgcaaaaaccatagtctgtccacttacctctcacacatagtcttcgccttgtgcacattgtccccccaaacataaacaccatgtctccggacaagaacagcataagtatcaggatacttatccatcgcctcctcaaggaactcagtcagatcttcctcatgcgccgtattctcaatgacagggatgcgcagcgtatcgtgatagcccaaattaccagatttctggacaccacggccaaagcccttgatctgctcaatgttgttgatctcaaacaccttgtcacggccaggttcttgcgcctcaagcaagagcgttacgagcaccgcccattgagagtgcgtgtggatgcagcatcctgcaccacgtctcgtgaaagctgcaagaaacagcggcgtgcactgcgaaggccttccgtcgtgtggtgagcgcacgtacgtgcggtttttgaagtctccctgttgctgctcgatcgacaggacgtagagatcggaagctttcatgagctccttttgcacgcccgacggtgctatgtacactagatcactgtatgcaatcagtactccgaaatgctctggtttcgacttacatcgattggatgagagatgcgaatcctacccatcgcgaatcgagcaccctccacctgtccctgtcacccagcccagggtccagaatttagcacatagcgagggaatgaggttcgccgggtgatcgtgattgtctgacaacaccaggctatcgttgtttgtttgacctccctgtgcactcatgattgcaacagtcaagttcctctatgctatcatgacagggtatttctgagcaggtgttataaacacagagctgttg

SEQ ID NO: 28541 - DNA, 747 bp, Muscodor strobelii
  misc_feature: SGI cDNA ID NO. 569791
  misc_feature: Encodes the peptide sequence at SEQ ID NO 28542
atgcctcgtgtcaagtacgtcctgctcgactgcgacaacaccctctgcttgtcagagcgtctggctttcgaggcctgcaccgacttgaccaaccaggtcctcgagaaatggggcaagcccgagcgctacaccgtcgaccagcttcttgaggacttcgtcggccacaacttccgtggcatgctcgtcggcctccagaagaagcatggcttcaccatgaccgacgccgaagtcgacaactatgtcggtcgtgagctcggtgccgtcaccgccaagctgagcgagaagtgcactgtctgccctggtgtccctgagcagcttgaggctctcaagcagcagggctaccccatgtctgttgtcagcacctccgccaagccccgcgttgtcgcctccctcaagaagaccggcattgaccacttcttccccgatgagcacgtctacagtgctgccaccagcctgaaccccccctccagcaagcctgaccccaagatctacaactacgcctgcgagcagctgggcgtcaagaactctgagtgtgtcactgtcgaggacagcaagagcggagctaccgcggccatgcgcgctggcatccctctcatcggctacgttggcgtctacggcattgaggagggtcccgagaagatggagcagatggccaagctcctgaccgagcagtgcaacgccaatgtcatcatgtacgactggaaggagttccccgaatgcctgaagaaaattgaggccggcttgtaa

SEQ ID NO: 28542 - protein, 248 aa, Muscodor strobelii
  misc_feature: SGI Peptide ID NO. 569791
  misc_feature (4)..(204): Pfam Id: PF00702 Pfam Desc: haloacid dehalogenase-like hydrolase
  misc_feature (1)..(248): NCBI GI: 189206031 Blast Desc: HAD-superfamily hydrolase [Pyrenophora tritici-repentis Pt-1C-BFP] gi|187975443|gb|EDU42069.1| HAD-superfamily hydrolase [Pyrenophora tritici-repentis
  misc_feature (1)..(248): NCBI GI: 169611330 Blast Desc: SNOG_08775 [Phaeosphaeria nodorum SN15] gi|111062823|gb|EAT83943.1| SNOG_08775 [Phaeosphaeria nodorum SN15]
  misc_feature (1)..(245): NCBI GI: 169778161 Blast Desc: [Aspergillus oryzae RIB40] gi|238495436|ref|XP_002378954.1| HAD superfamily hydrolase, [Aspergillus flavus NRRL3357] gi|83772283|dbj|BAE62413.1| protein
  misc_feature (1)..(245): NCBI GI: 115433520 Blast Desc: conserved [Aspergillus terreus NIH2624] gi|114189749|gb|EAU31449.1| conserved [Aspergillus terreus NIH2624]
  misc_feature (1)..(245): NCBI GI: 242793078 Blast Desc: HAD superfamily hydrolase, [Talaromyces stipitatus ATCC 10500] gi|218718677|gb|EED18097.1| HAD superfamily hydrolase, [Talaromyces stipitatus ATCC 10500]
  misc_feature (1)..(245): NCBI GI: 67901446 Blast Desc: AN7710.2 [Aspergillus nidulans FGSC A4] gi|40742035|gb|EAA61225.1| AN7710.2 [Aspergillus nidulans FGSC A4] gi|259484056|tpe|CBF79952.1| TPA: HAD-superfamily hydrolase
  misc_feature (1)..(247): NCBI GI: 121713224 Blast Desc: HAD superfamily hydrolase, [Aspergillus clavatus NRRL 1] gi|119402376|gb|EAW12797.1| HAD superfamily hydrolase, [Aspergillus clavatus NRRL 1]
  misc_feature (1)..(245): NCBI GI: 70998160 Blast Desc: HAD superfamily hydrolase [Aspergillus fumigatus Af293] gi|66851445|gb|EAL91771.1| HAD superfamily hydrolase, [Aspergillus fumigatus Af293] gi|159126456|gb|EDP51572.1| HAD
  misc_feature (1)..(247): NCBI GI: 119181748 Blast Desc: CIMG_05955 [Coccidioides immitis RS]
  misc_feature (1)..(247): NCBI GI: 145235371 Blast Desc: An03g04530 [Aspergillus niger] gi|134058016|emb|CAK38245.1| protein product [Aspergillus niger]
  misc_feature (7)..(222): SWISSPROT Homolog: EC 3.1.3.18 Phosphoglycolate phosphatase
MPRVKYVLLDCDNTLCLSERLAFEACTDLTNQVLEKWGKPERYTVDQLLEDFVGHNFRGMLVGLQKKHGFTMTDAEVDNYVGRELGAVTAKLSEKCTVCPGVPEQLEALKQQGYPMSVVSTSAKPRVVASLKKTGIDHFFPDEHVYSAATSLNPPSSKPDPKIYNYACEQLGVKNSECVTVEDSKSGATAAMRAGIPLIGYVGVYGIEEGPEKMEQMAKLLTEQCNANVIMYDWKEFPECLKKIEAGL

SEQ ID NO: 28543 - DNA, 1510 bp, Muscodor strobelii
  misc_feature: SGI EST ID NO. CUFF.67240.0
  misc_feature: Variant of the nucleotide sequence at SEQ ID NO 28541
ttgccctgaagtggttcgattgaaatgcccgatcttcaatcttctgcccgattgaacgtgctttccttctcctgaattcgccccgctgggcaatacacgtaaggtgccagccaatgctctggaaaatgataactgcccaaccgttgccccgccgagcccacaacactattttactagttcacgaggggtcaagttgaacttacctgtctacaccatcatcagcttgctgagaaccatctttcatccttgatctactgcgttgttgatagagatctgattcttctgcttcattgatcttgtcgactgctgctgtctactatacacactatctctgcaattgtttagagcacgcaagcgtcctctatccatcaccaacccaatatctagttctcagttggcattccttcgagatctccaccatgcctcgtgtcaagtacgtcctgctcgactgcgacaacaccctctgcttgtcagagcgtctggctttcgaggcctgcaccgacttgaccaaccaggtcctcgagaaatggggcaagcccgagcgctacaccgtcgaccagcttcttgaggacttcgtcggccacaacttccgtggcatgctcgtcggcctccagaagaagcatggcttcaccatgaccgacgccgaagtcgacaactatgtcggtcgtgagctcggtgccgtcaccgccaagctgagcgagaagtgcactgtctgccctggtgtccctgagcagcttgaggctctcaagcagcagggctaccccatgtctgttgtcagcacctccgccaagccccgcgttgtcgcctccctcaagaagaccggcattgaccacttcttccccgatgagcacgtctacagtgctgccaccagcctgaaccccccctccagcaagcctgaccccaagatctacaactacgcctgcgagcagctgggcgtcaagaactctgagtgtgtcactgtcgaggacagcaagagcggagctaccgcggccatgcgcgctggcatccctctcatcggctacgttggcgtctacggcattgaggagggtcccgagaagatggagcagatggccaagctcctgaccgagcagtgcaacgccaatgtcatcatgtacgactggaaggagttccccgaatgcctgaagaaaattgaggccggcttgtaagtcgcctacaagcaaaggcaccagcgataccgccccgccaattgctatgactggactgagataatgagtgacgacaatcaggaattacgaaaatacacccgcagtgaagctttaagtctggcccgctaccggatcaatgctgaccacgcttggggagaatagacaggaaaactagatacatgatgagcatagatgggtttgatcatagatctctctagacaacacatgctgatctttcctgacaccgactctctgcaatagtgatgaagtgcttgaatcgtttagttgcccttgcttgtagttctataccctggcactggatggtgaaatcgattttatgccca

SEQ ID NO: 28544 - DNA, 621 bp, Muscodor strobelii
  misc_feature: SGI cDNA ID NO. 569792
  misc_feature: Encodes the peptide sequence at SEQ ID NO 28545
atggaccaaccagagccctccaatgacgcagctaccgatgaattacctcagccaacatatcgaagacgcaggctggccaaaagctgcattagtaacaatttcacgaaacgagccatccatcccgcacggtctgctattttccttttgatcacctaccatccagactcttctcagaggcagaaggggaaagggggcggcggtatgacctggatatcgaagagcacgacggcctttggcctaatcctcctcgctcatgcatgctactccgcgcacgagcactcggcccttcaatcacatcgagctgcttcactttcttcgctagcatcatctccgtctggctctggcgcagcgctcccgatcgatatcgccattgagaccatcgttgcgacattcattgtctgcttgggacttgtcgcggggacctcgagactgcgacctatacagtggcgagtttgggctggtcagatcgagagagagggagagaatggcttcaggaatagcagcggagaggtcgagaaagacttcgttgggaacccattccggttactggagagtcgtcctggatttatcgacattcgccaacagcgaaaacaatttgctgaatgggttagagagcaatag

SEQ ID NO: 28545 - protein, 206 aa, Muscodor strobelii
  misc_feature: SGI Peptide ID NO. 569792
  misc_feature (68)..(204): NCBI GI: 85111217 Blast Desc: NCU09386 [Neurospora crassa OR74A] gi|28925571|gb|EAA34596.1| NCU09386 [Neurospora crassa OR74A]
  misc_feature (68)..(205): NCBI GI: 261356567 Blast Desc: conserved [Verticillium albo-atrum VaMs.102]
  misc_feature (68)..(206): NCBI GI: 46108970 Blast Desc: FG01367.1 [Gibberella zeae PH-1]
  misc_feature (68)..(204): NCBI GI: 39941458 Blast Desc: MGG_05640 [Magnaporthe grisea 70-15] gi|145022325|gb|EDK06345.1| MGG_05640 [Magnaporthe grisea 70-15]
  misc_feature (87)..(206): NCBI GI: 171680307 Blast Desc: protein product [Podospora anserina] gi|170939780|emb|CAP65006.1| protein product [Podospora anserina]
  misc_feature (83)..(204): NCBI GI: 116206902 Blast Desc: CHGG_02744 [Chaetomium globosum CBS 148.51] gi|88183341|gb|EAQ90809.1| CHGG_02744 [Chaetomium globosum CBS 148.51]
  misc_feature (68)..(204): NCBI GI: 256735000 Blast Desc: NECHADRAFT_98626 [Nectria haematococca mpVI 77-13-4]
  misc_feature (68)..(206): NCBI GI: 212542591 Blast Desc: conserved [Penicillium marneffei ATCC 18224] gi|210066357|gb|EEA20450.1| conserved [Penicillium marneffei ATCC 18224]
  misc_feature (68)..(204): NCBI GI: 121701763 Blast Desc: conserved [Aspergillus clavatus NRRL 1] gi|119397289|gb|EAW07720.1| conserved [Aspergillus clavatus NRRL 1]
  misc_feature (68)..(204): NCBI GI: 119495742 Blast Desc: NFIA_014430 [Neosartorya fischeri NRRL 181] gi|119412811|gb|EAW22752.1| conserved [Neosartorya fischeri NRRL 181]
MDQPEPSNDAATDELPQPTYRRRRLAKSCISNNFTKRAIHPARSAIFLLITYHPDSSQRQKGKGGGGMTWISKSTTAFGLILLAHACYSAHEHSALQSHRAASLSSLASSPSGSGAALPIDIAIETIVATFIVCLGLVAGTSRLRPIQWRVWAGQIEREGENGFRNSSGEVEKDFVGNPFRLLESRPGFIDIRQQRKQFAEWVREQ

SEQ ID NO: 28546 - DNA, 665 bp, Muscodor strobelii
  misc_feature: SGI EST ID NO. CUFF.67233.0
  misc_feature: Variant of the nucleotide sequence at SEQ ID NO 28544
aattacctcagccaacatatcgaagacgcaggctggccaaaagctgcattagtaacaatttcacgaaacgagccatccatcccgcacggtctgctattttccttttgatcacctaccatccagactcttctcagaggcagaaggggaaagggggcggcggtatgacctggatatcgaagagcacgacggcctttggcctaatcctcctcgctcatgcatgctactccgcgcacgagcactcggcccttcaatcacatcgagctgcttcactttcttcgctagcatcatctccgtctggctctggcgcagcgctcccgatcgatatcgccattgagaccatcgttgcgacattcattgtctgcttgggacttgtcgcggggacctcgagactgcgacctatacagtggcgagtttgggctggtcagatcgagagagagggagagaatggcttcaggaatagcagcggagaggtcgagaaagacttcgttgggaacccattccggttactggagagtcgtcctggatttatcgacattcgccaacagcgaaaacaatttgctgaatgggttagagagcaataggggaaatggaaccctacacaccgtatatataataccatagcaggataccttatatatcttcgttttaacaatcttgacccggat

SEQ ID NO: 28547 - DNA, 2616 bp, Muscodor strobelii
  misc_feature: SGI cDNA ID NO. 569793
  misc_feature: Encodes the peptide sequence at SEQ ID NO 28548
atggccattgatatgaaagacaatggacgacgaggcttcactatcggatgcgcctactacatcgccgttgaggaaagcttgcatttgatggatgaagtctcaatggctgccatcgaccttgttgagactcttctgctccatacacaacctaccacaatcctgatgtcatcaagagcccccgaaattttggcaaactatctagctaaaaatgcacaaggcgtcgatggtaatcgaggagatctccgaggtgcatatatcctcaggaaccttaactctagcgattttcgtttcgaaacaggtagacagaagcttctgagtcttgatcttgggatggatgctcgaccaagcatgctatacaccaccgtcgttgatgacgctgtcttcgaagctgaaccaggcgcaaatctcgaagggagtagaggagagtcaaagcatagtcaactcatgcgtttggctacttcgataaatcttgacagtaaagttacggtgggctgtgcgggtgcagtgttaggcgacattcagcgtaggaagacagcgcaatacttaccaaatgatccggacgccctcgtagcttttcgtattcgatccgtggagatgttctctcttttcaactcgatgttcgtcaacgccgatacgtttgcgtctttacagatcttacagtctgaacatcacccgaacagtcatcaggcaggtgataaagagagcctttcggtttacggcctgttctgccatctagctgttacgccacaaggaaagacaagactccgtcgattgtttttgcagccaagtatcgacattgatttgattcaagagagacagaaaactattgcatttttccttcggaccggaaacgatgaatctcttgagagactcggcaaagacctcaggaagattaaggacatgaagtacatgatgttgctcctacgaaagggaattgattatcccaatagaaagatctctgtgaaaaacagcgtctggacagttttgcaaaactttgcaatgttcagccttcaggtgagagaatgcttacggtcgttgtaccaagcagagaagatagagatcgtcaggaaggtcattgaaacaatcgacgttgtgcaacttcgacgggtaggacagttgattgccgagacgatcgattttccgcaatccgaggagcgaggccgaacagccgtgaagcaaggtgttgatgctgaactagacgaacgtaaaagaatatacgacggcatggataatcttctgggaaatgtgaccacaaatatgcggagggacattccagaatgggctagaaaatatgtacgaaattgcatattcttcccccaacttggcttcttgacggtcgtctcgttgaacacggaaactggtaaatgtaactacattggtgaaggaatgaatgataactgggagcgcatgttcattgcagagggttgtgtttattacaagaatcggcggatgaaagagatggacgacgaatttggagactcttatgggatgattatagaccgagaaattgagattatccacagtctcgctgtatcgatacttgagcgagaacaagttataatcgcaggatcagacgtgttaggcgagctcgactgtctgctcgctttaaccattggatgtagactccataaatggacagcacctgagatgacggatgcgaatattctagaggtgcaaggtggccggcatcccctacaggaattagtagtcccatcattcatcgccaacgactgtttcatgatcggaggccagggtagctgtcgtgatgaagatcggagtctatcagtatcgcccgaggaatccttccaggcgccgagtacgatcgttcttacaggtcccaatcactccggtaagagtgtatacctcaaacagatcgcaataatcgtatacttggcccacatcggatgcttcgtaccggcggagcatgcgaaaataggtctgactgatcgtattctcacccgaattgcaacacgcgagacactcagccgtccggagagtgcatttgcaaccgatctgagacaaatcgcatttgcaatgaactttgctactcgtcgcagtcttgttctcgttgatgagtttgggaaaggaaccaacagccacgatggtgctggtctgatggctgctaccatcaaccacttcacagggcttggaattgaacgacctaagctactcgtcgcaacccactttcacgaaattctagacgaaaagtttctcgtcgagagtgaggaactcgcgtttgctcacatggagatacatgtagatctcagaacttctatcatggaggaccaagtcacgtacctttatcgacttaaacctggccgaagcatttcaagttttggaagtcgctgtgctgcggtgaatggcatcgatcaggcaattgtcgaccgtgctgaaacaatcatccttcagatagcgcgtcacgaagatctcgagatcgtttgctcccaattatccgaacgcgagacaaagaagttgagggatgcggagatagttgctcgttctttcgtcgaacaagagttcacaacgccaccaattacagtttccagacaagatgccgccagttggtatcgacgcaagcttgacacaattttcccactcgatggatcgtcgaattag

SEQ ID NO: 28548 - protein, 871 aa, Muscodor strobelii
  misc_feature: SGI Peptide ID NO. 569793
  misc_feature (203)..(542): Pfam Id: PF05192 Pfam Desc: MutS domain III
  misc_feature (545)..(807): Pfam Id: PF00488 Pfam Desc: MutS domain V
  misc_feature (1)..(861): NCBI GI: 156053089 Blast Desc: SS1G_06712 [Sclerotinia sclerotiorum 1980] gi|154704490|gb|EDO04229.1| SS1G_06712 [Sclerotinia sclerotiorum 1980]
  misc_feature (1)..(861): NCBI GI: 154318337 Blast Desc: BC1G_03336 [Botryotinia fuckeliana B05.10] gi|150842859|gb|EDN18052.1| BC1G_03336 [Botryotinia fuckeliana B05.10]
  misc_feature (1)..(843): NCBI GI: 145615504 Blast Desc: MGG_05639 [Magnaporthe grisea 70-15] gi|145022324|gb|EDK06344.1| MGG_05639 [Magnaporthe grisea 70-15]
  misc_feature (1)..(850): NCBI GI: 46108970 Blast Desc: FG01367.1 [Gibberella zeae PH-1]
  misc_feature (1)..(833): NCBI GI: 256734999 Blast Desc: NECHADRAFT_714 [Nectria haematococca mpVI 77-13-4]
  misc_feature (1)..(837): NCBI GI: 116206900 Blast Desc: CHGG_02743 [Chaetomium globosum CBS 148.51] gi|88183340|gb|EAQ90808.1| CHGG_02743 [Chaetomium globosum CBS 148.51]
  misc_feature (1)..(842): NCBI GI: 212542597 Blast Desc: DNA mismatch repair protein Msh5, [Penicillium marneffei ATCC 18224] gi|210066360|gb|EEA20453.1| DNA mismatch repair protein Msh5, [Penicillium marneffei ATCC 18224]
  misc_feature (46)..(844): NCBI GI: 28629053 Blast Desc: AF487263_4 mismatch repair protein 5 [Leptosphaeria maculans]
  misc_feature (157)..(854): NCBI GI: 225679634 Blast Desc: conserved [Paracoccidioides brasiliensis Pb03]
  misc_feature (46)..(844): NCBI GI: 169607967 Blast Desc: SNOG_07048 [Phaeosphaeria nodorum SN15] gi|160701527|gb|EAT85699.2| SNOG_07048 [Phaeosphaeria nodorum SN15]
MAIDMKDNGRRGFTIGCAYYIAVEESLHLMDEVSMAAIDLVETLLLHTQPTTILMSSRAPEILANYLAKNAQGVDGNRGDLRGAYILRNLNSSDFRFETGRQKLLSLDLGMDARPSMLYTTVVDDAVFEAEPGANLEGSRGESKHSQLMRLATSINLDSKVTVGCAGAVLGDIQRRKTAQYLPNDPDALVAFRIRSVEMFSLFNSMFVNADTFASLQILQSEHHPNSHQAGDKESLSVYGLFCHLAVTPQGKTRLRRLFLQPSIDIDLIQERQKTIAFFLRTGNDESLERLGKDLRKIKDMKYMMLLLRKGIDYPNRKISVKNSVWTVLQNFAMFSLQVRECLRSLYQAEKIEIVRKVIETIDVVQLRRVGQLIAETIDFPQSEERGRTAVKQGVDAELDERKRIYDGMDNLLGNVTTNMRRDIPEWARKYVRNCIFFPQLGFLTVVSLNTETGKCNYIGEGMNDNWERMFIAEGCVYYKNRRMKEMDDEFGDSYGMIIDREIEIIHSLAVSILEREQVIIAGSDVLGELDCLLALTIGCRLHKWTAPEMTDANILEVQGGRHPLQELVVPSFIANDCFMIGGQGSCRDEDRSLSVSPEESFQAPSTIVLTGPNHSGKSVYLKQIAIIVYLAHIGCFVPAEHAKIGLTDRILTRIATRETLSRPESAFATDLRQIAFAMNFATRRSLVLVDEFGKGTNSHDGAGLMAATINHFTGLGIERPKLLVATHFHEILDEKFLVESEELAFAHMEIHVDLRTSIMEDQVTYLYRLKPGRSISSFGSRCAAVNGIDQAIVDRAETIILQIARHEDLEIVCSQLSERETKKLRDAEIVARSFVEQEFTTPPITVSRQDAASWYRRKLDTIFPLDGSSN

SEQ ID NO: 28549 - DNA, 4092 bp, Muscodor strobelii
  misc_feature: SGI EST ID NO. CUFF.67275.0
  misc_feature: Variant of the nucleotide sequence at SEQ ID NO 28547
aatgaatgataactgggagcgcatgttcattgcagagggttgtgtttattacaagaatcggcggatgaaagagatggacgacgaatttggagactcttatgggatgattatagaccgagaaattgagattatccacagtctcgctgtatcgatacttgagcgagaacaagttataatcgcaggatcagacgtgttaggcgagctcgactgtctgctcgctttaaccattggatgtagactccataaatggacagcacctgagatgacggatgcgaatattctagaggtgcaaggtggccggcatcccctacaggaattagtagtcccatcattcatcgccaacgactgtttcatgatcggaggccagggtagctgtcgtgatgaagatcggagtctatcagtatcgcccgaggaatccttccaggcgccgagtacgatcgttcttacaggtcccaatcactccggtaagagtgtatacctcaaacagatcgcaataatcgtatacttggcccacatcggatgcttcgtaccggcggagcatgcgaaaataggtctgactgatcgtattctcacccgaattgcaacacgcgagacactcagccgtccggagagtgcatttgcaaccgatctgagacaaatcgcatttgcaatgaactttgctactcgtcgcagtcttgttctcgttgatgagtttgggaaaggaaccaacagccacgatggtgctggtctgatggctgctaccatcaaccacttcacagggcttggaattgaacgacctaagctactcgtcgcaacccactttcacgaaattctagacgaaaagtttctcgtcgagagtgaggaactcgcgtttgctcacatggagatacatgtagatctcagaacttctatcatggaggaccaagtcacgtacctttatcgacttaaacctggccgaagcatttcaagttttggaagtcgctgtgctgcggtgaatggcatcgatcaggcaattgtcgaccgtgctgaaacaatcatccttcagatagcgcgtcacgaagatctcgagatcgtttgctcccaattatccgaacgcgagacaaagaagttgagggatgcggagatagttgctcgttctttcgtcgaacaagagttcacaacgccaccaattacagtttccagacaagatgccgccagttggtatcgacgcaagcttgacacaattttcccactcgatggatcgtcgaattaggcagatggatggaagtgtatctccgcacatgagtataattagttgccctctagtaatttggcatgaaagcgtcgcaggtacattgcgaacagagcttcaagcccatagctaccaaagaatgatgatttaccaggagtctgatagtcggctatagatgatctattatacaatgtccctagccctttagtcagtgtacgactgggtgcacttcagacccaaactttaaatgcctcggtacgtgagatgaaacaagcatgaatacgttgtccacttcggatttttcaagggtatctataaaaaatgatgtaactacgccccgcatagctgcgtctttcattacactactgtccacggtaacgtgggaaaataagaatttcgttagatgagtacaacggcagcaccaatagcagctacaacgctgagcatcgacattggtgacactgcgccagcgccgctctcgccatcatcagtggtggaggagctggaactatccgaatcgtcattagagtcgctttccgagctaccagtgagactgccggacgtaggagagggcacgggcggtgtgctttgcgctacgacaagagacgagaccgtggcggcgtcgtcagttacggtcgcagctcttgtggaagtcgtcagggtcgtatctcctccagcagtaaccgcgccaccaacagcagctgaagtgataatcttggcgctggtcgttgtcggatcagacttcttgctgctacttgtagtcgtaggctcgttgtcgtccccaccgctgctcacgccgccaattttctccgcgtccgaaacagcagaggctgggagcttgcaggacgattccaaaggttgaatcaagtccagcacggtagtagtcgatgggcactcttggttcatgcagcttgcgatgtctgataatattccatcactcgccttcttgcagacgcacgagtcgaaatcggaaaagcatcctgagctgcggatgcactgctgaatgcaagtcgggaactcggtactcctcgcgctgggtgctgcggcagctccccggagcagtccaaagaaggctgcgctgagcaggatagtagcttgcgtagagagcattgtgagggttggtagtatgttgatgaatgtggtcgcgatgtgtggtaatgagtaagtggtgcggctcgcgcttaggtttgttattataattaaagaatgacttctatacactgggtatggtgggttatggtaaggaacgtatcgtcggtatcggctcgtcttcaacaatctcacaataaggaacgatgagagttgaacatagagaacggccaggagagaacaatttctacatttcgtgaagaatttatgggtatatgaacatttcgctccctcccgcatatataactctagactaacgacattgtgggcatagctcagggacctgcgcattggcggccgtgatagtaaagaatagtggtgatcatcgtggtttatgaaacacggtcaattgacagaatggggtttcgggatggttaatctcagctacgccgaagatctcgctagttagtgaaggatgatcactcttattggatcacatttgatcatcattctccagtaactccacgcgaactcgacgtcaccagctgccatttgcggtgtaaggggtcctgcaggtttgattgcgactcttggcaatggaactcttgaaccgggtgatgccgaccgatatgctatgggcaatgcaccaagcaaaggttttggtctatcttcatttcgttgacttcccagccggtgctttgggaccaaggggttaatggttcgaatcgatttactgcaatgcttcgagttgatagaccatgtcgagttgctcctctgacgtatttttgctggtattgaagactagcttcgggccctcgtccgtcttcacaaacccacatcgcccatagacggaaacggctgcattatttgtggcataaaccacaacgctcagggcaagagtcttgtcctggtctgtcgcttgtttgatggcttcctcagttgcagccttgatcagggctttggcaacgccacgacctctggccttggggctggtgtagacggcagccatctgaaagcgcaaggctgtgtcagtattgctctcttcctgagctgcaagcccggaaaccgtttctagtgtttcgcacatagtagttagtctctcggatatatattcgtgatcaaagcatgaaatttaagcgtcacccgagtatcgctaggtctctcgacctcaattgattgctactcacttgacacgtattagcataaatccttcaagaggacaggaaggtatcgtgttgtacacaccggtacggatttgagaccacctctctactaggcattggtccgattagtgatgttgacgcaacgacctcattgtcagatgtccgaacggcaataaaagtctttgccaatgggtttctgactcgggtaagccatgcttcatcgtcaaattcaagctctcgggcatatgtcgacccaaacgctatgatgaacaccaaaagtcagtcctttcccagtacaacacaaacatgccggaagggacgagatgacctgcgagagctgcgtaccatccgggtcttcccgcaacgcgtttaacctaaacggtttgtacttctcaagatagaatagacagccttgttcatcaggcagaaggacttggatttcgaatgctcctgtgtcactttcttccaacatgttgctctctgactgatgcatgttgtcactcaaagtgtcacttgagacatttgtatttttaggtggtgcgtcggctgacttctctagaaatggaccacacctcgatgtagagactagcaagagcaaacgcgatatattatgatggcgagacagcatat

SEQ ID NO: 28550 - DNA, 711 bp, Muscodor strobelii
  misc_feature: SGI cDNA ID NO. 569794
  misc_feature: Elevated expression when VOC is produced
  misc_feature: Encodes the peptide sequence at SEQ ID NO 28551
atgctctctacgcaagctactatcctgctcagcgcagccttctttggactgctccggggagctgccgcagcacccagcgcgaggagtaccgagttcccgacttgcattcagcagtgcatccgcagctcaggatgcttttccgatttcgactcgtgcgtctgcaagaaggcgagtgatggaatattatcagacatcgcaagctgcatgaaccaagagtgcccatcgactactaccgtgctggacttgattcaacctttggaatcgtcctgcaagctcccagcctctgctgtttcggacgcggagaaaattggcggcgtgagcagcggtggggacgacaacgagcctacgactacaagtagcagcaagaagtctgatccgacaacgaccagcgccaagattatcacttcagctgctgttggtggcgcggttactgctggaggagatacgaccctgacgacttccacaagagctgcgaccgtaactgacgacgccgccacggtctcgtctcttgtcgtagcgcaaagcacaccgcccgtgccctctcctacgtccggcagtctcactggtagctcggaaagcgactctaatgacgattcggatagttccagctcctccaccactgatgatggcgagagcggcgctggcgcagtgtcaccaatgtcgatgctcagcgttgtagctgctattggtgctgccgttgtactcatctaa

SEQ ID NO: 28551 - protein, 236 aa, Muscodor strobelii
  misc_feature: SGI Peptide ID NO. 569794
  misc_feature: Useful for introducing or modulating the production of volatile compounds
MLSTQATILLSAAFFGLLRGAAAAPSARSTEFPTCIQQCIRSSGCFSDFDSCVCKKASDGILSDIASCMNQECPSTTTVLDLIQPLESSCKLPASAVSDAEKIGGVSSGGDDNEPTTTSSSKKSDPTTTSAKIITSAAVGGAVTAGGDTTLTTSTRAATVTDDAATVSSLVVAQSTPPVPSPTSGSLTGSSESDSNDDSDSSSSSTTDDGESGAGAVSPMSMLSVVAAIGAAVVLI

SEQ ID NO: 28552 - DNA, 3822 bp, Muscodor strobelii
  misc_feature: SGI EST ID NO. CUFF.67276.1
  misc_feature: Variant of the nucleotide sequence at SEQ ID NO 28550
cgccatcataatatatcgcgtttgctcttgctagtctctacatcgaggtgtggtccatttctagagaagtcagccgacgcaccacctaaaaatacaaatgtctcaagtgacactttgagtgacaacatgcatcagtcagagagcaacatgttggaagaaagtgacacaggagcattcgaaatccaagtccttctgcctgatgaacaaggctgtctattctatcttgagaagtacaaaccgtttaggttaaacgcgttgcgggaagacccggatgcgtttgggtcgacatatgcccgagagcttgaatttgacgatgaagcatggcttacccgagtcagaaacccattggcaaagacttttattgccgttcggacatctgacaatgaggtcgttgcgtcaacatcactaatcggaccaatgcctagtagagaggtggtctcaaatccgtaccgcaatcaattgaggtcgagagacctagcgatactcgggtgacgcttaaatttcatgctttgatcacgaatatatatccgagagactaactactatgtgcgaaacactagaaacggtttccgggcttgcagctcaggaagagagcaatactgacacagccttgcgctttcagatggctgccgtctacaccagccccaaggccagaggtcgtggcgttgccaaagccctgatcaaggctgcaactgaggaagccatcaaacaagcgacagaccaggacaagactcttgccctgagcgttgtggtttatgccacaaataatgcagccgtttccgtctatgggcgatgtgggtttgtgaagacggacgagggcccgaagctagtcttcaataccagcaaaaatacgtcagaggagcaactcgacatggtctatcaactcgaagcattgcagtaaatcgattcgaaccattaaccccttggtcccaaagcaccggctgggaagtcaacgaaatgaagatagaccaaaacctttgcttggtgcattgcccatagcatatcggtcggcatcacccggttcaagagttccattgccaagagtcgcaatcaaacctgcaggaccccttacaccgcaaatggcagctggtgacgtcgagttcgcgtggagttactggagaatgatgatcaaatgtgatccaataagagtgatcatccttcactaactagcgagatcttcggcgtagctgagattaaccatcccgaaaccccattctgtcaattgaccgtgtttcataaaccacgatgatcaccactattctttactatcacggccgccaatgcgcaggtccctgagctatgcccacaatgtcgttagtctagagttatatatgcgggagggagcgaaatgttcatatacccataaattcttcacgaaatgtagaaattgttctctcctggccgttctctatgttcaactctcatcgttccttattgtgagattgttgaagacgagccgataccgacgatacgttccttaccataacccaccatacccagtgtatagaagtcattctttaattataataacaaacctaagcgcgagccgcaccacttactcattaccacacatcgcgaccacattcatcaacatactaccaaccctcacaatgctctctacgcaagctactatcctgctcagcgcagccttctttggactgctccggggagctgccgcagcacccagcgcgaggagtaccgagttcccgacttgcattcagcagtgcatccgcagctcaggatgcttttccgatttcgactcgtgcgtctgcaagaaggcgagtgatggaatattatcagacatcgcaagctgcatgaaccaagagtgcccatcgactactaccgtgctggacttgattcaacctttggaatcgtcctgcaagctcccagcctctgctgtttcggacgcggagaaaattggcggcgtgagcagcggtggggacgacaacgagcctacgactacaagtagcagcaagaagtctgatccgacaacgaccagcgccaagattatcacttcagctgctgttggtggcgcggttactgctggaggagatacgaccctgacgacttccacaagagctgcgaccgtaactgacgacgccgccacggtctcgtctcttgtcgtagcgcaaagcacaccgcccgtgccctctcctacgtccggcagtctcactggtagctcggaaagcgactctaatgacgattcggatagttccagctcctccaccactgatgatggcgagagcggcgctggcgcagtgtcaccaatgtcgatgctcagcgttgtagctgctattggtgctgccgttgtactcatctaacgaaattcttattttcccacgttaccgtggacagtagtgtaatgaaagacgcagctatgcggggcgtagttacatcattttttatagatacccttgaaaaatccgaagtggacaacgtattcatgcttgtttcatctcacgtaccgaggcatttaaagtttgggtctgaagtgcacccagtcgtacactgactaaagggctagggacattgtataatagatcatctatagccgactatcagactcctggtaaatcatcattctttggtagctatgggcttgaagctctgttcgcaatgtacctgcgacgctttcatgccaaattactagagggcaactaattatactcatgtgcggagatacacttccatccatctgcctaattcgacgatccatcgagtgggaaaattgtgtcaagcttgcgtcgataccaactggcggcatcttgtctggaaactgtaattggtggcgttgtgaactcttgttcgacgaaagaacgagcaactatctccgcatccctcaacttctttgtctcgcgttcggataattgggagcaaacgatctcgagatcttcgtgacgcgctatctgaaggatgattgtttcagcacggtcgacaattgcctgatcgatgccattcaccgcagcacagcgacttccaaaacttgaaatgcttcggccaggtttaagtcgataaaggtacgtgacttggtcctccatgatagaagttctgagatctacatgtatctccatgtgagcaaacgcgagttcctcactctcgacgagaaacttttcgtctagaatttcgtgaaagtgggttgcgacgagtagcttaggtcgttcaattccaagccctgtgaagtggttgatggtagcagccatcagaccagcaccatcgtggctgttggttcctttcccaaactcatcaacgagaacaagactgcgacgagtagcaaagttcattgcaaatgcgatttgtctcagatcggttgcaaatgcactctccggacggctgagtgtctcgcgtgttgcaattcgggtgagaatacgatcagtcagacctattttcgcatgctccgccggtacgaagcatccgatgtgggccaagtatacgattattgcgatctgtttgaggtatacactcttaccggagtgattgggacctgtaagaacgatcgtactcggcgcctggaaggattcctcgggcgatactgatagactccgatcttcatcacgacagctaccctggcctccgatcatgaaacagtcgttggcgatgaatgatgggactactaattcctgtaggggatgccggccaccttgcacctctagaatattcgcatccgtcatctcaggtgctgtccatttatggagtctacatccaatggttaaagcgagcagacagtcgagctcgcctaacacgtctgatcctgcgattataacttgttctcgctcaagtatcgatacagcgagactgtggataatctcaatttctcggtctagg

SEQ ID NO: 28553 - DNA, 468 bp, Muscodor strobelii
  misc_feature: SGI cDNA ID NO. 569795
  misc_feature: Reduced expression when VOC is produced
  misc_feature: Encodes the peptide sequence at SEQ ID NO 28554
atgttggaagaaagtgacacaggagcattcgaaatccaagtccttctgcctgatgaacaaggctgtctattctatcttgagaagtacaaaccgtttaggttaaacgcgttgcgggaagacccggatgaaacggtttccgggcttgcagctcaggaagagagcaatactgacacagccttgcgctttcagatggctgccgtctacaccagccccaaggccagaggtcgtggcgttgccaaagccctgatcaaggctgcaactgaggaagccatcaaacaagcgacagaccaggacaagactcttgccctgagcgttgtggtttatgccacaaataatgcagccgtttccgtctatgggcgatgtgggtttgtgaagacggacgagggcccgaagctagtcttcaataccagcaaaaatacgtcagaggagcaactcgacatggtctatcaactcgaagcattgcagtaa

SEQ ID NO: 28554 - protein, 155 aa, Muscodor strobelii
  misc_feature: SGI Peptide ID NO. 569795
  misc_feature (36)..(124): Pfam Id: PF00583 Pfam Desc: Acetyltransferase (GNAT) family
  misc_feature (42)..(130): NCBI GI: 154318343 Blast Desc: BC1G_03339 [Botryotinia fuckeliana B05.10] gi|150842862|gb|EDN18055.1| BC1G_03339 [Botryotinia fuckeliana B05.10]
  misc_feature (29)..(130): NCBI GI: 156053083 Blast Desc: SS1G_06709 [Sclerotinia sclerotiorum 1980] gi|154704487|gb|EDO04226.1| SS1G_06709 [Sclerotinia sclerotiorum 1980]
  misc_feature (52)..(123): NCBI GI: 145615498 Blast Desc: [Magnaporthe grisea 70-15] gi|145022318|gb|EDK06338.1| [Magnaporthe grisea 70-15]
  misc_feature (66)..(123): NCBI GI: 218676645 Blast Desc: GCN5-related N-acetyltransferase [Vibrio splendidus LGP32] gi|218324913|emb|CAV26698.1| GCN5-related N-acetyltransferase [Vibrio splendidus LGP32]
  misc_feature (66)..(123): NCBI GI: 86145188 Blast Desc: acetyltransferase (GNAT) family protein [Vibrio sp. MED222] gi|85836765|gb|EAQ54885.1| acetyltransferase (GNAT) family protein [Vibrio sp. MED222]
  misc_feature (41)..(128): NCBI GI: 256769772 Blast Desc: acetyltransferase [Streptomyces sp. C]
  misc_feature (64)..(132): NCBI GI: 152986121 Blast Desc: acetyltransferase [Pseudomonas aeruginosa PA7] gi|150961279|gb|ABR83304.1| acetyltransferase [Pseudomonas aeruginosa PA7]
  misc_feature (40)..(126): NCBI GI: 111223099 Blast Desc: acetyltransferase [Frankia alni ACN14a] gi|111150631|emb|CAJ62332.1| acetyltransferase [Frankia alni ACN14a]
  misc_feature (61)..(126): NCBI GI: 169609188 Blast Desc: SNOG_07681 [Phaeosphaeria nodorum SN15] gi|160701798|gb|EAT85147.2| SNOG_07681 [Phaeosphaeria nodorum SN15]
  misc_feature (39)..(135): NCBI GI: 255934148 Blast Desc: Pc12g15550 [Penicillium chrysogenum Wisconsin 54-1255] gi|211582974|emb|CAP81182.1| Pc12g15550 [Penicillium chrysogenum Wisconsin 54-1255]
  misc_feature: Useful for introducing or modulating the production of volatile compounds
MLEESDTGAFEIQVLLPDEQGCLFYLEKYKPFRLNALREDPDETVSGLAAQEESNTDTALRFQMAAVYTSPKARGRGVAKALIKAATEEAIKQATDQDKTLALSVVVYATNNAAVSVYGRCGFVKTDEGPKLVFNTSKNTSEEQLDMVYQLEALQ

SEQ ID NO: 28555 - DNA, 3822 bp, Muscodor strobelii; identical to SEQ ID NO: 28552
  misc_feature: SGI EST ID NO. CUFF.67276.1
  misc_feature: Variant of the nucleotide sequence at SEQ ID NO 28553

SEQ ID NO: 28556 - DNA, 1542 bp, Muscodor strobelii
  misc_feature: SGI cDNA ID NO. 569796
  misc_feature: Encodes the peptide sequence at SEQ ID NO 28557
atggcgtccccttaccaagcaccagcgcttccgcctgacgcactagagaagttccgagactttgacctgagagagatcttcgaagaagcttcctctcatgcagcgaagcttgacagtaggaattttgtcgtcgaattcggaccagagagagcgcgtatcgcttttaaccttgacataaaagacttcacgaagctgatcgggagcgaacgagacgcagaatatccaattcgatggataaacatatgggatccagtcgtccagaacgaatcgttgtccatcattggaaatcattatgggttctctgagcgattgattcgtctaatgagcgtacctgcgcaggatcctcatgagaacgcacgtcataaggacaaggccacttgcactaccaaacaacaccggcggcctgcagatatcgaggctggtgtcatcggtagtggctctaatggcagtgtgcctcttgaatctctctccagtctgcagatcttgaaagctgccgcgcagctcgacgatgatgacactgtgctctccgtacacgaaaagccgtctttggaaaaatggccggaaaaagaggacgaggcgaggttgcagcaggaagaactggacaacatgagggcgaatactctcgatgttcttctgcaactctctaaagaggggtttgatctgtataagaagaagccgctctcactgaactcggttcgacggccattgagtaaactctattctaatactggaaatccaccggaactaaaccgccacgagactggcatgtcctctttcgccataagtccgcctgcagatctagctgatgaaggcacgagcaatctattctattatttatttgaagattatgtcgccgccggacccctaaagactgccgagaaaaaattggagcaaatgacgatcaaagtcttagaaaacggtcgtcccaagatccgatttaagagcaaagacatcatacctacattacactacctcagcaaggatcttcgcgagttgaagcacttgttcgaaaactacaagaacctgatcagcaaaatcatggcgaacacacaaggtgccccaagcgagggaccgcgcaaggtgatgttgaccacctctgccacaagtcgcttcgagaggttgagtgatcgactgcaatttttgatgctcaataccattgatggatacttggaggagatcagtgcactttcaagcacatacttcaacttgacacagcaaaaggactcggaagcgacggccaggctcacgaggagcgcaacgcttctagcaaagctcagcgttttctttctgccgatcagcttcgtgacaagctacttctcgatccagatagaggatctatataaatattggacagggagagattattggtattcattcgcagttatagcgagcgtgtcgttcgttagtctgttcttctttagtcggctgctcatgtttgctagcgatacgttggacgagtgggcgtctcaaatctcgttgtttgttcgcaatcttgtgcagaggatatccggcattaagataggcgaagatgaagaagaatga

SEQ ID NO: 28557 - protein, 513 aa, Muscodor strobelii
  misc_feature: SGI Peptide ID NO. 569796
  misc_feature (18)..(498): NCBI GI: 156053081 Blast Desc: SS1G_06708 [Sclerotinia sclerotiorum 1980] gi|154704486|gb|EDO04225.1| SS1G_06708 [Sclerotinia sclerotiorum 1980]
  misc_feature (18)..(446): NCBI GI: 154318345 Blast Desc: BC1G_03340 [Botryotinia fuckeliana B05.10] gi|150842863|gb|EDN18056.1| BC1G_03340 [Botryotinia fuckeliana B05.10]
  misc_feature (12)..(459): NCBI GI: 225560088 Blast Desc: ADP-ribosylation factor [Ajellomyces capsulatus G186AR]
  misc_feature (41)..(459): NCBI GI: 240278840 Blast Desc: conserved [Ajellomyces capsulatus H143]
  misc_feature (18)..(485): NCBI GI: 226281581 Blast Desc: conserved [Paracoccidioides brasiliensis Pb01]
  misc_feature (12)..(485): NCBI GI: 119495616 Blast Desc: NFIA_013820 [Neosartorya fischeri NRRL 181] gi|119412751|gb|EAW22692.1| conserved [Neosartorya fischeri NRRL 181]
  misc_feature (168)..(485): NCBI GI: 226291306 Blast Desc: conserved [Paracoccidioides brasiliensis Pb18]
  misc_feature (171)..(474): NCBI GI: 119184366 Blast Desc: CIMG_06999 [Coccidioides immitis RS]
  misc_feature (2)..(473): NCBI GI: 212542643 Blast Desc: conserved [Penicillium marneffei ATCC 18224] gi|210066383|gb|EEA20476.1| conserved [Penicillium marneffei ATCC 18224]
  misc_feature (171)..(474): NCBI GI: 240109857 Blast Desc: CPC735_033620 [Coccidioides posadasii C735 delta SOWgp]
MASPYQAPALPPDALEKFRDFDLREIFEEASSHAAKLDSRNFVVEFGPERARIAFNLDIKDFTKLIGSERDAEYPIRWINIWDPVVQNESLSIIGNHYGFSERLIRLMSVPAQDPHENARHKDKATCTTKQHRRPADIEAGVIGSGSNGSVPLESLSSLQILKAAAQLDDDDTVLSVHEKPSLEKWPEKEDEARLQQEELDNMRANTLDVLLQLSKEGFDLYKKKPLSLNSVRRPLSKLYSNTGNPPELNRHETGMSSFAISPPADLADEGTSNLFYYLFEDYVAAGPLKTAEKKLEQMTIKVLENGRPKIRFKSKDIIPTLHYLSKDLRELKHLFENYKNLISKIMANTQGAPSEGPRKVMLTTSATSRFERLSDRLQFLMLNTIDGYLEEISALSSTYFNLTQQKDSEATARLTRSATLLAKLSVFFLPISFVTSYFSIQIEDLYKYWTGRDYWYSFAVIASVSFVSLFFFSRLLMFASDTLDEWASQISLFVRNLVQRISGIKIGEDEEE

SEQ ID NO: 28558 - DNA, 2067 bp, Muscodor strobelii
  misc_feature: SGI EST ID NO. CUFF.67242.0
  misc_feature: Variant of the nucleotide sequence at SEQ ID NO 28556
attctttagacgttcgcctctttttaacatcgccttcgttgatacaattttgagtttgttgaattatgttggcctcgatctatctagactagtagtcttagtggtagccttctacatcaagcaatggattccgcaatggcgtccccttaccaagcaccagcgcttccgcctgacgcactagagaagttccgagactttgacctgagagagatcttcgaagaagcttcctctcatgcagcgaagcttgacagtaggaattttgtcgtcgaattcggaccagagagagcgcgtatcgcttttaaccttgacataaaagacttcacgaagctgatcgggagcgaacgagacgcagaatatccaattcgatggataaacatatgggatccagtcgtccagaacgaatcgttgtccatcattggaaatcattatgggttctctgagcgattgattcgtctaatgagcgtacctgcgcaggatcctcatgagaacgcacgtcataaggacaaggccacttgcactaccaaacaacaccggcggcctgcagatatcgaggctggtgtcatcggtagtggctctaatggcagtgtgcctcttgaatctctctccagtctgcagatcttgaaagctgccgcgcagctcgacgatgatggtatgttattgtatatgcagcttaaaaacaccgtaaattacttttcaaccgaccagactcagaaagcgttgtgtattggtgcacactggctgcataagcgaccgaaaggaagtattgaagatcgacgaaaaagcatgatgccacccaaacattggcagtggctggctctttgcaatgaccacactgtgctctccgtacacgaaaagccgtctttggaaaaatggccggaaaaagaggacgaggcgaggttgcagcaggaagaactggacaacatgagggcgaatactctcgatgttcttctgcaactctctaaagaggggtttgatctgtataagaagaagccgctctcactgaactcggttcgacggccattgagtaaactctattctaatactggaaatccaccggaactaaaccgccacgagactggcatgtcctctttcgccataagtccgcctgcagatctagctgatgaaggcacgagcaatctattctattatttatttgaagattatgtcgccgccggacccctaaagactgccgagaaaaaattggagcaaatgacgatcaaagtcttagaaaacggtcgtcccaagatccgatttaagagcaaagacatcatacctacattacactacctcagcaaggatcttcgcgagttgaagcacttgttcgaaaactacaagaacctgatcagcaaaatcatggcgaacacacaaggtgccccaagcgagggaccgcgcaaggtgatgttgaccacctctgccacaagtcgcttcgagaggttgagtgatcgactgcaatttttgatgctcaataccattgatggatacttggaggagatcagtgcactttcaagcacatacttcaacttgacacagcaaaaggactcggaagcgacggccaggctcacgaggagcgcaacgcttctagcaaagctcagcgttttctttctgccgatcagcttcgtgacaagctacttctcgatccagatagaggatctatataaatattggacagggagagattattggtattcattcgcagttatagcgagcgtgtcgttcgttagtctgttcttctttagtcggctgctcatgtttgctagcgatacgttggacgagtgggcgtctcaaatctcgttgtttgttcgcaatcttgtgcagaggatatccggcattaagataggcgaagatgaagaagaatgactgagcaatatttgggtcgaacgttctttggcgtttctacatcccatgagatttatgatcacgtgcccaacggtgggagtatttggaagaattgccaagtatggcaatatttttgcatgggcaggtcgatgttatatatatatatcaatttagtgcttaaagaagtccattacatgcctgtgtgtagtctatcaggaacacaagtgggcg

SEQ ID NO: 28559 - DNA, 1308 bp, Muscodor strobelii
  misc_feature: SGI cDNA ID NO. 569797
  misc_feature: Reduced expression when VOC is produced
  misc_feature: Encodes the peptide sequence at SEQ ID NO 28560
atggcctcgcacaccgctaacggctcgaccaacggccacgtcgtgagccaagttcgctacattcctctatcctacacctccacgaagtccgaatcttcggctcgacaactgatcctcgccctccaacccgattggtcaagctcagactccaacatcgagttcgtccgcttcacagacggaatcaccaacacgttgttgaaggcggtcaatcggagaccaggcctgtcggatgaagacattgatcgcgatgccatcttgctgcgagcctacggccacggcaccgacgttctgatagaccgccagcgcgagacgcagaaccacgagctgctgatgaagtatggcctggcacccgcactgctcgctcgcttcgaaaacggcatgatgtaccgctatatccaaggcaaggtcactcagcccgcagacttgcgctcccgccctgtgtacctagccgtggcaagacgcatagctcaatggcacgctaccgttccctacacacatgagatctaccggcccccaaatgggactatcaatggggcagtggacggcccgtgcgatacgcctgatgacagtcctgcaccaggcaagccgacaccaaatgtttggaccgtcatgcagaaatggatacgggcattgccagtgggtacagaagcccagcgcacaaggcaggccgagcttcagcgtgatttgatatggctgactcaggagttgagccagaggcctgggctggggaatgagagccttgtctttgcgcattgcgaccttctgagcggcaacgtgattattgaaccgaagggccctggcactgagggacacggcggtgggaccaaagaagttgaaaacaaggagcaagaacagctctccgttaattttattgactacgaatatgcaacgccttcgcctgcagcattcgatttggcaaaccatttcgcggaatggggaggtttcgactgcgacttcagtgttctgccaacgagaacacaacggctggaatttattcgagagtatgtgaagacgtatacgcgcttagcagagaaggcggcaggtgtcagcgactcagagcccgacgaagattcagaagtgcagaagctctttgaagaggtagacgtctacagaggggtcccgggtttctactggggcatatgggctctcattcaagcaaccatctcacagatagattttgactacgcacaatacgctgaagtccgacttggtgaattctgggcttggcgagatgagttgaataacacacgcgaggcttcaggcaaggagatgcctttgcgagagaagagatgggcgcagttggagtga

SEQ ID NO: 28560 - protein, 435 aa, Muscodor strobelii
  misc_feature: SGI Peptide ID NO. 569797
  misc_feature (53)..(335): Pfam Id: PF01636 Pfam Desc: Phosphotransferase enzyme family
  misc_feature (81)..(327): Pfam Id: PF01633 Pfam Desc: Choline/ethanolamine kinase
  misc_feature (2)..(433): NCBI GI: 85116754 Blast Desc: NCU02726 [Neurospora crassa OR74A] gi|28926914|gb|EAA35875.1| NCU02726 [Neurospora crassa OR74A]
  misc_feature (6)..(433): NCBI GI: 156053067 Blast Desc: SS1G_06701 [Sclerotinia sclerotiorum 1980] gi|154704479|gb|EDO04218.1| SS1G_06701 [Sclerotinia sclerotiorum 1980]
  misc_feature (10)..(435): NCBI GI: 171680265 Blast Desc: protein product [Podospora anserina] gi|170939759|emb|CAP64985.1| protein product [Podospora anserina]
  misc_feature (11)..(433): NCBI GI: 154318359 Blast Desc: BC1G_03347 [Botryotinia fuckeliana B05.10] gi|150842870|gb|EDN18063.1| BC1G_03347 [Botryotinia fuckeliana B05.10]
  misc_feature (4)..(433): NCBI GI: 116206960 Blast Desc: CHGG_02773 [Chaetomium globosum CBS 148.51] gi|88183370|gb|EAQ90838.1| CHGG_02773 [Chaetomium globosum CBS 148.51]
  misc_feature (17)..(431): NCBI GI: 256735029 Blast Desc: [Nectria haematococca mpVI 77-13-4]
  misc_feature (1)..(429): NCBI GI: 261356587 Blast Desc: ethanolamine kinase [Verticillium albo-atrum VaMs.102]
  misc_feature (17)..(431): NCBI GI: 46108854 Blast Desc: FG01309.1 [Gibberella zeae PH-1]
  misc_feature (9)..(433): NCBI GI: 240109852 Blast Desc: choline/ethanolamine kinase, [Coccidioides posadasii C735 delta SOWgp]
  misc_feature (17)..(435): NCBI GI: 39941604 Blast Desc: MGG_05713 [Magnaporthe grisea 70-15] gi|145022405|gb|EDK06425.1| MGG_05713 [Magnaporthe grisea 70-15]
  misc_feature (29)..(417): SWISSPROT Homolog: EC 2.7.1.82 Ethanolamine kinase
  misc_feature: Useful for introducing or modulating the production of volatile compounds
MASHTANGSTNGHVVSQVRYIPLSYTSTKSESSARQLILALQPDWSSSDSNIEFVRFTDGITNTLLKAVNRRPGLSDEDIDRDAILLRAYGHGTDVLIDRQRETQNHELLMKYGLAPALLARFENGMMYRYIQGKVTQPADLRSRPVYLAVARRIAQWHATVPYTHEIYRPPNGTINGAVDGPCDTPDDSPAPGKPTPNVWTVMQKWIRALPVGTEAQRTRQAELQRDLIWLTQELSQRPGLGNESLVFAHCDLLSGNVIIEPKGPGTEGHGGGTKEVENKEQEQLSVNFIDYEYATPSPAAFDLANHFAEWGGFDCDFSVLPTRTQRLEFIREYVKTYTRLAEKAAGVSDSEPDEDSEVQKLFEEVDVYRGVPGFYWGIWALIQATISQIDFDYAQYAEVRLGEFWAWRDELNNTREASGKEMPLREKRWAQLE

SEQ ID NO: 28561 - DNA, 1989 bp, Muscodor strobelii
  misc_feature: SGI EST ID NO. CUFF.67282.1
  misc_feature: Variant of the nucleotide sequence at SEQ ID NO 28559
agggaattgacatgtggacggcaaccatgcttgccttccgatgctgagcgctcatgacgttatgtctgatgagttggagtcgcatttcgagatgataaatcgttagaatggcgggaatgccaccactgtcgctcgtcgctcattgtttctaggctcttctaatcttactgccgatactcatttgagctacaccgtagcatacggcaactagtcaagctcatatccacattcttggcgccgcacggtcggcgtcgacacagtttataggaaatatcaacggcgggaagcaagggtctctcttgcactcttctgctcctttttctaaacccaggagaatcaaaactacacattgcataatttcgccgtatggaaacgagcgcgccacgtctgccatcccttcgcgacgtctgccatatccgaccatggcctcgcacaccgctaacggctcgaccaacggccacgtcgtgagccaagttcgctacattcctctatcctacacctccacgaagtccgaatcttcggctcgacaactgatcctcgccctccaacccgattggtcaagctcagactccaacatcgagttcgtccgcttcacagacggaatcaccaacacgttgttgaaggcggtcaatcggagaccaggcctgtcggatgaagacattgatcgcgatgccatcttgctgcgagcctacggccacggcaccgacgttctgatagaccgccagcgcgagacgcagaaccacgagctgctgatgaagtatggcctggcacccgcactgctcgctcgcttcgaaaacggcatgatgtaccgctatatccaaggcaaggtcactcagcccgcagacttgcgctcccgccctgtgtacctagccgtggcaagacgcatagctcaatggcacgctaccgttccctacacacatgagatctaccggcccccaaatgggactatcaatggggcagtggacggcccgtgcgatacgcctgatgacagtcctgcaccaggcaagccgacaccaaatgtttggaccgtcatgcagaaatggatacgggcattgccagtgggtacagaagcccagcgcacaaggcaggccgagcttcagcgtgatttgatatggctgactcaggagttgagccagaggcctgggctggggaatgagagccttgtctttgcgcattgcgaccttctgagcggcaacgtgattattgaaccgaagggccctggcactgagggacacggcggtgggaccaaagaagttgaaaacaaggagcaagaacagctctccgttaattttattgactacgaatatgcaacgccttcgcctgcagcattcgatttggcaaaccatttcgcggaatggggaggtttcgactgcgacttcagtgttctgccaacgagaacacaacggctggaatttattcgagagtatgtgaagacgtatacgcgcttagcagagaaggcggcaggtgtcagcgactcagagcccgacgaagattcagaagtgcagaagctctttgaagaggtagacgtctacagaggggtcccgggtttctactggggcatatgggctctcattcaagcaaccatctcacagatagattttgactacgcacaatacgctgaagtccgacttggtgaattctgggcttggcgagatgagttgaataacacacgcgaggcttcaggcaaggagatgcctttgcgagagaagagatgggcgcagttggagtgatacactagaccaaggatgcatctctttacgtgtaccatctcagcggcagcttttcaatcgggttgaagtaaaatggttgatgaaattgggtcaacaggactttcgatgtgaaagaatcacgcgttgggacgtgaagcaaagctcgcggttttagaaatgcgatattcctacaagcacttgagcagggaattgtagacatgtaccactgtatagaatcagtagaagaatagatcaaccgatagatcaagattaatcttgc

SEQ ID NO: 28562 - DNA, 3537 bp, Muscodor strobelii
  misc_feature: SGI cDNA ID NO. 569798
  misc_feature: Encodes the peptide sequence at SEQ ID NO 28563
atggcaaccgactcgtttgagccgcgacaagatcgtcgtgcttcgatactagacacccgggagacgtcggctcaacccgggtttgatccaatcttagatccaacgattcgacgcctctttgagcagcaagctgagattcaagccaaactggccgcgctgctcccacctagatacattgccaacggtagacttgaggtagacctgttgcgaaataagcttcgagctctcgaggcttacgtgcatggtcaaaccaatgcttacatcgtaattcctctagatctaccgggaatattcccgagtctatcagatatcgaagaagctcgatctctccaatataggtgtgagtgcattgaaagctatcttgtagaggaaggtctcgaccttcacgatcctagatttctggatgccttaagactacctgctcatggtgactccctgccgggctatagtgcttggctagataaaaatatttcttactatgacccagtatttcgaagatggaggatgcgaggtcccataccgctggtttcaagacgtcaagtatcgtttaaatgttgggaggaacagtgtgttcatcaaatttatggatttcccacgatcgaagaccgtgacgagcacgtaaaacagcacgtcaagtctttgaagagggattcaggacaggcccttggaaatttgccaccggttacattcactgaccagcctcaatcccggccgatcgatacggacaatcttccacgactatcagtgccttcatccttacccgctttagcaacaatcaatcaaccgaaagatcgccgaagttcgataccgggttatccacctgccggcgaatattctgctcaaccacgaggctcagtgtcaatagaacctgaggccgatccgttgctaccaccgctcaagcgaagtcgggtcggccattcacggttggaatccatcggtgagctgaggctgcctcgtgatgccggaccttgtcttcgctgtagagttcaagccaaaccttgcgacgcaaaagatgactgttgttcattctgtgccgacgaattgaatgctggcggggacgaattctgggccgttctcggttgccatcgagggccgctcgtcgccctggccgattatatgcttccagaagcattgtctccaaggcagacgcataccccagtgacatctcccatggcgaggcggcgcaatatgaacgagtatcttgaccgaacgtacctcgtcagtcaaagcatgtcggatttggtcaagactcatctcgatttcaatgatggcttctggtggaccgaagacctcgcgactctgcccatgccaaatccgacattagcgacttattccaaggagccaaaggactacgcgccgccagtccttaaggtgcttgccgcaagttggaatgcggaaggggtgcctttccaattttgggaactctttcgactgacgggctttatgtcagaaaacagagaggccgaagctatgtcttacccggttctataccgtgccaaacttttattgcgggaaattcttttttacgacttacaacagcccgagccttctatacgcactgaagtaaatgttacaaacgctcaacttcttccggacgagatggactacgacagccggaaccgcttgatctataattgcatggctcagtttttacaatctttcgaaagtatcacgatgcgaagagttgtatcggagcctaagagttggctcgcagtgtttgtttctctctgcattttcagcatcgtgagaaccatcctcgctgatttgatttcaacgccgtcgcgatctatacatagccaagctcaaaacggcctacccatctcaggaggcgctatggcgatgcatagcgtgtacaaagcacttgtccacatattcgtctggtccgcgccagtcatgttcgataatccgggtctagaattagatgcaaatgatcgagcgctttttgtcaacgcgctgtctgcgattcgaaaagacgagtgggtaccctggagcattcgctctacacaggacttcctattgggattgggaagcggttatcttgtggacaacatcggattcaatggatttttcaggcaacgcaccccgatctaccgacatgtgtcatacactcagcctgcggccgccggtgaaaccgatgaagcacgcagatccatctccgaatggcgaccaatagacccatgggcaaatcgaaacgatgctgagatgctcctgcccgctggttttggcatgcagcaagagcgacgacatactgtagcagagagccctgcgtttacacgcgccattgctcggggacttagttctcctacgaagctgagaacttcctaccaacgtccgccattacgaagagtgttttgtacgaaatgtaacgagtacccagaaggctttcgaggtgaacatgagctacggaggcataccgatgccaaacatgctgcactggtcaagcgatgggtttgtgctgagccagtgaatcgaagtccaaacgcaccacaaccgcagatcccgctatctaaatgtaaagcatgtgtgactcagaagaagtacggtgcatattataatgccgcggcgcacttgcggagggcgcatttccatccacacaggagtggcaaggctagtggagattggcctccaatgtcgatactgaaggactggatgcgagaggttcggcaatctattgacatcaatgacaacgacagttcaagcggtgaggaagagagtgaagtgcgcatgatagaggaatacacacatccacgacaacctgtcttcttagaggcgccaagactagcacctgcaccacctcaaggaccattactggcaccatctgtggcgccgtccttggaaagcactgtccatagcagcccaagcatgtcgaaagccgatgacaatcgcaacagatgccctcatccggactgtggtagagtcttcaaggacttggctgctcatatgctcacacaccaggaagaacggcccgaaaagtgcccgattgaaacatgcgagtatcacacgaaagggttcgcgagaaaatatgataaaaaccgacacgccttaacgcattacaaaggcacaatggtctgcccattctgcccgaactcgggcactgcatacgaaaaggcgttcaaccgagctgatgtcttcaagcggcacctgacaacagtgcacaatgtcgagcagactccacccaacagccggaagatgatcatcacaggtagcagttcacggaatggtgatgctcagtgctcgatctgccagaccagattctcgactgcgcaggaattctatgagcatctggacgactgcgtgctgaatgtcattgttgtgccaaccacacccaaaatttcaggggatcagacgtccactccgcagaagagcccaccgagatatgtagcttcaaacgtggatgaaagtgacgagaagggaagttttcacagcagtagagaaatgcgaagaagcgctgagataaatccgatgcccgagctgtccgatatggcacgagaaactaccgagaagatggacgttgattcggacgagcgtagtatgtaa

SEQ ID NO: 28563 - protein, 1178 aa, Muscodor strobelii
  misc_feature: SGI Peptide ID NO. 569798
  misc_feature (26)..(1110): NCBI GI: 171684779 Blast Desc: protein product [Podospora anserina] gi|170942350|emb|CAP68002.1| protein product [Podospora anserina]
  misc_feature (28)..(1167): NCBI GI: 85118089 Blast Desc: NCU02994 [Neurospora crassa OR74A] gi|16945371|emb|CAB97275.2| conserved [Neurospora crassa] gi|28927188|gb|EAA36144.1| NCU02994 [Neurospora crassa OR74A]
  misc_feature (28)..(1113): NCBI GI: 116192405 Blast Desc: CHGG_05920 [Chaetomium globosum CBS 148.51] gi|88181833|gb|EAQ89301.1| CHGG_05920 [Chaetomium globosum CBS 148.51]
  misc_feature (216)..(1111): NCBI GI: 261356589 Blast Desc: zinc finger protein [Verticillium albo-atrum VaMs.102]
  misc_feature (17)..(870): NCBI GI: 39941606 Blast Desc: MGG_05714 [Magnaporthe grisea 70-15] gi|145022406|gb|EDK06426.1| MGG_05714 [Magnaporthe grisea 70-15]
  misc_feature (61)..(1104): NCBI GI: 46108856 Blast Desc: FG01310.1 [Gibberella zeae PH-1]
  misc_feature (61)..(1104): NCBI GI: 256735028 Blast Desc: NECHADRAFT_31010 [Nectria haematococca mpVI 77-13-4]
  misc_feature (28)..(332): NCBI GI: 11359504 Blast Desc: NECHADRAFT_31010 [Nectria haematococca mpVI 77-13-4]
  misc_feature (915)..(1113): NCBI GI: 39941606 Blast Desc: MGG_05714 [Magnaporthe grisea 70-15] gi|145022406|gb|EDK06426.1| MGG_05714 [Magnaporthe grisea 70-15]
  misc_feature (962)..(1103): NCBI GI: 121719821 Blast Desc: C2H2 finger domain protein, [Aspergillus clavatus NRRL 1] gi|119404821|gb|EAW15183.1| C2H2 finger domain protein, [Aspergillus clavatus NRRL 1]
MATDSFEPRQDRRASILDTRETSAQPGFDPILDPTIRRLFEQQAEIQAKLAALLPPRYIANGRLEVDLLRNKLRALEAYVHGQTNAYIVIPLDLPGIFPSLSDIEEARSLQYRCECIESYLVEEGLDLHDPRFLDALRLPAHGDSLPGYSAWLDKNISYYDPVFRRWRMRGPIPLVSRRQVSFKCWEEQCVHQIYGFPTIEDRDEHVKQHVKSLKRDSGQALGNLPPVTFTDQPQSRPIDTDNLPRLSVPSSLPALATINQPKDRRSSIPGYPPAGEYSAQPRGSVSIEPEADPLLPPLKRSRVGHSRLESIGELRLPRDAGPCLRCRVQAKPCDAKDDCCSFCADELNAGGDEFWAVLGCHRGPLVALADYMLPEALSPRQTHTPVTSPMARRRNMNEYLDRTYLVSQSMSDLVKTHLDFNDGFWWTEDLATLPMPNPTLATYSKEPKDYAPPVLKVLAASWNAEGVPFQFWELFRLTGFMSENREAEAMSYPVLYRAKLLLREILFYDLQQPEPSIRTEVNVTNAQLLPDEMDYDSRNRLIYNCMAQFLQSFESITMRRVVSEPKSWLAVFVSLCIFSIVRTILADLISTPSRSIHSQAQNGLPISGGAMAMHSVYKALVHIFVWSAPVMFDNPGLELDANDRALFVNALSAIRKDEWVPWSIRSTQDFLLGLGSGYLVDNIGFNGFFRQRTPIYRHVSYTQPAAAGETDEARRSISEWRPIDPWANRNDAEMLLPAGFGMQQERRHTVAESPAFTRAIARGLSSPTKLRTSYQRPPLRRVFCTKCNEYPEGFRGEHELRRHTDAKHAALVKRWVCAEPVNRSPNAPQPQIPLSKCKACVTQKKYGAYYNAAAHLRRAHFHPHRSGKASGDWPPMSILKDWMREVRQSIDINDNDSSSGEEESEVRMIEEYTHPRQPVFLEAPRLAPAPPQGPLLAPSVAPSLESTVHSSPSMSKADDNRNRCPHPDCGRVFKDLAAHMLTHQEERPEKCPIETCEYHTKGFARKYDKNRHALTHYKGTMVCPFCPNSGTAYEKAFNRADVFKRHLTTVHNVEQTPPNSRKMIITGSSSRNGDAQCSICQTRFSTAQEFYEHLDDCVLNVIVVPTTPKISGDQTSTPQKSPPRYVASNVDESDEKGSFHSSREMRRSAEINPMPELSDMARETTEKMDVDSDERSM

SEQ ID NO: 28564 - DNA, 5016 bp, Muscodor strobelii
  misc_feature: SGI EST ID NO. CUFF.67300.0
  misc_feature: Variant of the nucleotide sequence at SEQ ID NO 28562
agacgccgaaagggtgagtcgcgatgtgattatctgcctgtattggtaaggtaccaagagatatgagtgccagtacatagtcttggggaaacgagtcttcaacttggcttgccagtatctgtcaaagttaggtagatgtcgcaaaggtcagggtccagacacacttacgtattcgtacccccaaacccactccaacaccccccaagccgaactacctatattcgtagagcacaatctagccctgtcttccctctcacccaccccagctagagcagcggcgtgccaacctctgccttgccttgccctgcccaccctgccgattgtccatcgtcgcctttcgcctgtcaaccgtgccctgtgtccagtgatcatgccctgcctgcccttgccctgcttctgccctgtgccggcctgtcagagctgtccgcctgcgccgtcttgtgcacagtacttgtagggtagcgttgcgttgcgttgcgttcctcggctcggtgtctctgcgtctgatgtacctggtctctgccagtagctggctcgagcgcaagctgccgtgccaggttgtgtgcgccagctatccacttcagctccagtaccgacaccgcgcgctgttaatctaccgccgttgcgacgacccacccgtcgtctggccctcatcaatcgtgaaaagctcacgccctctattgccgtcctgctctcacacatccaatggtcttggtctcgcttcttctcgattttcttgaaactaagataacacgccggagacgaattcttctactataagcttgcgatcttctcgtcccagctagctgctccacaccccagagtgactggattgatcgaagattatacccccctcttggatacccttcttttttacatcaaacctagcccattgggttccattggctgatgttgagatggcacgcatctaattcggggacaatcccatctttttgagtctcgtccagtgtcgttgttatcagcttccatcctaagttcactgtacaactccgtaagccgcatttgatgtcttctgtgacagctctaaagagacgtgagcgtgagcgtgcgagtgagctccacggagcaaagagccttagaccgtcctacaaggtcgctttctcgcatatccatacggctgtcggtgtacagttcaacgcctctgagcattagtgagcttcgggttggcccgcccaagtggattctcgcaacggcgaggaaggagaagcggctagagctcgccacgagtaagaaacatggcaaccgactcgtttgagccgcgacaagatcgtcgtgcttcgatactagacacccgggagacgtcggctcaacccgggtttgatccaatcttagatccaacgattcgacgcctctttgagcagcaagctgagattcaagccaaactggccgcgctgctcccacctagatacattgccaacggtagacttgaggtagacctgttgcgaaataagcttcgagctctcgaggcttacgtgcatggtcaaaatctaccgggaatattcccgagtctatcagatatcgaagaagctcgatctctccaatataggtgtgagtgcattgaaagctatcttgtagaggaaggtctcgaccttcacgatcctagatttctggatgccttaagactacctgctcatggtgactccctgccgggctatagtgcttggctagataaaaatatttcttactatgacccagtatttcgaagatggaggatgcgaggtcccataccgctggtttcaagacgtcaagtatcgtttaaatgttgggaggaacagtgtgttcatcaaatttatggatttcccacgatcgaagaccgtgacgagcacgtaaaacagcacgtcaagtctttgaagagggattcaggacaggcccttggaaatttgccaccggttacattcactgaccagcctcaatcccggccgatcgatacggacaatcttccacgactatcagtgccttcatccttacccgctttagcaacaatcaatcaaccgaaagatcgccgaagttcgataccgggttatccacctgccggcgaatattctgctcaaccacgaggctcagtgtcaatagaacctgaggccgatccgttgctaccaccgctcaagcgaagtcgggtcggccattcacggttggaatccatcggtgagctgaggctgcctcgtgatgccggaccttgtcttcgctgtagagttcaagccaaaccttgcgacgcaaaagatgactgttgttcattctgtgccgacgaattgaatgctggcggggacgaattctgggccgttctcggttgccatcgagggccgctcgtcgccctggccgattatatgcttccagaagcattgtctccaaggcagacgcataccccagtgacatctcccatggcgaggcggcgcaatatgaacgagtatcttgaccgaacgtacctcgtcagtcaaagcatgtcggatttggtcaagactcatctcgatttcaatgatggcttctggtggaccgaagacctcgcgactctgcccatgccaaatccgacattagcgacttattccaaggagccaaaggactacgcgccgccagtccttaaggtgcttgccgcaagttggaatgcggaaggggtgcctttccaattttgggaactctttcgactgacgggctttatgtcagaaaacagagaggccgaagctatgtcttacccggttctataccgtgccaaacttttattgcgggaaattcttttttacgacttacaacagcccgagccttctatacgcactgaagtaaatgttacaaacgctcaacttcttccggacgagatggactacgacagccggaaccgcttgatctataattgcatggctcagtttttacaatctttcgaaagtatcacgatgcgaagagttgtatcggagcctaagagttggctcgcagtgtttgtttctctctgcattttcagcatcgtgagaaccatcctcgctgatttgatttcaacgccgtcgcgatctatacatagccaagctcaaaacggcctacccatctcaggaggcgctatggcgatgcatagcgtgtacaaagcacttgtccacatattcgtctggtccgcgccagtcatgttcgataatccgggtctagaattagatgcaaatgatcgagcgctttttgtcaacgcgctgtctgcgattcgaaaagacgagtgggtaccctggagcattcgctctacacaggacttcctattgggattgggaagcggttatcttgtggacaacatcggattcaatggatttttcaggcaacgcaccccgatctaccgacatgtgtcatacactcagcctgcggccgccggtgaaaccgatgaagcacgcagatccatctccgaatggcgaccaatagacccatgggcaaatcgaaacgatgctgagatgctcctgcccgctggttttggcatgcagcaagagcgacgacatactgtagcagagagccctgcgtttacacgcgccattgctcggggacttagttctcctacgaagctgagaacttcctaccaacgtccgccattacgaagagtgttttgtacgaaatgtaacgagtacccagaaggctttcgaggtgaacatgagctacggaggcataccgatgccaaacatgctgcactggtcaagcgatgggtttgtgctgagccagtgaatcgaagtccaaacgcaccacaaccgcagatcccgctatctaaatgtaaagcatgtgtgactcagaagaagtacggtgcatattataatgccgcggcgcacttgcggagggcgcatttccatccacacaggagtggcaaggctagtggagattggcctccaatgtcgatactgaaggactggatgcgagaggttcggcaatctattgacatcaatgacaacgacagttcaagcggtgaggaagagagtgaagtgcgcatgatagaggaatacacacatccacgacaacctgtcttcttagaggcgccaagactagcacctgcaccacctcaaggaccattactggcaccatctgtggcgccgtccttggaaagcactgtccatagcagcccaagcatgtcgaaagccgatgacaatcgcaacagatgccctcatccggactgtggtagagtcttcaaggacttggctgctcatatgctcacacaccaggaagaacggcccgaaaagtgcccgattgaaacatgcgagtatcacacgaaagggttcgcgagaaaatatgataaaaaccgacacgccttaacgcattacaaaggcacaatggtctgcccattctgcccgaactcgggcactgcatacgaaaaggcgttcaaccgagctgatgtcttcaagcggcacctgacaacagtgcacaatgtcgagcagactccacccaacagccggaagatgatcatcacaggtagcagttcacggaatggtgatgctcagtgctcgatctgccagaccagattctcgactgcgcaggaattctatgagcatctggacgactgcgtgctgaatgtcattgttgtgccaaccacacccaaaatttcaggggatcagacgtccactccgcagaagagcccaccgagatatgtagcttcaaacgtggatgaaagtgacgagaagggaagttttcacagcagtagagaaatgcgaagaagcgctgagataaatccgatgcccgagctgtccgatatggcacgagaaactaccgagaagatggacgttgattcggacgagcgtagtatgtaatatacacgattacatgagtgaaagatttagtaaacataggaaagggggaaactccgtgcatatatacgattgacacgcgaaaaaatgaagagcgagcgagctatttgcatacccgatgtttggaaggacagattcaatcatcattctgttataccctacatgtagatatacaccctcgttacatctacctaccatttatctattcctacttctgcagcgcaatgcaatgcgggaatacgcccctcttcca

SEQ ID NO: 28565 - DNA, 2778 bp, Muscodor strobelii
  misc_feature: SGI cDNA ID NO. 569799
  misc_feature: Reduced expression when VOC is produced
  misc_feature: Encodes the peptide sequence at SEQ ID NO 28566
atgtccagcgcaaacagcatcaaggtcgttgcccgtttccggccccagaacaagaccgagctggagtcgggtggcgagcctatagtctctttcgatggcctcgacacatgtgctatcagctcccaagaagctgccggtagcttcaccttcgaccgcgtctttggtatgggaggaaagcagcacgagatcttcgattactccattcggccaacggttgacgacatcctcaacggttacaatggcacggtctttgcctacggccagaccggtgcgggaaagtcctataccatgatgggcaccaagatagaggacgaggatggcaagggtatcacgccgcgcattgtcgagcagatcttcagcagcattctctccagccccccgaccatcgagtacactgtccgagttagttacatggagatctacatggagcgcatccgcgacttgctcgccccacagaacgacaacctgcccgtccacgaggaaaagaaccgcggtgtctacgtcaagggtcttctcgaaatctacgtctccagcgtggaagaggtcttcgaggtcatgaagagaggtggcgctgcccgtgcggttgctgcgaccaacatgaaccaggagtcttcacgctcccactccatctttgtcatcaccgtgacacagaagaatctcgagacaggctcgatgaagagcggccagctcttccttgtcgatctggcgggtagcgaaaaggtgggcaagaccggcgcaagcggccagacccttgaggaggcaaagaagatcaacaagagtttgagtgccctgggcatggttatcaatgcgctgaccgacggcaaatcttcgcatattccctaccgcgactctaaattaaccagaatattacaagaatccttaggtggtaacagtagaacgacattgatcatcaactgttcgccgagtagctacaacgatgtcgagaccctgagtaccttacggtttggcatgcgcgccaagtcgatcaagaacaaggcaaaagtcaatgccgaactcagccccgccgagctcaaggccatgctggccaaagccaagtccaatatcaccaacttcgaaaactacatcgcttccctcgaaggcgaagtgcagctgtggcgctcgggcgagtccgtaccaaaggatcgatgggttcctccattgtcagatggccctgctgctaaggcagatcctcgaggcaccgtgcggccttcgacgccttcacgacttgttcccgaaagccgctccgagacacccgcattgacagatcgagccggaactccaagtctccccatggataaggacgagagagaggagttcctgcggagagaaaacgagctccaagaccagctggccgaaaaagaatcagctgtggtcgcagcggaaagaaccttgcaggagtctaaagacgagctgtcattcctcaaagagcatgatagcaaagtcggaaaggataatgagaggttgacgaccgaggtcaacgaggccaaaatgcagctcgagcgcctgaattttgaaagcaaagaggctcagatcactatggatgccctgaaagaagccaattctgaactgacctcggagctcgacgaagtcaaacagcaactgctcgatgtgaagatgagcgctaaggagaccagtgctgtcttggacgagaaggaaaagaaaaaggcagagaagatggccaagatgatggctggtttcgacttaggcagtgacgtctttagtgccaacgagcagcagattgccacggcgatagagcaagtcgagctattatatcaacaaagctacgctggcaacccaattccctcggatgacttgcaggctctcaaagctaaattggtagaaacccaaggcatcgtccgacaagccgaactatctctgtatagtggcgtgtctggtgactcggaggcccgtcgacgagttgagctggagaatcgattggagacgttgcaacaggagtatgaagacctcctcacacgcaacctcggggaagcggatgtcgaagaagtcaagagtcgcttgcaacaagcctacgctaacaaacaaaccactcaaatggagctggtagacgagctgaaggcggatattgctcaaaagtcgactgaaaacgctcgtatgaagacgttgattgacgaattgcagtcgcgcatcaagtcaggggcagtcgcagcacctggccttgcgaacggcaaaacgatccaacagcaaattgccgagtttgatgttatgaagaagagcttgatgcgtgatttgcagaaccgatgtgaacgtgttgtggaactcgagatttctctcgatgagacccgcgagcagtataacaacgtgctccggtcatcgaacaatcgtgcccagcagaagaagatggcattccttgagcgcaatttggagcagctcactcaggtgcaacgccagctcgttgaacaaaacagcagtctcaagaaggaggttgccattgcagagaggaagcttattgcgagaaacgagcggatatcaagcctagagagcttgctgcaagacagtcaggagaaactgactgcagcgaatcaccggttcgagactcaactcaccgcggtcaaagagcgcctcgaagctgccaaggccggctctactcgtggcctcgcagcatcaggtgccggaggctttagctttgccaatgcaggtagccgcatcgctaaaccacttcgtggaggaggtgaggcatctgctcaggttcctaccatcgccaatctgcagaatgagaacaacacgaagagaagcagctggggacttttccagaggtaa

SEQ ID NO: 28566 - protein, 925 aa, Muscodor strobelii
  misc_feature: SGI Peptide ID NO. 569799
  misc_feature (12)..(330): Pfam Id: PF00225 Pfam Desc: Kinesin motor domain
  misc_feature (3)..(925): NCBI GI: 154270889 Blast Desc: kinesin heavy chain [Ajellomyces capsulatus NAm1] gi|150409521|gb|EDN04965.1| kinesin heavy chain [Ajellomyces capsulatus NAm1]
  misc_feature (2)..(925): NCBI GI: 212526078 Blast Desc: kinesin family protein (KinA), [Penicillium marneffei ATCC 18224] gi|210072594|gb|EEA26681.1| kinesin family protein (KinA), [Penicillium marneffei ATCC 18224]
  misc_feature (3)..(925): NCBI GI: 225555563 Blast Desc: kinesin heavy chain [Ajellomyces capsulatus G186AR]
  misc_feature (9)..(925): NCBI GI: 169785022 Blast Desc: [Aspergillus oryzae RIB40] gi|83775719|dbj|BAE65839.1| protein product [Aspergillus oryzae]
  misc_feature (5)..(925): NCBI GI: 225678741 Blast Desc: kinesin heavy chain [Paracoccidioides brasiliensis Pb03] gi|226294886|gb|EEH50306.1| kinesin heavy chain [Paracoccidioides brasiliensis Pb18]
  misc_feature (3)..(925): NCBI GI: 145236585 Blast Desc: An06g01130 [Aspergillus niger] gi|134075399|emb|CAK39186.1| protein product [Aspergillus niger]
  misc_feature (4)..(925): NCBI GI: 12044815 Blast Desc: kinesin (KINA protein) [Emericella nidulans]
  misc_feature (5)..(925): NCBI GI: 226285593 Blast Desc: kinesin heavy chain [Paracoccidioides brasiliensis Pb01]
  misc_feature (8)..(925): NCBI GI: 255946636 Blast Desc: Pc22g00400 [Penicillium chrysogenum Wisconsin 54-1255] gi|211591102|emb|CAP97328.1| Pc22g00400 [Penicillium chrysogenum Wisconsin 54-1255]
  misc_feature (9)..(925): NCBI GI: 70992895 Blast Desc: kinesin family protein (KinA) [Aspergillus fumigatus Af293] gi|66848929|gb|EAL89258.1| kinesin family protein (KinA), [Aspergillus fumigatus Af293] gi|159130250|gb|EDP55363.1| kinesin
  misc_feature: Useful for introducing or modulating the production of volatile compounds
MSSANSIKVVARFRPQNKTELESGGEPIVSFDGLDTCAISSQEAAGSFTFDRVFGMGGKQHEIFDYSIRPTVDDILNGYNGTVFAYGQTGAGKSYTMMGTKIEDEDGKGITPRIVEQIFSSILSSPPTIEYTVRVSYMEIYMERIRDLLAPQNDNLPVHEEKNRGVYVKGLLEIYVSSVEEVFEVMKRGGAARAVAATNMNQESSRSHSIFVITVTQKNLETGSMKSGQLFLVDLAGSEKVGKTGASGQTLEEAKKINKSLSALGMVINALTDGKSSHIPYRDSKLTRILQESLGGNSRTTLIINCSPSSYNDVETLSTLRFGMRAKSIKNKAKVNAELSPAELKAMLAKAKSNITNFENYIASLEGEVQLWRSGESVPKDRWVPPLSDGPAAKADPRGTVRPSTPSRLVPESRSETPALTDRAGTPSLPMDKDEREEFLRRENELQDQLAEKESAVVAAERTLQESKDELSFLKEHDSKVGKDNERLTTEVNEAKMQLERLNFESKEAQITMDALKEANSELTSELDEVKQQLLDVKMSAKETSAVLDEKEKKKAEKMAKMMAGFDLGSDVFSANEQQIATAIEQVELLYQQSYAGNPIPSDDLQALKAKLVETQGIVRQAELSLYSGVSGDSEARRRVELENRLETLQQEYEDLLTRNLGEADVEEVKSRLQQAYANKQTTQMELVDELKADIAQKSTENARMKTLIDELQSRIKSGAVAAPGLANGKTIQQQIAEFDVMKKSLMRDLQNRCERVVELEISLDETREQYNNVLRSSNNRAQQKKMAFLERNLEQLTQVQRQLVEQNSSLKKEVAIAERKLIARNERISSLESLLQDSQEKLTAANHRFETQLTAVKERLEAAKAGSTRGLAASGAGGFSFANAGSRIAKPLRGGGEASAQVPTIANLQNENNTKRSSWGLFQR

SEQ ID NO: 28567 - DNA, 3688 bp, Muscodor strobelii
  misc_feature: SGI EST ID NO. CUFF.67363.1
  misc_feature: Variant of the nucleotide sequence at SEQ ID NO 28565
tgggagccgacgtgcacctgctgttgacttcaggcaccgccagatccctgttgttttggctcatcgccctctttgcccgcccaccgccatcattgctgtcgtcgtcaaccttttagccctcgttgtgtcggagatctgtctctatcaccacctcttggtactctcgcgcgcggctcactccgaattgtatatccatacctgctctgcttcaactcactgacttctttgcgacgagacgcccccgccctctgcctgccgttcgcacggcctgaggctcgagctgtcccgcgtcgtttcccccttccccctactgcggtcctccacctcaggaacatgagatagactctctgttctcccttcccccctcttggcccctgctgcacatagttctcttctcctagactgtcgcccatcatgtccagcgcaaacagcatcaaggtcgttgcccgtttccggccccagaacaagaccgagctggagtcgggtggcgagcctatagtctctttcgatggcctcgacacatgtgctatcagctcccaagaagctgccggtagcttcaccttcgaccgcgtctttggtatgggaggaaagcagcacgagatcttcgattactccattcggccaacggttgacgacatcctcaacggttacaatggcacggtctttgcctacggccagaccggtgcgggaaagtcctataccatgatgggcaccaagatagaggacgaggatggcaagggtatcacgccgcgcattgtcgagcagatcttcagcagcattctctccagccccccgaccatcgagtacactgtccgagttagttacatggagatctacatggagcgcatccgcgacttgctcgccccacagaacgacaacctgcccgtccacgaggaaaagaaccgcggtgtctacgtcaagggtcttctcgaaatctacgtctccagcgtggaagaggtcttcgaggtcatgaagagaggtggcgctgcccgtgcggttgctgcgaccaacatgaaccaggagtcttcacgctcccactccatctttgtcatcaccgtgacacagaagaatctcgagacaggctcgatgaagagcggccagctcttccttgtcgatctggcgggtagcgaaaaggtgggcaagaccggcgcaagcggccagacccttgaggaggcaaagaagatcaacaagagtttgagtgccctgggcatggttatcaatgcgctgaccgacggcaaatcttcgcatattccctaccgcgactctaaattaaccagaatattacaagaatccttaggtggtaacagtagaacgacattgatcatcaactgttcgccgagtagctacaacgatgtcgagaccctgagtaccttacggtttggcatgcgcgccaagtcgatcaagaacaaggcaaaagtcaatgccgaactcagccccgccgagctcaaggccatgctggccaaagccaagtccaatatcaccaacttcgaaaactacatcgcttccctcgaaggcgaagtgcagctgtggcgctcgggcgagtccgtaccaaaggatcgatgggttcctccattgtcagatggccctgctgctaaggcagatcctcgaggcaccgtgcggccttcgacgccttcacgacttgttcccgaaagccgctccgagacacccgcattgacagatcgagccggaactccaagtctccccatggataaggacgagagagaggagttcctgcggagagaaaacgagctccaagaccagctggccgaaaaagaatcagctgtggtcgcagcggaaagaaccttgcaggagtctaaagacgagctgtcattcctcaaagagcatgatagcaaagtcggaaaggataatgagaggttgacgaccgaggtcaacgaggccaaaatgcagctcgagcgcctgaattttgaaagcaaagaggctcagatcactatggatgccctgaaagaagccaattctgaactgacctcggagctcgacgaagtcaaacagcaactgctcgatgtgaagatgagcgctaaggagaccagtgctgtcttggacgagaaggaaaagaaaaaggcagagaagatggccaagatgatggctggtttcgacttaggcagtgacgtctttagtgccaacgagcagcagattgccacggcgatagagcaagtcgagctattatatcaacaaagctacgctggcaacccaattccctcggatgacttgcaggctctcaaagctaaattggtagaaacccaaggcatcgtccgacaagccgaactatctctgtatagtggcgtgtctggtgactcggaggcccgtcgacgagttgagctggagaatcgattggagacgttgcaacaggagtatgaagacctcctcacacgcaacctcggggaagcggatgtcgaagaagtcaagagtcgcttgcaacaagcctacgctaacaaacaaaccactcaaatggagctggtagacgagctgaaggcggatattgctcaaaagtcgactgaaaacgctcgtatgaagacgttgattgacgaattgcagtcgcgcatcaagtcaggggcagtcgcagcacctggccttgcgaacggcaaaacgatccaacagcaaattgccgagtttgatgttatgaagaagagcttgatgcgtgatttgcagaaccgatgtgaacgtgttgtggaactcgagatttctctcgatgagacccgcgagcagtataacaacgtgctccggtcatcgaacaatcgtgcccagcagaagaagatggcattccttgagcgcaatttggagcagctcactcaggtgcaacgccagctcgttgaacaaaacagcagtctcaagaaggaggttgccattgcagagaggaagcttattgcgagaaacgagcggatatcaagcctagagagcttgctgcaagacagtcaggagaaactgactgcagcgaatcaccggttcgagactcaactcaccgcggtcaaagagcgcctcgaagctgccaaggccggctctactcgtggcctcgcagcatcaggtgccggaggctttagctttgccaatgcaggtagccgcatcgctaaaccacttcgtggaggaggtgaggcatctgctcaggttcctaccatcgccaatctgcagaatgagaacaacacgaagagaagcagctggggacttttccagaggtaaatagcgacgggcaccgatcactagaaaggataggatgtcttgatgagaaggcatgaacactctgttacagaagaaacattatacccccgaagaactcaggtttttattgtctcaatcggcatggcagtcttttcgatagacagtggatagatagatgcggcgctgtgtgcggcgtaccatgggttatgcgatacgcctgatgcctttttcactttgtttgatatggaatgcaatcaacgtacgcacatgcacatacatccgcttggccttgtatgtgtattgggatggtagaggtgaaggcgtggaagagagcaatgggtcccacgaaagcagatggtgaactcatggcttgcaatgggcgaggacatttgttgttatagcatgcatattggtagaaagaaaccactatctcagatcattatttcaggtcttttatttgtcgtgaatggctgttgagaccggactatatgtcgttcgtttgctgagtgaatgtcca

SEQ ID NO: 28568 - DNA, 2832 bp, Muscodor strobelii
  misc_feature: SGI cDNA ID NO. 569800
  misc_feature: Encodes the peptide sequence at SEQ ID NO 28569
atgtccagcgcaaacagcatcaaggtcgttgcccgtttccggccccagaacaagaccgagctggagtcgggtggcgagcctatagtctctttcgatggcctcgacacatgtgctatcagctcccaagaagctgccggtagcttcaccttcgaccgcgtctttggtatgggaggaaagcagcacgagatcttcgattactccattcggccaacggttgacgacatcctcaacggttacaatggcacggtctttgcctacggccagaccggtgcgggaaagtcctataccatgatgggcaccaagatagaggacgaggatggcaagggtatcacgccgcgcattgtcgagcagatcttcagcagcattctctccagccccccgaccatcgagtacactgtccgagttagttacatggagatctacatggagcgcatccgcgacttgctcgccccacagaacgacaacctgcccgtccacgaggaaaagaaccgcggtgtctacgtcaagggtcttctcgaaatctacgtctccagcgtggaagaggtcttcgaggtcatgaagagaggtggcgctgcccgtgcggttgctgcgaccaacatgaaccaggagtcttcacgctcccactccatctttgtcatcaccgtgacacagaagaatctcgagacaggctcgatgaagagcggccagctcttccttgtcgatctggcgggtagcgaaaaggtgggcaagaccggcgcaagcggccagacccttgaggaggcaaagaagatcaacaagagtttgagtgccctgggcatggttatcaatgcgctgaccgacggcaaatcttcgcatattccctaccgcgactctaaattaaccagaatattacaagaatccttaggtggtaacagtagaacgacattgatcatcaactgttcgccgagtagctacaacgatgtcgagaccctgagtaccttacggtttggcatgcgcgccaagtcgatcaagaacaaggcaaaagtcaatgccgaactcagccccgccgagctcaaggccatgctggccaaagccaagtccaatatcaccaacttcgaaaactacatcgcttccctcgaaggcgaagtgcagctgtggcgctcgggcgagtccgtaccaaaggatcgatgggttcctccattgtcagatggccctgctgctaaggcagatcctcgaggcaccgtgcggccttcgacgccttcacgacttgttcccgaaagccgctccgagacacccgcattgacagatcgagccggaactccaagtctccccatggataaggacgagagagaggagttcctgcggagagaaaacgagctccaagaccagctggccgaaaaagaatcagctgtggtcgcagcggaaagaaccttgcaggagtctaaagacgagctgtcattcctcaaagagcatgatagcaaagtcggaaaggataatgagaggttgacgaccgaggtcaacgaggccaaaatgcagctcgagcgcctgaattttgaaagcaaagaggctcagatcactatggatgccctgaaagaagccaattctgaactgacctcggagctcgacgaagtcaaacagcaactgctcgatgtgaagatgagcgctaaggagaccagtgctgtcttggacgagaaggaaaagaaaaaggcagagaagatggccaagatgatggctggtttcgacttaggcagtgacgtctttagtgccaacgagcagcagattgccacggcgatagagcaagtcgagctattatatcaacaaagctacgctggcaacccaattccctcggatgacttgcaggctctcaaagctaaattggtagaaacccaaggcatcgtccgacaagccgaactatctctgtatagtggcgtgtctggtgactcggaggcccgtcgacgagttgagctggagaatcgattggagacgttgcaacaggagtatgaagacctcctcacacgcaacctcggggaagcggatgtcgaagaagtcaagagtcgcttgcaacaagcctacgctaacaaacaaaccactcaaatggagctggtagacgagctgaaggcggatattgctcaaaagtcgactgaaaacgctcgtatgaagacgttgattgacgaattgcagtcgcgcatcaagtcaggggcagtcgcagcacctggccttgcgaacggcaaaacgatccaacagcaaattgccgagtttgatgttatgaagaagagcttgatgcgtgatttgcagaaccgatgtgaacgtgttgtggaactcgagatttctctcgatgagacccgcgagcagtataacaacgtgctccggtcatcgaacaatcgtgcccagcagaagaagatggcattccttgagcgcaatttggagcagctcactcaggtgcaacgccagctcgttgaacaaaacagcagtctcaagaaggaggttgccattgcagagaggaagcttattgcgagaaacgagcggatatcaagcctagagagcttgctgcaagacagtcaggagaaactgactgcagcgaatcaccggttcgcaaccctttctccccctccatcatcttcctatactaataatagcgtcaggttcgagactcaactcaccgcggtcaaagagcgcctcgaagctgccaaggccggctctactcgtggcctcgcagcatcaggtgccggaggctttagctttgccaatgcaggtagccgcatcgctaaaccacttcgtggaggaggtgaggcatctgctcaggttcctaccatcgccaatctgcagaatgagaacaacacgaagagaagcagctggggacttttccagaggtaa

SEQ ID NO: 28569 - protein, 943 aa, Muscodor strobelii
  misc_feature: SGI Peptide ID NO. 569800
  misc_feature (12)..(330): Pfam Id: PF00225 Pfam Desc: Kinesin motor domain
  misc_feature (1)..(938): NCBI GI: 1839174 Blast Desc: kinesin [Nectria haematococca]
  misc_feature (1)..(938): NCBI GI: 46121419 Blast Desc: FG05088.1 [Gibberella zeae PH-1]
  misc_feature (1)..(938): NCBI GI: 51316436 Blast Desc: KINH_GIBMO RecName: Full=Kinesin heavy chain gi|29421276|gb|AAO59300.1| kinesin [Gibberella moniliformis]
  misc_feature (1)..(937): NCBI GI: 145613277 Blast Desc: conserved [Magnaporthe grisea 70-15] gi|145020392|gb|EDK04521.1| conserved [Magnaporthe grisea 70-15]
  misc_feature (4)..(938): NCBI GI: 154319592 Blast Desc: kinesin heavy chain [Botryotinia fuckeliana B05.10] gi|150855935|gb|EDN31127.1| kinesin heavy chain [Botryotinia fuckeliana B05.10]
  misc_feature (4)..(938): NCBI GI: 156061551 Blast Desc: kinesin heavy chain [Sclerotinia sclerotiorum 1980] gi|154700322|gb|EDO00061.1| kinesin heavy chain [Sclerotinia sclerotiorum 1980]
  misc_feature (2)..(943): NCBI GI: 164422752 Blast Desc: kinesin heavy chain [Neurospora crassa OR74A] gi|6016437|sp|P48467.2|KINH_NEUCR RecName: Full=Kinesin heavy chain gi|1947184|gb|AAB52961.1| kinesin [Neurospora crassa] heavy
  misc_feature (1)..(938): NCBI GI: 171690846 Blast Desc: protein product [Podospora anserina] gi|170945371|emb|CAP71483.1| protein product [Podospora anserina]
  misc_feature (4)..(851): NCBI GI: 51316437 Blast Desc: KINH_BOTFU RecName: Full=Kinesin heavy chain gi|29421230|gb|AAO59277.1| kinesin [Botryotinia fuckeliana]
  misc_feature (5)..(938): NCBI GI: 169606994 Blast Desc: SNOG_06549 [Phaeosphaeria nodorum SN15] gi|160707129|gb|EAT86380.2| SNOG_06549 [Phaeosphaeria nodorum SN15]
MSSANSIKVVARFRPQNKTELESGGEPIVSFDGLDTCAISSQEAAGSFTFDRVFGMGGKQHEIFDYSIRPTVDDILNGYNGTVFAYGQTGAGKSYTMMGTKIEDEDGKGITPRIVEQIFSSILSSPPTIEYTVRVSYMEIYMERIRDLLAPQNDNLPVHEEKNRGVYVKGLLEIYVSSVEEVFEVMKRGGAARAVAATNMNQESSRSHSIFVITVTQKNLETGSMKSGQLFLVDLAGSEKVGKTGASGQTLEEAKKINKSLSALGMVINALTDGKSSHIPYRDSKLTRILQESLGGNSRTTLIINCSPSSYNDVETLSTLRFGMRAKSIKNKAKVNAELSPAELKAMLAKAKSNITNFENYIASLEGEVQLWRSGESVPKDRWVPPLSDGPAAKADPRGTVRPSTPSRLVPESRSETPALTDRAGTPSLPMDKDEREEFLRRENELQDQLAEKESAVVAAERTLQESKDELSFLKEHDSKVGKDNERLTTEVNEAKMQLERLNFESKEAQITMDALKEANSELTSELDEVKQQLLDVKMSAKETSAVLDEKEKKKAEKMAKMMAGFDLGSDVFSANEQQIATAIEQVELLYQQSYAGNPIPSDDLQALKAKLVETQGIVRQAELSLYSGVSGDSEARRRVELENRLETLQQEYEDLLTRNLGEADVEEVKSRLQQAYANKQTTQMELVDELKADIAQKSTENARMKTLIDELQSRIKSGAVAAPGLANGKTIQQQIAEFDVMKKSLMRDLQNRCERVVELEISLDETREQYNNVLRSSNNRAQQKKMAFLERNLEQLTQVQRQLVEQNSSLKKEVAIAERKLIARNERISSLESLLQDSQEKLTAANHRFATLSPPPSSSYTNNSVRFETQLTAVKERLEAAKAGSTRGLAASGAGGFSFANAGSRIAKPLRGGGEASAQVPTIANLQNENNTKRSSWGLFQR

SEQ ID NO: 28570 - DNA, 3688 bp, Muscodor strobelii; identical to SEQ ID NO: 28567
  misc_feature: SGI EST ID NO. CUFF.67363.1
  misc_feature: Variant of the nucleotide sequence at SEQ ID NO 28568

SEQ ID NO: 28571 - DNA, 456 bp, Muscodor strobelii
  misc_feature: SGI cDNA ID NO. 569801
  misc_feature: Reduced expression when VOC is produced
  misc_feature: Encodes the peptide sequence at SEQ ID NO 28572
atgtcgaccgccgcccgccgccgcctgatgcgagacttcaagcgcatgcagacagatccaccagccggagtctctgcctctcccgtccccgacaatgtcatgacctggaatgccgtcatcataggccccgccgaaacgccgttcgaggatggcacgtttcgcctggtgatgcacttcgaggagcagtacccaaataagccgcctgccgtcaagttcatcagccagatgttccaccccaacgtctacgccactggcgagctctgtctcgacattctacagaatcggtggagtcctacgtacgacgtcgccgcggtcttgacgagcatacagagtctattaaacgatcccaacacaggctcgcctgcaaatgtagaggcgtcaaatctgtataaagacaaccggcgagagtacaccaagcgcgtccgcgagacggtggagaagagctgggaagactag

SEQ ID NO: 28572 - protein, 151 aa, Muscodor strobelii
  misc_feature: SGI Peptide ID NO. 569801
  misc_feature (8)..(145): Pfam Id: PF00179 Pfam Desc: Ubiquitin-conjugating enzyme
  misc_feature (1)..(151): NCBI GI: 171690844 Blast Desc: protein product [Podospora anserina] gi|170945370|emb|CAP71482.1| protein product [Podospora anserina]
  misc_feature (1)..(151): NCBI GI: 116195860 Blast Desc: CHGG_04528 [Chaetomium globosum CBS 148.51] gi|88180441|gb|EAQ87909.1| CHGG_04528 [Chaetomium globosum CBS 148.51]
  misc_feature (1)..(151): NCBI GI: 261355816 Blast Desc: ubiquitin-conjugating enzyme [Verticillium albo-atrum VaMs.102]
  misc_feature (1)..(151): NCBI GI: 1100729 Blast Desc: mus-8 [Neurospora crassa]
  misc_feature (1)..(151): NCBI GI: 74654914 Blast Desc: UBC2_NECHA RecName: Full=Ubiquitin-conjugating enzyme E2 2; AltName: Full=Ubiquitin-protein ligase UBC2; AltName: Full=Ubiquitin carrier protein UBC2; AltName: Full=Radiation 6
  misc_feature (1)..(151): NCBI GI: 154319590 Blast Desc: ubiquitin-conjugating enzyme E2-17 kDa [Botryotinia fuckeliana B05.10] gi|156061553|ref|XP_001596699.1| ubiquitin-conjugating enzyme E2 [Sclerotinia sclerotiorum 1980]
  misc_feature (1)..(151): NCBI GI: 261195754 Blast Desc: ubiquitin-conjugating enzyme E2 2 [Ajellomyces dermatitidis SLH14081] gi|225678742|gb|EEH17026.1| ubiquitin-conjugating enzyme [Paracoccidioides brasiliensis Pb03]
  misc_feature (1)..(151): NCBI GI: 164422754 Blast Desc: ubiquitin-conjugating enzyme E2 2 [Neurospora crassa OR74A] gi|182705240|sp|P52493.3|UBC2_NEUCR RecName: Full=Ubiquitin-conjugating enzyme E2 2; AltName: ligase ubc2; 8 2
  misc_feature (1)..(151): NCBI GI: 154270887 Blast Desc: ubiquitin-conjugating enzyme E2 2 [Ajellomyces capsulatus NAm1] gi|150409520|gb|EDN04964.1| ubiquitin-conjugating enzyme E2 2 [Ajellomyces capsulatus NAm1]
  misc_feature (1)..(151): NCBI GI: 74655974 Blast Desc: UBC2_TRIHA RecName: Full=Ubiquitin-conjugating enzyme E2 2; AltName: Full=Ubiquitin-protein ligase UBC2; AltName: Full=Ubiquitin carrier protein UBC2 gi|61743836|gb|AAX55621.1|
  misc_feature (1)..(151): SWISSPROT Homolog: EC 6.3.2.19 Ubiquitin--protein ligase
  misc_feature: Useful for introducing or modulating the production of volatile compounds
MSTAARRRLMRDFKRMQTDPPAGVSASPVPDNVMTWNAVIIGPAETPFEDGTFRLVMHFEEQYPNKPPAVKFISQMFHPNVYATGELCLDILQNRWSPTYDVAAVLTSIQSLLNDPNTGSPANVEASNLYKDNRREYTKRVRETVEKSWED

SEQ ID NO: 28573 - DNA, 1489 bp, Muscodor strobelii
  misc_feature: SGI EST ID NO. CUFF.67471.1
  misc_feature: Variant of the nucleotide sequence at SEQ ID NO 28571
agggaatatcaggtcccaatgtaagtcggcgaatgcgactgcattctactggtctgcgaaccagggcggaacatattccgaattggcaggaagaagtgcctgatccatacacaacatcttgtccgtccctaatgaataggtaaaacgcgagaagctatttaaatcctaatgccaatggagaaaaagagaaacccatgttctccttctcacgaagctgctcgatgggcgacttggtgcacgccatataagccattcaatgaggaaagagtcatgcatggggttcccagtgcaggcaatagtggtccgccaatagattaatggccgttatcgatttagctggttcggctctctacagtacaaaggcaggtgctgccatgccgcgctcggccttgcaaccataggtcattcccctccgcctgcttcgattgcaacatacatgcatcgagagtcattctcgccccatcatcaccatcatcgtctttgcccgtctactaccccgggtgcatccagggacgccataaatttaccgcgcgctgccgtgagagctgcgagccttctattctctctacaccggcgtctcgcctccaacgtcactcctccgtgaccgagctttaccccgtaaccagatatgtcgaccgccgcccgccgccgcctgatgcgagacttcaagcgcatgcagacagatccaccagccggagtctctgcctctcccgtccccgacaatgtcatgacctggtgagcacgctgtccacggaccgtctgtgcttgaaacccccgcggctgcctgccgactgacctttgtgcgcctgcaggaatgccgtcatcataggccccgccgaaacgccgttcgaggatggcacgtttcgcctggtgatgcacttcgaggagcagtacccaaataagccgcctgccgtcaagttcatcagccagatgttccaccccaacgtctacgccactggcgagctctgtctcgacattctacagaatcggtggagtcctacgtacgacgtcgccgcggtcttgacgagcatacagagtctattaaacgatcccaacacaggctcgcctgcaaatgtagaggcgtcaaatctgtataaagacaaccggcgagagtacaccaagcgcgtccgcgagacggtggagaagagctgggaagactagtcaaagcacattcgaggcgtatcatgggcttgctgggcctgcttggtctacttggcctgtaggtaatggatctcacagttcacttggttgcgcaggcgttggcgtttcgagcaaatccctggaaagtcatttgtctttataagcaagaggcaacaggaaagccgtggggcctgtcgttccatattgcatgtacataaccgcataactaggcgttttcccacaataccattcttactacgcactccagtttacacgagcatacctctactccaaatcgcagcgctgtgcagggctgtgactgttgtgccatttcttctagtcctccctg

SEQ ID NO: 28574 - DNA, 1296 bp, Muscodor strobelii
  misc_feature: SGI cDNA ID NO. 569802
  misc_feature: Encodes the peptide sequence at SEQ ID NO 28575
atggtcttgaggatatcgccaccaatgctacgaagctccgcgaagctccctccctgtctatcctcggctcgttatttctcagtacagacttgcctgcggcaagaagttagagatgcttacatattgagtgcttccaggacacccactgctaaattcaatggatcgtttttgactgtatctgccccgaggctcggtgccgtcgctataaaatctgccgttgagaagtccaaggtgccagttgagcatatcaccgatgtatacatgggcaatgttctacaagcctccgtcggccaggcgcccgcgcgacaggcttccatctttgccggactccccaacacagttgaggccatcaccattaacaaggtgtgcgcatctggcctgaaggccgtcacattcgctgcacaaaacatccagctcggcctggccgaggcgcaagtggctggcggcatggagaacatgtcacaggttccatactatatagccagagccagcggattgccggcattcggtcacatcaaaatggaggatggccttatcaaagatgggttgacagatgtctacgatcagtttcacatgggtatttgtgccgagaccacagccaagaagcacaatatcacccgcgagatgcaagacgagtatgcgatcaaatcgtacgagcaagcgcaggctgcttggaaggccaatgcgtttgccgaagagatcgcccccgtaacggtaaaaggaaggaaaggagacacgatcatcgagacagacgagggttatatggatgtcaaattagacaaagttcccactctcaagccagctttcgtccgcgacggcacaggtacggtcacggctgccaactcgtcaacactgaatgacggcgccagtgcccttgttttagggagcaaggccattgcgcaagagtttggagcgggttcgagggtgctggcgaggatatgcagttcggcagacgcggcggttgacccggtggacttccccgtggcgccagccaaagcggtcccgatcgctctcgagcgtgcaggcatcacgaaagatcaggttgcggtatgggaattcaacgaggctttcgcagctgtgatcaaggccaacgagcagatccttgggttgcagaatgcgcgggtgaacccgttaggtggagctatctcgttgggtcacgctctgggcagctccgggtcacgaatcctcaccacactactccaccaactcaagcccggtgagtatggagttgcggcaatctgcaacggtggcggatgcgccacggctatggtggttcagcgtatcgaaaaagtgtag

SEQ ID NO: 28575 - protein, 431 aa, Muscodor strobelii
  misc_feature: SGI Peptide ID NO. 569802
  misc_feature (307)..(427): Pfam Id: PF02803 Pfam Desc: Thiolase, C-terminal domain
  misc_feature (36)..(298): Pfam Id: PF00108 Pfam Desc: Thiolase, N-terminal domain
  misc_feature (10)..(431): NCBI GI: 116195858 Blast Desc: CHGG_04527 [Chaetomium globosum CBS 148.51] gi|88180440|gb|EAQ87908.1| CHGG_04527 [Chaetomium globosum CBS 148.51]
  misc_feature (9)..(431): NCBI GI: 171690842 Blast Desc: protein product [Podospora anserina] gi|170945369|emb|CAP71481.1| protein product [Podospora anserina]
  misc_feature (1)..(431): NCBI GI: 39952225 Blast Desc: conserved [Magnaporthe grisea 70-15] gi|145020394|gb|EDK04523.1| conserved [Magnaporthe grisea 70-15]
  misc_feature (22)..(431): NCBI GI: 261355817 Blast Desc: acetyl-CoA acetyltransferase [Verticillium albo-atrum VaMs.102]
  misc_feature (24)..(431): NCBI GI: 154319588 Blast Desc: BC1G_02275 [Botryotinia fuckeliana B05.10] gi|150855933|gb|EDN31125.1| BC1G_02275 [Botryotinia fuckeliana B05.10]
  misc_feature (34)..(431): NCBI GI: 46121417 Blast Desc: FG05087.1 [Gibberella zeae PH-1]
  misc_feature (16)..(431): NCBI GI: 121700374 Blast Desc: acetyl-CoA-acetyltransferase, [Aspergillus clavatus NRRL 1] gi|119396594|gb|EAW07026.1| acetyl-CoA-acetyltransferase, [Aspergillus clavatus NRRL 1]
  misc_feature (1)..(431): NCBI GI: 169785018 Blast Desc: [Aspergillus oryzae RIB40] gi|83775717|dbj|BAE65837.1| protein product [Aspergillus oryzae]
  misc_feature (20)..(431): NCBI GI: 164422756 Blast Desc: acetyl-CoA acetyltransferase [Neurospora crassa OR74A] gi|157069808|gb|EAA35198.2| acetyl-CoA acetyltransferase [Neurospora crassa OR74A]
  misc_feature (1)..(431): NCBI GI: 238507752 Blast Desc: acetyl-CoA-acetyltransferase, [Aspergillus flavus NRRL3357] gi|220688596|gb|EED44948.1| acetyl-CoA-acetyltransferase, [Aspergillus flavus NRRL3357]
  misc_feature (24)..(428): SWISSPROT Homolog: EC 2.3.1.9 Acetyl-CoA C-acetyltransferase
  misc_feature: Useful for fungicidal and/or biocontrol applications
MVLRISPPMLRSSAKLPPCLSSARYFSVQTCLRQEVRDAYILSASRTPTAKFNGSFLTVSAPRLGAVAIKSAVEKSKVPVEHITDVYMGNVLQASVGQAPARQASIFAGLPNTVEAITINKVCASGLKAVTFAAQNIQLGLAEAQVAGGMENMSQVPYYIARASGLPAFGHIKMEDGLIKDGLTDVYDQFHMGICAETTAKKHNITREMQDEYAIKSYEQAQAAWKANAFAEEIAPVTVKGRKGDTIIETDEGYMDVKLDKVPTLKPAFVRDGTGTVTAANSSTLNDGASALVLGSKAIAQEFGAGSRVLARICSSADAAVDPVDFPVAPAKAVPIALERAGITKDQVAVWEFNEAFAAVIKANEQILGLQNARVNPLGGAISLGHALGSSGSRILTTLLHQLKPGEYGVAAICNGGGCATAMVVQRIEKV

SEQ ID NO: 28576 - DNA, 1773 bp, Muscodor strobelii
  misc_feature: SGI EST ID NO. CUFF.67643.1
  misc_feature: Variant of the nucleotide sequence at SEQ ID NO 28574
ggggagccaggccccgcctcacccgcagtaagccgaggggcacgccggggacaagctgggtagcgccggccagaagctgccttcggaattgcatgtgctctttcatcattgttgctctcgcttctactctccatcctgaatgtttgacaataccatactgtgtctacggcaatttcaattacccaagtctcggcggggaatcagacgtttcatagtatagtgtcacaaatcaggcttctttcaacatggtcttgaggatatcgccaccaatgctacgaagctccgcgaagctccctccctgtctatcctcggctcgttatttctcagtacagacttgcctgcggcaagaagttagagatgcttacatattgagtgcttccaggacacccactgctaaattcaatggatcgtttttgactgtatctgccccgaggctcggtgccgtcgctataaaatctgccgttgagaagtccaaggtgccagttgagcatatcaccgatgtatacatgggcaatgttctacaagcctccgtcggccaggcgcccgcgcgacaggcttccatctttgccggactccccaacacagttgaggccatcaccattaacaaggtgtgcgcatctggcctgaaggccgtcacattcgctgcacaaaacatccagctcggcctggccgaggcgcaagtggctggcggcatggagaacatgtcacaggttccatactatatagccagagccagcggattgccggcattcggtcacatcaaaatggaggatggccttatcaaagatgggttgacagatgtctacgatcagtttcacatgggtatttgtgccgagaccacagccaagaagcacaatatcacccgcgagatgcaagacgagtatgcgatcaaatcgtacgagcaagcgcaggctgcttggaaggccaatgcgtttgccgaagagatcgcccccgtaacggtaaaaggaaggaaaggagacacgatcatcgagacagacgagggttatatggatgtcaaattagacaaagttcccactctcaagccagctttcgtccgcgacggcacaggtacggtcacggctgccaactcgtcaacactgaatgacggcgccagtgcccttgttttagggagcaaggccattgcgcaagagtttggagcgggttcgagggtgctggcgaggatatgcagttcggcagacgcggcggttgacccggtggacttccccgtggcgccagccaaagcggtcccgatcgctctcgagcgtgcaggcatcacgaaagatcaggttgcggtatgggaattcaacgaggctttcgcagctgtgatcaaggccaacgagcagatccttgggttgcagaatgcgcgggtgaacccgttaggtggagctatctcgttgggtcacgctctgggcagctccgggtcacgaatcctcaccacactactccaccaactcaagcccggtgagtatggagttgcggcaatctgcaacggtggcggatgcgccacggctatggtggttcagcgtatcgaaaaagtgtaggccgccccgatggttgttgttgcccctaatgtatatatccacgtttcatgtcgaccaaaatcaaggcaatgacacaacgcccgtttgttgatgaaaatgcacggtgactcgtaggactcactcatttcggtccttatctacatacgtgcgcattcagccctcctctcgcatacagtttcgtgttaatacagtgatggcagtaggtgataatacagttaattcctacagcgat

SEQ ID NO: 28577 - DNA, 1590 bp, Muscodor strobelii
  misc_feature: SGI cDNA ID NO. 569803
  misc_feature: Encodes the peptide sequence at SEQ ID NO 28578
atgtctttgactatccagttcctcaccggcattcgaggcctcctcaaggcccgggatggtgccgggcttcgtgattggcttcgagtcgagcctcctctgcccaaagagtatcaccagcttgccgaagaattgaggcaggggtatcagaactcagacagtcttcaaaaacttgtcgagggcgcgcttcccgaagaggacgatctgccagaggaccaaggtacagcctggccgggcttcgtcacctttatgaaagactacttcgagtattggcgagatgtcaacttcgaagatctcctcgccgcccaccaggttctcatggctctcacaaactcctgcacgaccgcgttgaataacccgacctatggcaccatcatgtttgagaccagcatttcactatgtgcttctctttctaagctatcgatgacgcttaacaagcgccccgatctgaccaagaagctgaatactgtggacaccggcgacgacgatcaggcttccatcgtcggcaccacagccgaagccattcagaaaatatttacatcctgtctgacggatagagccagccaacggtatgcaaagcctgaaggcagaaaggttggcgtatatatttttgccaacgtgacactaaagcttctattcgcttcgcgtaagacgcatctcgctaagcagctcttcaccaacgtcagcgccaaagctcctcctctttcgttctatccagcagctcagagagtcacgtatctctactatctaggacggttccacttcgtgaataaccactttggtagagcatctcaatgcctccaagaagcctactcacagacaccgccgcgtttcgagaaacaccggcagctcatcctcacctatctaatcccctgtaacatgatcctcggtcgcctgccttcccaaactcttttacaacggccggagactcaatccatggcaaccgttttcacccaactatcaaaggctatctcgactgggaatttcgtcgcgttccaacaatgtctcgagacgcacgaagcctggctctttcaaaagagactactgctcacgctaacataccgcttgaggcctttgctgtggcgttcactatcgcggcgcacctttctactgacatacatcgcaccttccgaggcagatacacgaaaagctcctacgttagagctctcgcatttattagctactgctacatatgtccaaagacgactagagggttatctgccttccgaacctgaggggaagggaaggcaatcgcaagccaatagcatatttatgaaagcagtggtcaatagtgttggatcgagctcccggcattcaacactagccccgcctccgggaggacctaagctgcttcgacctaacgagggcctgatttggggcaatatggccatcactgacgagcatgtggaatcaatggtggcctcactctgtgcccagggccttctgcacggatacttggctcacactcaagggcgattcgctgttaatggcacgaagcagaaaggaagtgcggttgcggcaggttggccacctgttgcggaggttctagccctaacagataatgaaatccccggttgggtcagagaccagtga

SEQ ID NO: 28578 - protein, 529 aa, Muscodor strobelii
  misc_feature: SGI Peptide ID NO. 569803
  misc_feature (1)..(527): NCBI GI: 46121415 Blast Desc: FG05086.1 [Gibberella zeae PH-1]
  misc_feature (1)..(368): NCBI GI: 171690840 Blast Desc: protein product [Podospora anserina] gi|170945368|emb|CAP71480.1| protein product [Podospora anserina]
  misc_feature (1)..(515): NCBI GI: 145613281 Blast Desc: MGG_01754 [Magnaporthe grisea 70-15] gi|145020395|gb|EDK04524.1| MGG_01754 [Magnaporthe grisea 70-15]
  misc_feature (1)..(527): NCBI GI: 116195856 Blast Desc: CHGG_04526 [Chaetomium globosum CBS 148.51] gi|88180439|gb|EAQ87907.1| CHGG_04526 [Chaetomium globosum CBS 148.51]
  misc_feature (1)..(526): NCBI GI: 154311640 Blast Desc: BC1G_06279 [Botryotinia fuckeliana B05.10] gi|150850790|gb|EDN25983.1| BC1G_06279 [Botryotinia fuckeliana B05.10]
  misc_feature (7)..(527): NCBI GI: 225555574 Blast Desc: PCI domain-containing protein [Ajellomyces capsulatus G186AR]
  misc_feature (6)..(527): NCBI GI: 119473303 Blast Desc: NFIA_060170 [Neosartorya fischeri NRRL 181] gi|119406710|gb|EAW16661.1| conserved [Neosartorya fischeri NRRL 181]
  misc_feature (6)..(527): NCBI GI: 70992909 Blast Desc: conserved [Aspergillus fumigatus Af293] gi|66848936|gb|EAL89265.1| conserved [Aspergillus fumigatus Af293] gi|159130243|gb|EDP55356.1| conserved [Aspergillus A1163]
  misc_feature (6)..(420): NCBI GI: 238507644 Blast Desc: conserved [Aspergillus flavus NRRL3357] gi|220688542|gb|EED44894.1| conserved [Aspergillus flavus NRRL3357]
  misc_feature (6)..(527): NCBI GI: 119197019 Blast Desc: CIMG_02884 [Coccidioides immitis RS]
MSLTIQFLTGIRGLLKARDGAGLRDWLRVEPPLPKEYHQLAEELRQGYQNSDSLQKLVEGALPEEDDLPEDQGTAWPGFVTFMKDYFEYWRDVNFEDLLAAHQVLMALTNSCTTALNNPTYGTIMFETSISLCASLSKLSMTLNKRPDLTKKLNTVDTGDDDQASIVGTTAEAIQKIFTSCLTDRASQRYAKPEGRKVGVYIFANVTLKLLFASRKTHLAKQLFTNVSAKAPPLSFYPAAQRVTYLYYLGRFHFVNNHFGRASQCLQEAYSQTPPRFEKHRQLILTYLIPCNMILGRLPSQTLLQRPETQSMATVFTQLSKAISTGNFVAFQQCLETHEAWLFQKRLLLTLTYRLRPLLWRSLSRRTFLLTYIAPSEADTRKAPTLELSHLLATATYVQRRLEGYLPSEPEGKGRQSQANSIFMKAVVNSVGSSSRHSTLAPPPGGPKLLRPNEGLIWGNMAITDEHVESMVASLCAQGLLHGYLAHTQGRFAVNGTKQKGSAVAAGWPPVAEVLALTDNEIPGWVRDQ

SEQ ID NO: 28579 - DNA, 2136 bp, Muscodor strobelii
  misc_feature: SGI EST ID NO. CUFF.67655.0
  misc_feature: Variant of the nucleotide sequence at SEQ ID NO 28577
gcgacctgcaatttggccgacctaagaggtagctaaccaaaattcgagtgccatgccggactacgtctcaatctttcttactacaagcttaaatacgcactcgacttcgaacgcacatttgcattttctttgcatatgaggaccagcgcatcatagttctcagagctttaagacgttatacccgcagggaaccaagtcagactcgacccgcgacacaaacgagatcgcgaaccatccgaaagactcgtcgaacaccgacgcaatgcgctgaactctcgacatcttgctgttgcaatacaacccacatcatgtctttgactatccagttcctcaccggcattcgaggcctcctcaaggcccgggatggtgccgggcttcgtgattggcttcgagtcgagcctcctctgcccaaagagtatcaccagcttgccgaagaattgaggcaggggtatcagaactcagacagtcttcaaaaacttgtcgagggcgcgcttcccgaagaggacgatctgccagaggaccaaggtacagcctggccgggcttcgtcacctttatgaaagactacttcgagtattggcgagatgtcaacttcgaagatctcctcgccgcccaccaggttctcatggctctcacaaactcctgcacgaccgcgttgaataacccgacctatggcaccatcatgtttgagaccagcatttcactatgtgcttctctttctaagctatcgatgacgcttaacaagcgccccgatctgaccaagaagctgaatactgtggacaccggcgacgacgatcaggcttccatcgtcggcaccacagccgaagccattcagaaaatatttacatcctgtctgacggatagagccagccaacggtatgcaaagcctgaaggcagaaaggttggcgtatatatttttgccaacgtgacactaaagcttctattcgcttcgcgtaagacgcatctcgctaagcagctcttcaccaacgtcagcgccaaagctcctcctctttcgttctatccagcagctcagagagtcacgtatctctactatctaggacggttccacttcgtgaataaccactttggtagagcatctcaatgcctccaagaagcctactcacagacaccgccgcgtttcgagaaacaccggcagctcatcctcacctatctaatcccctgtaacatgatcctcggtcgcctgccttcccaaactcttttacaacggccggagactcaatccatggcaaccgttttcacccaactatcaaaggctatctcgactgggaatttcgtcgcgttccaacaatgtctcgagacgcacgaagcctggctctttcaaaagagactactgctcacgctaacataccgcttgaggcctttgctgtggcgttcactatcgcggcgcacctttctactgacatacatcgcaccttccgaggcagatacacgaaaagctcctacgttagagctctcgcatttattagctactgctacatatgtccaaagacgactagagggttatctgccttccgaacctgaggggaagggaaggcaatcgcaagccaatagcatatttatgaaagcagtggtcaatagtgttggatcgagctcccggcattcaacactagccccgcctccgggaggacctaagctgcttcgacctaacgagggcctgatttggggcaatatggccatcactgacgagcatgtggaatcaatggtggcctcactctgtgcccagggccttctgcacggatacttggctcacactcaagggcgattcgctgttaatggcacgaagcagaaaggaagtgcggttgcggcaggttggccacctgttgcggaggttctagccctaacagataatgaaatccccggttgggtcagagaccagtgaggtctctggtacaaattgagccaacagtgagactggactggcgcgttagacagcatgttttgtgcagcgcgcctcgctcgagtattcttcttgagcgttgatgaatttcatctgcaagtatatacaaattaatgataccctagatcacattgccttgggctgtgttctgctgcatacagaatcctcaaatgacaaaaaagacaattacctaacgttatgcataaacaatgtgacgacg

SEQ ID NO: 28580 - DNA, 657 bp, Muscodor strobelii
  misc_feature: SGI cDNA ID NO. 569804
  misc_feature: Encodes the peptide sequence at SEQ ID NO 28581
atggcaaccgttttcacccaactatcaaaggctatctcgactgggaatttcgtcgcgttccaacaatgtctcgagacgcacgaagcctggctctttcaaaagagactactgctcacgctaacataccgcttgaggcctttgctgtggcgttcactatcgcggcgcacctttctactgacatacatcgcaccttccgaggcagatacacgaaaagctcctacgttagagctctcgcatttattagctactgctacatatgtccaaagacgactagagggttatctgccttccgaacctgaggggaagggaaggcaatcgcaagccaatagcatatttatgaaagcagtggtcaatagtgttggatcgagctcccggcattcaacactagccccgcctccgggaggacctaagctgcttcgacctaacgagggcctgatttggggcaatatggccatcactgacgagcatgtggaatcaatggtggcctcactctgtgcccagggccttctgcacggatacttggctcacactcaagggcgattcgctgttaatggcacgaagcagaaaggaagtgcggttgcggcaggttggccacctgttgcggaggttctagccctaacagataatgaaatccccggttgggtcagagaccagtga

SEQ ID NO: 28581 - protein, 218 aa, Muscodor strobelii
  misc_feature: SGI Peptide ID NO. 569804
  misc_feature (1)..(216): NCBI GI: 46121415 Blast Desc: FG05086.1 [Gibberella zeae PH-1]
  misc_feature (1)..(216): NCBI GI: 116195856 Blast Desc: CHGG_04526 [Chaetomium globosum CBS 148.51] gi|88180439|gb|EAQ87907.1| CHGG_04526 [Chaetomium globosum CBS 148.51]
  misc_feature (1)..(204): NCBI GI: 145613281 Blast Desc: MGG_01754 [Magnaporthe grisea 70-15] gi|145020395|gb|EDK04524.1| MGG_01754 [Magnaporthe grisea 70-15]
  misc_feature (5)..(215): NCBI GI: 154311640 Blast Desc: BC1G_06279 [Botryotinia fuckeliana B05.10] gi|150850790|gb|EDN25983.1| BC1G_06279 [Botryotinia fuckeliana B05.10]
  misc_feature (5)..(215): NCBI GI: 156061805 Blast Desc: SS1G_03048 [Sclerotinia sclerotiorum 1980] gi|154700449|gb|EDO00188.1| SS1G_03048 [Sclerotinia sclerotiorum 1980]
  misc_feature (77)..(217): NCBI GI: 171690838 Blast Desc: protein product [Podospora anserina] gi|170945367|emb|CAP71479.1| protein product [Podospora anserina]
  misc_feature (113)..(216): NCBI GI: 261355819 Blast Desc: conserved [Verticillium albo-atrum VaMs.102]
  misc_feature (1)..(216): NCBI GI: 255946624 Blast Desc: Pc22g00340 [Penicillium chrysogenum Wisconsin 54-1255] gi|211591096|emb|CAP97322.1| Pc22g00340 [Penicillium chrysogenum Wisconsin 54-1255]
  misc_feature (4)..(216): NCBI GI: 225555574 Blast Desc: PCI domain-containing protein [Ajellomyces capsulatus G186AR]
  misc_feature (4)..(216): NCBI GI: 240280892 Blast Desc: COP9 signalosome complex subunit 12 [Ajellomyces capsulatus H143]
MATVFTQLSKAISTGNFVAFQQCLETHEAWLFQKRLLLTLTYRLRPLLWRSLSRRTFLLTYIAPSEADTRKAPTLELSHLLATATYVQRRLEGYLPSEPEGKGRQSQANSIFMKAVVNSVGSSSRHSTLAPPPGGPKLLRPNEGLIWGNMAITDEHVESMVASLCAQGLLHGYLAHTQGRFAVNGTKQKGSAVAAGWPPVAEVLALTDNEIPGWVRDQ

SEQ ID NO: 28582 - DNA, 2136 bp, Muscodor strobelii; identical to SEQ ID NO: 28579
  misc_feature: SGI EST ID NO. CUFF.67655.0
  misc_feature: Variant of the nucleotide sequence at SEQ ID NO 28580

SEQ ID NO: 28583 - DNA, 984 bp, Muscodor strobelii
  misc_feature: SGI cDNA ID NO. 569805
  misc_feature: Encodes the peptide sequence at SEQ ID NO 28584
atgaagatctcagccttgctcttaggcggtgcgtctaccgcgctcgccgtgagccgcacatcaccaccatcgggctgccttcacgtagccaagagcggcgggtcttacacaacgctgcaagcggccatcaattcgctttcgacatcctcgacagctgaccagtgtgtcttcgtcaaccagggaacgtatacagagcaggtatacattgccagccgctctgcaaagctcactatctatgggtatacgacggacagtacgagttacaacagtaatggcgcaaccatcacctacaactcgcctgcgtcgacggctggcagcaatgatgcgagcggtacactcagagtttgggcgaataatgttaagatttataatttgaatgttgtgaattcttacggcaaaggctcccaagcaattgcactgagtgctcaggcttcgagcggttactacggttgccaattctacggcttccaggacacattactcgcaaacaaaggcacccagtggtacgaacggtgtcagattaccggcgctacggatttcatctttgggcaaacagcccaagcctggttcgaagactgcgatataagagtgcgcaatgggggttattacatcacagccaacggccgtgatagttccagcaatccatcttactacctgttcaacaactgtgatgtggcagcggcatctggagagtctgtagcatccggttcgtattaccttggacgaccatggaggacttactcgcgtgtcgtgttccagtccaccacgctatctgccgtgataaatggtgcgggttggagcgagtggaacggcgacactgacgttgccaacatctactacggcgaatatgcaaattccgggtccggtgcaagcggaacccgagtcagctggtcaaagaagttgtcgtcggctgttactcaagctactgttctcggaagctcgtacagcagcgcggcttggtacgatgcttcttacccgtcttga

SEQ ID NO: 28584 - protein, 327 aa, Muscodor strobelii
  misc_feature: SGI Peptide ID NO. 569805
  misc_feature (29)..(324): Pfam Id: PF01095 Pfam Desc: Pectinesterase
  misc_feature (148)..(298): Pfam Id: PF01095 Pfam Desc: Pectinesterase
  misc_feature (1)..(325): NCBI GI: 261358199 Blast Desc: pectinesterase [Verticillium albo-atrum VaMs.102]
  misc_feature (1)..(325): NCBI GI: 256723593 Blast Desc: carbohydrate esterase family 8 [Nectria haematococca mpVI 77-13-4]
  misc_feature (1)..(325): NCBI GI: 39974471 Blast Desc: MGG_00618 [Magnaporthe grisea 70-15] gi|145018473|gb|EDK02752.1| MGG_00618 [Magnaporthe grisea 70-15]
  misc_feature (1)..(325): NCBI GI: 46115128 Blast Desc: FG03406.1 [Gibberella zeae PH-1]
  misc_feature (1)..(327): NCBI GI: 242805779 Blast Desc: pectin methylesterase, [Talaromyces stipitatus ATCC 10500] gi|218715228|gb|EED14650.1| pectin methylesterase, [Talaromyces stipitatus ATCC 10500]
  misc_feature (19)..(327): NCBI GI: 5802953 Blast Desc: AF178989_1 pectin methylesterase [Vitis riparia]
  misc_feature (19)..(327): NCBI GI: 169618900 Blast Desc: SNOG_12642 [Phaeosphaeria nodorum SN15] gi|111058820|gb|EAT79940.1| SNOG_12642 [Phaeosphaeria nodorum SN15]
  misc_feature (18)..(325): NCBI GI: 164428261 Blast Desc: pectinesterase precursor [Neurospora crassa OR74A] gi|157072077|gb|EAA28716.2| pectinesterase precursor [Neurospora crassa OR74A]
  misc_feature (16)..(325): NCBI GI: 171682268 Blast Desc: protein product [Podospora anserina] gi|170941093|emb|CAP66743.1| protein product [Podospora anserina]
  misc_feature (3)..(325): NCBI GI: 238489565 Blast Desc: pectinesterase precursor, [Aspergillus flavus NRRL3357] gi|220698408|gb|EED54748.1| pectinesterase precursor, [Aspergillus flavus NRRL3357]
  misc_feature (18)..(312): SWISSPROT Homolog: EC 3.1.1.11 Pectinesterase
MKISALLLGGASTALAVSRTSPPSGCLHVAKSGGSYTTLQAAINSLSTSSTADQCVFVNQGTYTEQVYIASRSAKLTIYGYTTDSTSYNSNGATITYNSPASTAGSNDASGTLRVWANNVKIYNLNVVNSYGKGSQAIALSAQASSGYYGCQFYGFQDTLLANKGTQWYERCQITGATDFIFGQTAQAWFEDCDIRVRNGGYYITANGRDSSSNPSYYLFNNCDVAAASGESVASGSYYLGRPWRTYSRVVFQSTTLSAVINGAGWSEWNGDTDVANIYYGEYANSGSGASGTRVSWSKKLSSAVTQATVLGSSYSSAAWYDASYPS

SEQ ID NO: 28585 - DNA, 1119 bp, Muscodor strobelii
  misc_feature: SGI cDNA ID NO. 569806
  misc_feature: Encodes the peptide sequence at SEQ ID NO 28586
atggctcagtggaaaccaaagacaacctacacgtacccgcaatccacgtacggtggaatctactgcgataatggcaaaatcaagacgccattcgatggcgagtcatggtgcgtcgatggtgaaggcacggtcgaagccgtcaacaaagctggcagtgtagtctcgttctgccagacagtgctgccaggctacgaagacatgatcataccaactgatgtgtatgatactgctacacttgctgttccgggcacctcgtactgggattcgacagcctcccacttttatgtaagtaatattaatgcacctggtgttggctccgctgaaggttgcgtctggggagaatcctcgacgccaattggcaactgggctccctacgttgctggtgcaaacgtggacggcaacggcaacacattcgtcaagctgggtatcaacccagtgtggcaagactgcgaactcgtcggcacagctccgacattcggtcttaagattgaatgtgatggaaactgcaatggactaccctgccaaatcgaaggcactggagtagttagtgacgagaaggctactggcgctggcggatccgacttctgcgtcgtcaccgttcccaagggtggtaaagcgagcattgttgtttacaatttggatggcagtagctctgatagcaccagcagctcaactagctcagccagtacgacgtcgagctctgagccaactacatcaacatcaacgtctagcccgccttccacgacttcaacttccacttccacaacgacctcgtcgtcatccacgtcatccagctcgtcttcatcaacaaaatcagtggagtcctactccgctgtagcatttacgtcaagtagtagctccacctcgatggctccttcgacttcgacttcgagtagtccttcgtctgggtatctcgctggtgtatatcatcaaaatggaaccacgagtgcagactactcttggggttcggcgccaacaaccacccctagtgccgctggtaccaatggtgacgccaccccaactggctcgagcaacacagagaacgctggcccgcgccaagatagcgctgccgttgctggcctcatagtcgccttcgtggctgctgtctaccttttgtaa

SEQ ID NO: 28586 - protein, 372 aa, Muscodor strobelii
  misc_feature: SGI Peptide ID NO. 569806
  misc_feature (18)..(73): Pfam Id: PF03856 Pfam Desc: Beta-glucosidase (SUN family)
  misc_feature (1)..(372): NCBI GI: 85112931 Blast Desc: NCU09733 [Neurospora crassa OR74A] gi|28926217|gb|EAA35199.1| conserved [Neurospora crassa OR74A]
  misc_feature (1)..(267): NCBI GI: 116195854 Blast Desc: CHGG_04525 [Chaetomium globosum CBS 148.51] gi|88180438|gb|EAQ87906.1| CHGG_04525 [Chaetomium globosum CBS 148.51]
  misc_feature (1)..(372): NCBI GI: 46121413 Blast Desc: FG05085.1 [Gibberella zeae PH-1]
  misc_feature (1)..(217): NCBI GI: 171690854 Blast Desc: protein product [Podospora anserina] gi|170945375|emb|CAP71487.1| protein product [Podospora anserina]
  misc_feature (1)..(213): NCBI GI: 256727476 Blast Desc: NECHADRAFT_76364 [Nectria haematococca mpVI 77-13-4]
  misc_feature (1)..(216): NCBI GI: 154290215 Blast Desc: BC1G_15784 [Botryotinia fuckeliana B05.10] gi|150847840|gb|EDN23033.1| BC1G_15784 [Botryotinia fuckeliana B05.10]
  misc_feature (3)..(254): NCBI GI: 121701199 Blast Desc: SUN domain protein (Adg3), [Aspergillus clavatus NRRL 1] gi|119397007|gb|EAW07438.1| SUN domain protein (Adg3), [Aspergillus clavatus NRRL 1]
  misc_feature (1)..(265): NCBI GI: 119186653 Blast Desc: CIMG_03374 [Coccidioides immitis RS]
  misc_feature (1)..(256): NCBI GI: 240108489 Blast Desc: Beta-glucosidase, SUN family protein [Coccidioides posadasii C735 delta SOWgp]
  misc_feature (3)..(211): NCBI GI: 242778603 Blast Desc: SUN domain protein (Adg3), [Talaromyces stipitatus ATCC 10500] gi|218722892|gb|EED22310.1| SUN domain protein (Adg3), [Talaromyces stipitatus ATCC 10500]
MAQWKPKTTYTYPQSTYGGIYCDNGKIKTPFDGESWCVDGEGTVEAVNKAGSVVSFCQTVLPGYEDMIIPTDVYDTATLAVPGTSYWDSTASHFYVSNINAPGVGSAEGCVWGESSTPIGNWAPYVAGANVDGNGNTFVKLGINPVWQDCELVGTAPTFGLKIECDGNCNGLPCQIEGTGVVSDEKATGAGGSDFCVVTVPKGGKASIVVYNLDGSSSDSTSSSTSSASTTSSSEPTTSTSTSSPPSTTSTSTSTTTSSSSTSSSSSSSTKSVESYSAVAFTSSSSSTSMAPSTSTSSSPSSGYLAGVYHQNGTTSADYSWGSAPTTTPSAAGTNGDATPTGSSNTENAGPRQDSAAVAGLIVAFVAAVYLL

SEQ ID NO: 28587 - DNA, 1659 bp, Muscodor strobelii
  misc_feature: SGI cDNA ID NO. 569807
  misc_feature: Encodes the peptide sequence at SEQ ID NO 28588
atggccggcggtgtcgttattcagggtacggcggacgtctcgcgcgtcgaggcgcccgtcactttcaaggcctatctgatttgtgccttcgccgccttcggtggtatcttcttcggttatgacactggttggatgtcgggtgttttggctgagccctacttcatcaccctctatactggatacgaatacaactatgacaccaaaatgtcgcccaacttcggtccatcccctgacgagcagggaaatttcgtcatcgacgcccctacctcgtctctattcacttcaatcctttcgctcggtactttcctcggttctctggtcggctctgatattgcggattctattggtcgtcgacctactatcattggtggctgccttgtcttcatcattggttgtattctcgagattgccgctaccaaccaggaggtgctcttcgtcttcggtcgtttgattgcaggtctcggtgtcggtttcatctctgctgtcgtcattctgtacatgtccgagatcgcccccaggaaaattcgtggtgctttggtctccggataccagttctgtatcaccgttggtattctgttggccaacgttgttgtgtatacttcccagggacggtcagacacaggttcttatcgcattcccatcggtgttcagtttctctgggctctcgttcttggcactggtctgttcttcctgcctgagtctccccgttacttcgtcaagaagggcaagctcgaggaggctgccaaggctcttgctttctgccgtgggcagccccttgagtccgaatacatcaaggatgagcttgccgaggttgttgccaacaatgagttcgagcttgcgcacatccctcagcagagctatatcggatcttggttggcctgtttcaagggctcgctttccaacggtgccagccctctgcgccgcacgattctcggcactggtctccaggctgcccaacagctgacgggtatcaacttcatcttctacttcggacctcaatttttgacctcgctccacacaatcgacaacgtcttcttgatccagcttatcaccaccctcgtcaacgtgctttccacccctatctctttctacaccattgagaaatttggtcgtcgtaagcttttggtcggcggtggcgctggtatggtcttctgccagttcctcattgccatcctcggtgttactgctgcacgacccggcgccggcaacgacaacgctgtcaaggctcagatcgccttcattgctatcaacattgccttcttcgctagtacctggggtccttcagcttgggtcgtggttggtgagatcttccctctgccaatccgtgctcgtggtgttggtctctcaactgcctccaactggctgtggaacaccatcattgccgtcattactccctatcttgtctctcctaccaaggccgacctccagtccaaggtcttcttcatttggggttcgaccgccgtattcagtaccctatttgcctacttcctcgtccccgaactcaagggtctgtctctcgagcaagccgatatgtgcatgacctccgtctctcctcgcaagtctgccaactggaagcccgaccacaccttcgctgctgagatgcaccacgttgctggtgacgagaagacccccgagcaggttgtgaaggaggaggtctaa

SEQ ID NO: 28588 - protein, 552 aa, Muscodor strobelii
  misc_feature: SGI Peptide ID NO. 569807
  misc_feature (27)..(461): Pfam Id: PF07690 Pfam Desc: Major Facilitator Superfamily
  misc_feature (27)..(513): Pfam Id: PF00083 Pfam Desc: Sugar (and other) transporter
  misc_feature (1)..(542): NCBI GI: 156052905 Blast Desc: SS1G_06620 [Sclerotinia sclerotiorum 1980] gi|154704398|gb|EDO04137.1| SS1G_06620 [Sclerotinia sclerotiorum 1980]
  misc_feature (1)..(541): NCBI GI: 154315196 Blast Desc: BC1G_04637 [Botryotinia fuckeliana B05.10] gi|150847600|gb|EDN22793.1| BC1G_04637 [Botryotinia fuckeliana B05.10]
  misc_feature (1)..(546): NCBI GI: 171683323 Blast Desc: protein product [Podospora anserina] gi|170941621|emb|CAP67275.1| protein product [Podospora anserina]
  misc_feature (1)..(542): NCBI GI: 156049437 Blast Desc: SS1G_08425 [Sclerotinia sclerotiorum 1980] gi|154692824|gb|EDN92562.1| SS1G_08425 [Sclerotinia sclerotiorum 1980]
  misc_feature (7)..(550): NCBI GI: 154317527 Blast Desc: BC1G_03115 [Botryotinia fuckeliana B05.10] gi|150844289|gb|EDN19482.1| BC1G_03115 [Botryotinia fuckeliana B05.10]
  misc_feature (3)..(535): NCBI GI: 169617962 Blast Desc: SNOG_12165 [Phaeosphaeria nodorum SN15] gi|111059457|gb|EAT80577.1| SNOG_12165 [Phaeosphaeria nodorum SN15]
  misc_feature (7)..(552): NCBI GI: 240109403 Blast Desc: Sugar transporter family protein [Coccidioides posadasii C735 delta SOWgp]
  misc_feature (7)..(552): NCBI GI: 119182803 Blast Desc: CIMG_06408 [Coccidioides immitis RS]
  misc_feature (7)..(540): NCBI GI: 258571353 Blast Desc: UREG_03997 [Uncinocarpus reesii 1704] gi|237904750|gb|EEP79151.1| UREG_03997 [Uncinocarpus reesii 1704]
  misc_feature (7)..(552): NCBI GI: 240280948 Blast Desc: monosaccharide transporter [Ajellomyces capsulatus H143]
MAGGVVIQGTADVSRVEAPVTFKAYLICAFAAFGGIFFGYDTGWMSGVLAEPYFITLYTGYEYNYDTKMSPNFGPSPDEQGNFVIDAPTSSLFTSILSLGTFLGSLVGSDIADSIGRRPTIIGGCLVFIIGCILEIAATNQEVLFVFGRLIAGLGVGFISAVVILYMSEIAPRKIRGALVSGYQFCITVGILLANVVVYTSQGRSDTGSYRIPIGVQFLWALVLGTGLFFLPESPRYFVKKGKLEEAAKALAFCRGQPLESEYIKDELAEVVANNEFELAHIPQQSYIGSWLACFKGSLSNGASPLRRTILGTGLQAAQQLTGINFIFYFGPQFLTSLHTIDNVFLIQLITTLVNVLSTPISFYTIEKFGRRKLLVGGGAGMVFCQFLIAILGVTAARPGAGNDNAVKAQIAFIAINIAFFASTWGPSAWVVVGEIFPLPIRARGVGLSTASNWLWNTIIAVITPYLVSPTKADLQSKVFFIWGSTAVFSTLFAYFLVPELKGLSLEQADMCMTSVSPRKSANWKPDHTFAAEMHHVAGDEKTPEQVVKEEV

SEQ ID NO: 28589 - DNA, 2117 bp, Muscodor strobelii
  misc_feature: SGI EST ID NO. CUFF.67350.0
  misc_feature: Variant of the nucleotide sequence at SEQ ID NO 28587
taagactctctcagacaacgtatatataacgggatcctgcctgtcctctcctcttggcctgtcttctcttctatgttggtcacctcgagttctgtgagtgagcgatctggtcagtagaagttcgtgacttctgccatacacctcgacaaggaacatcataattggagcaaaaatggccggcggtgtcgttattcagggtacggcggacgtctcgcgcgtcgaggcgcccgtcactttcaaggcctatctgatttgtgccttcgccgccttcggtggtatcttcttcggttatgacactggttggatgtcgggtgttttggctgagccctacttcatcaccctctatactggatacgaatacaactatgacaccaaaatgtcgcccaacttcggtccatcccctgacgagcagggaaatttcgtcatcgacgcccctacctcgtctctattcacttcaatcctttcgctcggtactttcctcggttctctggtcggctctgatattgcggattctattggtcgtcgacctactatcattggtggctgccttgtcttcatcattggttgtattctcgagattgccgctaccaaccaggaggtgctcttcgtcttcggtcgtttgattgcaggtctcggtgtcggtttcatctctgctgtcgtcattctgtacatgtccgagatcgcccccaggaaaattcgtggtgctttggtctccggataccagttctgtatcaccgttggtattctgttggccaacgttgttgtgtatacttcccagggacggtcagacacaggttcttatcgcattcccatcggtgttcagtttctctgggctctcgttcttggcactggtctgttcttcctgcctgagtctccccgttacttcgtcaagaagggcaagctcgaggaggctgccaaggctcttgctttctgccgtgggcagccccttgagtccgaatacatcaaggatgagcttgccgaggttgttgccaacaatgagttcgagcttgcgcacatccctcagcagagctatatcggatcttggttggcctgtttcaagggctcgctttccaacggtgccagccctctgcgccgcacgattctcggcactggtctccaggctgcccaacagctgacgggtatcaacttcatcttctacttcggacctcaatttttgacctcgctccacacaatcgacaacgtcttcttgatccagcttatcaccaccctcgtcaacgtgctttccacccctatctctttctacaccattgagaaatttggtcgtcgtaagcttttggtcggcggtggcgctggtatggtcttctgccagttcctcattgccatcctcggtgttactgctgcacgacccggcgccggcaacgacaacgctgtcaaggctcagatcgccttcattgctatcaacattgccttcttcgctagtacctggggtccttcagcttgggtcgtggttggtgagatcttccctctgccaatccgtgctcgtggtgttggtctctcaactgcctccaactggctgtggaacaccatcattgccgtcattactccctatcttgtctctcctaccaaggccgacctccagtccaaggtcttcttcatttggggttcgaccgccgtattcagtaccctatttgcctacttcctcgtccccgaactcaagggtctgtctctcgagcaagccgatatgtgcatgacctccgtctctcctcgcaagtctgccaactggaagcccgaccacaccttcgctgctgagatgcaccacgttgctggtgacgagaagacccccgagcaggttgtgaaggaggaggtctaagccattgtggtttcagactcatttcagcccttactcatatatatatcaagatccttaattgtgtttagaccttgtttattcactgtgtgtctgatgcatattgttatttaaatatataagatatcccgggtgcttctatagaaggccactatatagtaataaactattgaatagtttgactcgaaaattacttttcacctgaacaatgtttggaagatcgatctaatccaatgtcatgtacaccttacaaccatatctcgtcactcggcgttctggtatgatctgc

SEQ ID NO: 28590 - DNA, 1380 bp, Muscodor strobelii
  misc_feature: SGI cDNA ID NO. 569808
  misc_feature: Encodes the peptide sequence at SEQ ID NO 28591
atgtcggcagaccgccacactagcaaatcaggagagacctccgagtctcctaacaacggaatcactctcaacgcggaggagatcataggcgtcttgcctgcatatcccaacgaccagggaactgtcactatctatgatactatttcactaaaggaaagccaagagcatggcaaacccacattcaaattatgccgacagaaacacgatggcctgtatccccaatctctcaccgacgatttcttgaccagcgacgctttgccagaatacttgcagcctagtgggcaaagggaggtgagcgttgttgtttctacggcgagtggtacggagatggggttaaagttttatgaggatgtgcttgagccgcttttggaaatgtttggtcttactccggcagcgtcgggtggtgaagtaggaaaggcgaaagataatgcaacgtatcaacttgttatcaccaaggatgcggagagcgtgaaggagtttgctagaggagtcgctgagaaagaagacggcgtggagcacactgttgtgcttctaagtggtgatggcggtgttattgatatgttgaatggccgggcgccgacggataggctcattggtgaacaagaggcttcgagagttggcagtaaccaaccgctcataattatcttgccttttggcacaggtaatgcgctcttcaactcgatacataggacagcgcccgaagcttctgttctcgtgcaggggttacggacactgcttcgtgggaaggcgactccgttaccgtcgtttcaggttacctttccagagggctcgtctatcattacctattctgagggtggttcgccatcgactcagagtggaacttcaaagtccgaggagacaatactgaatctgcagaaacagacgaaagatgtatcaagtttgtacggtgtcgtggttgcgagttatggattccacagccaacttgtatgggagagcgatacgccggaatatcgaaagcatggcgcggctcggttccagatggtggcgcaagaactgctgaaagaaagtcacacctatcacgcagacgtcgagattgtcctgtcttccccagaaggttcggcgttgaagctggaccgggaccgccatgcgtatatactcacgactcttgtgtcgaatctcgagaagacgttttgtatatcaccagctagtcaaccgcttgatggccagctacgtcttgtgcactttggtccggttggtggtgagaagactatgcagatcatggtgaaggcttatgatggtgggaaacatgtcgatgaagatgctgttggatgtatgttgacccctaagtcttggttcctcgataccgaaatcaagaacacagagctgagtatagtccaaagatgtgagttggtaagctaa

SEQ ID NO: 28591 - protein, 459 aa, Muscodor strobelii
  misc_feature: SGI Peptide ID NO. 569808
  misc_feature (71)..(430): NCBI GI: 171683321 Blast Desc: protein product [Podospora anserina] gi|170941620|emb|CAP67274.1| protein product [Podospora anserina]
  misc_feature (73)..(435): NCBI GI: 145613674 Blast Desc: MGG_01447 [Magnaporthe grisea 70-15] gi|145020718|gb|EDK04847.1| MGG_01447 [Magnaporthe grisea 70-15]
  misc_feature (61)..(426): NCBI GI: 85107440 Blast Desc: NCU06337 [Neurospora crassa OR74A] gi|28923976|gb|EAA33135.1| [Neurospora crassa OR74A]
  misc_feature (85)..(428): NCBI GI: 156056905 Blast Desc: SS1G_04183 [Sclerotinia sclerotiorum 1980] gi|154701969|gb|EDO01708.1| SS1G_04183 [Sclerotinia sclerotiorum 1980]
  misc_feature (73)..(428): NCBI GI: 154323724 Blast Desc: BC1G_00261 [Botryotinia fuckeliana B05.10] gi|150842490|gb|EDN17683.1| BC1G_00261 [Botryotinia fuckeliana B05.10]
  misc_feature (86)..(430): NCBI GI: 258577731 Blast Desc: conserved [Uncinocarpus reesii 1704] gi|237903313|gb|EEP77714.1| conserved [Uncinocarpus reesii 1704]
  misc_feature (73)..(430): NCBI GI: 238840318 Blast Desc: conserved [Microsporum canis CBS 113480]
  misc_feature (73)..(429): NCBI GI: 159128086 Blast Desc: conserved [Aspergillus fumigatus A1163]
  misc_feature (90)..(429): NCBI GI: 240110124 Blast Desc: CPC735_061560 [Coccidioides posadasii C735 delta SOWgp]
  misc_feature (90)..(429): NCBI GI: 119179492 Blast Desc: CIMG_08491 [Coccidioides immitis RS]
MSADRHTSKSGETSESPNNGITLNAEEIIGVLPAYPNDQGTVTIYDTISLKESQEHGKPTFKLCRQKHDGLYPQSLTDDFLTSDALPEYLQPSGQREVSVVVSTASGTEMGLKFYEDVLEPLLEMFGLTPAASGGEVGKAKDNATYQLVITKDAESVKEFARGVAEKEDGVEHTVVLLSGDGGVIDMLNGRAPTDRLIGEQEASRVGSNQPLIIILPFGTGNALFNSIHRTAPEASVLVQGLRTLLRGKATPLPSFQVTFPEGSSIITYSEGGSPSTQSGTSKSEETILNLQKQTKDVSSLYGVVVASYGFHSQLVWESDTPEYRKHGAARFQMVAQELLKESHTYHADVEIVLSSPEGSALKLDRDRHAYILTTLVSNLEKTFCISPASQPLDGQLRLVHFGPVGGEKTMQIMVKAYDGGKHVDEDAVGCMLTPKSWFLDTEIKNTELSIVQRCELVS

SEQ ID NO: 28592 - DNA, 2230 bp, Muscodor strobelii
  misc_feature: SGI EST ID NO. CUFF.67341.0
  misc_feature: Variant of the nucleotide sequence at SEQ ID NO 28590
ccgtttgccacgtccatctgtttgccgtgatacaagagaatttcgaacataagccgccataagaaatcgcattggtttcgattccagattggaacgtgcccgcttagcaagccccacgatgtcggcagaccgccacactagcaaatcaggagagacctccgagtctcctaacaacggaatcactctcaacgcggaggagatcataggcgtcttgcctgcatatcccaacgaccagggaactgtcactatctatgatactatttcactaaaggaaagccaagagcatggcaaacccacattcaaattatgccgacagaaacacgatggcctgtatccccaatctctcaccgacgatttcttgaccagcgacgctttgccagaatacttgcagcctagtgggcaaagggaggtgagcgttgttgtttctacggcgagtggtacggagatggggttaaagttttatgaggatgtgcttgagccgcttttggaaatgtttggtcttactccggcagcgtcgggtggtgaagtaggaaaggcgaaagataatgcaacgtatcaacttgttatcaccaaggatgcggagagcgtgaaggagtttgctagaggagtcgctgagaaagaagacggcgtggagcacactgttgtgcttctaagtggtgatggcggtgttattgatatgttgaatggccgggcgccgacggataggctcattggtgaacaagaggcttcgagagttggcagtaaccaaccgctcataattatcttgccttttggcacaggtaatgcgctcttcaactcgatacataggacagcgcccgaagcttctgttctcgtgcaggggttacggacactgcttcgtgggaaggcgactccgttaccgtcgtttcaggttacctttccagagggctcgtctatcattacctattctgagggtggttcgccatcgactcagagtggaacttcaaagtccgaggagacaatactgaatctgcagaaacagacgaaagatgtatcaagtttgtacggtgtcgtggttgcgagttatggattccacagccaacttgtatgggagagcgatacgccggaatatcgaaagcatggcgcggctcggttccagatggtggcgcaagaactgctgaaagaaagtcacacctatcacgcagacgtcgagattgtcctgtcttccccagaaggttcggcgttgaagctggaccgggaccgccatgcgtatatactcacgactcttgtgtcgaatctcgagaagacgttttgtatatcaccagctagtcaaccgcttgatggccagctacgtcttgtgcactttggtccggttggtggtgagaagactatgcagatcatggtgaaggcttatgatggtgggaaacatgtcgatgaagatgctgttggatgtatgttgacccctaagtcttggttcctcgataccgaaatcaagaacacagagctgagtatagtccaaagatgtgagttggtaagctaacatggtgacttttacttatagatgaagcgatcgaggaaattcgaattactacccatgagcaagagtctagatggaggaaagtctgcatcgatggtacaatcgttgagattccttgtggtgggactatggtagtcagaagagatgcaaaatcacgtctaagagtacttgtcgaccgcacagtttctgtgtaagatgaggggagttgcaataccaagcagcgacggggcgctggccttcctgcttttgtttcctacgagatctattcatgccattttatgatagatcgtagccaaatcggagacgacatgtcaaaagtctaaagcaactgggcttaagcataacgagagtcggtaattatagatcggatagatttattttactctttgacagtcttccagcctccattcagaaatcaacgagccctccatcgtgggctctgacctttcacgtagttaatcacatagcattcaaggagtagcaagaacttcttgtcggctatcaaactgtgaactacgctccgtcgtctcgggttatcaccgttcgactccgtgtgttcgtagccatttccccctttcgaactgcgccttttgatgtccacccgctcttactccgtgatggtttgacacggcattgcgatcgtttctgcgtctggattcttgatcatgtcacaagaccaacgcacgtaaatagagttataagcccttcttttgaaagtagaaaacatctatcatg

SEQ ID NO: 28593 - DNA, 1944 bp, Muscodor strobelii
  misc_feature: SGI cDNA ID NO. 569809
  misc_feature: Encodes the peptide sequence at SEQ ID NO 28594
atggcgcccaccgcgccccttgagtcccagacgttggaacgagatggtcaagaatacgccgagatccaagaaggactcggtcggatcctcgtccccttctctcaagccgattcgtccgagaaaacagctcaaaatatacaggagcagcaacaggtcttctacaaccccatccagcagttcaaccgagacctgaccgtgctcgccattaaagcatacggaaagtcgtttcgaaacagacaacaacagtcacataatgccaaagctgttgccaaacgcaagcgagagaaaatggacgacgagggtcgcgattccaagaagcaggagcctgctgatggacccctacctccgaaagagaacagcattgccatggatgtcgacaccgaggcggcacagctagcgaaggaagaccaagaagagaaatctaccgaggctgctcagctaccggcggctgaaggagaggagagcaaaccagtcgccccagcagcaagcaatacttcttcgggccccaagttcaccattcttgacgcgctgtccgcgactgggcttcgcgctttgcgctatgcccaagaactgcctttcgttacatctgtcactgctaatgacctgacgccatccgctgtcgaagccatccgtcgtaatgctgagcacaacggtgttcaggataaaatcaatgctacccagggcgatgctcgcgcccacatgtactctctactggccgaagaggtcactcgtgatcacagcagggagaaattcggcaagaagaataaaaccagacccaaaagcgccagatataatgtcattgacttggatccatatggaactgcagctccattccttgacgcggcggtcaatgctgttcgcgatgatggtggtcttctatgcgtcacatgtactgactcaggtgtctgggcctcaaacggatacccagagaaggcattttcgctgtatgggggtatccctatcaaaggattcttttctcacgaggttggactccggttgatattacagaccatcgcctcctctgcagcgagatatggcctcgccattgagccgctgttgagtctgtcgatcgactactatgtacgagtttttgtcaagatcaccaagtccccggcgcaggtgaaattcctcgcgggcaagacaatgatggtctacaattgtgaccagggctgcggagcttgggagactcagctattggcccgcaacaagaaagtgacaaacaaatcgggcaaggcatcatactacaaacacggctttgcgcaagctccatcctgtgaaccgacttgcaagcactgtgatgcgaagatgcatttggcagggcctatgtatgccggaccgctacattctccagcatttattagagagattctcgctgatttgccgaatgcgtcaagcgaagtctacggaacaaaaccgaggattgaaggcatgcttcaaactgcattggaagagaccatcgaaccccaaaaggacgatgaagtggatcttcagcaaaagtctaaggaggatgattttgctgcggtagagccgtatccattttacttccatctcggcgggcttgcgggcgctttgcattgcgtttgtccggatgaagatagcttcagaggtgcgttgcgcaagcttggctatcacgttactcgaagccattgcaaagctggcagcattaagaccaacgcgccatggtcggttatatggcacgtcatgagggaatggggtcggcaaaagcaccctatccacaccgctaagattgcagaaggcagtccgacttataaacttcttaggttaggtgattattctgacaaaatgggagacgacgaggtcgacaagctggaggtagtgttcgatcaggaacttggtcgtgacaatggcaagaagggtctgattagatatcagacgaatccaacagacaattgggggccgcaaactcgagcaaaaggtcactag

SEQ ID NO: 28594 - protein, 647 aa, Muscodor strobelii
  misc_feature: SGI Peptide ID NO. 569809
  misc_feature (25)..(569): Pfam Id: PF02005 Pfam Desc: N2,N2-dimethylguanosine tRNA methyltransferase
  misc_feature (263)..(484): Pfam Id: PF02005 Pfam Desc: N2,N2-dimethylguanosine tRNA methyltransferase
  misc_feature (169)..(235): Pfam Id: PF02005 Pfam Desc: N2,N2-dimethylguanosine tRNA methyltransferase
  misc_feature (512)..(569): Pfam Id: PF02005 Pfam Desc: N2,N2-dimethylguanosine tRNA methyltransferase
  misc_feature (25)..(100): Pfam Id: PF02005 Pfam Desc: N2,N2-dimethylguanosine tRNA methyltransferase
  misc_feature (6)..(646): NCBI GI: 85107436 Blast Desc: NCU06336 [Neurospora crassa OR74A] gi|28923975|gb|EAA33134.1| [Neurospora crassa OR74A]
  misc_feature (6)..(646): NCBI GI: 171683319 Blast Desc: protein product [Podospora anserina] gi|170941619|emb|CAP67273.1| protein product [Podospora anserina]
  misc_feature (4)..(647): NCBI GI: 154312495 Blast Desc: BC1G_05850 [Botryotinia fuckeliana B05.10] gi|150849951|gb|EDN25144.1| BC1G_05850 [Botryotinia fuckeliana B05.10]
  misc_feature (6)..(620): NCBI GI: 116194596 Blast Desc: CHGG_03896 [Chaetomium globosum CBS 148.51] gi|88179809|gb|EAQ87277.1| CHGG_03896 [Chaetomium globosum CBS 148.51]
  misc_feature (4)..(577): NCBI GI: 156035523 Blast Desc: SS1G_12965 [Sclerotinia sclerotiorum 1980] gi|154698370|gb|EDN98108.1| SS1G_12965 [Sclerotinia sclerotiorum 1980]
  misc_feature (7)..(644): NCBI GI: 256726923 Blast Desc: NECHADRAFT_33053 [Nectria haematococca mpVI 77-13-4]
  misc_feature (7)..(593): NCBI GI: 46136379 Blast Desc: FG09705.1 [Gibberella zeae PH-1]
  misc_feature (9)..(621): NCBI GI: 169778596 Blast Desc: [Aspergillus oryzae RIB40] gi|238499009|ref|XP_002380739.1| N2,N2-dimethylguanosine tRNA methyltransferase [Aspergillus flavus NRRL3357] protein product
  misc_feature (7)..(646): NCBI GI: 145228301 Blast Desc: An01g00070 [Aspergillus niger] gi|134054545|emb|CAK36858.1| protein product [Aspergillus niger]
  misc_feature (4)..(605): NCBI GI: 119179456 Blast Desc: CIMG_08475 [Coccidioides immitis RS]
  misc_feature (27)..(643): SWISSPROT Homolog: EC 2.1.1.32 tRNA (guanine-N(2)-)-methyltransferase
MAPTAPLESQTLERDGQEYAEIQEGLGRILVPFSQADSSEKTAQNIQEQQQVFYNPIQQFNRDLTVLAIKAYGKSFRNRQQQSHNAKAVAKRKREKMDDEGRDSKKQEPADGPLPPKENSIAMDVDTEAAQLAKEDQEEKSTEAAQLPAAEGEESKPVAPAASNTSSGPKFTILDALSATGLRALRYAQELPFVTSVTANDLTPSAVEAIRRNAEHNGVQDKINATQGDARAHMYSLLAEEVTRDHSREKFGKKNKTRPKSARYNVIDLDPYGTAAPFLDAAVNAVRDDGGLLCVTCTDSGVWASNGYPEKAFSLYGGIPIKGFFSHEVGLRLILQTIASSAARYGLAIEPLLSLSIDYYVRVFVKITKSPAQVKFLAGKTMMVYNCDQGCGAWETQLLARNKKVTNKSGKASYYKHGFAQAPSCEPTCKHCDAKMHLAGPMYAGPLHSPAFIREILADLPNASSEVYGTKPRIEGMLQTALEETIEPQKDDEVDLQQKSKEDDFAAVEPYPFYFHLGGLAGALHCVCPDEDSFRGALRKLGYHVTRSHCKAGSIKTNAPWSVIWHVMREWGRQKHPIHTAKIAEGSPTYKLLRLGDYSDKMGDDEVDKLEVVFDQELGRDNGKKGLIRYQTNPTDNWGPQTRAKGH

SEQ ID NO: 28595 - DNA, 2446 bp, Muscodor strobelii
  misc_feature: SGI EST ID NO. CUFF.67343.0
  misc_feature: Variant of the nucleotide sequence at SEQ ID NO 28593
cggcatgccacccaaagtacctatggatttcagctggagctagtctgtgtcgggtaggtggggtttgttgctagctatgagcttaattgcaaagcttgcaattgagctaccggcggagaaagaaaacagagcagctaaattcacagcccaccttccgtcgattcctctctgtcgagcccccttcccgccaacaacttcacatactttactcgggtgcctgtcatccgtcgcgcatgcagcgtactactttgtttgtaaaatatgtttcttcgcccaggcacttgagccgcattgttatcagaacaccgttctctgcggttgtgcgcaatctagcgacaaactcttcaaacagggcgacgatggcgcccaccgcgccccttgagtcccagacgttggaacgagatggtcaagaatacgccgagatccaagaaggactcggtcggatcctcgtccccttctctcaagccgattcgtccgagaaaacagctcaaaatatacaggagcagcaacaggtcttctacaaccccatccagcagttcaaccgagacctgaccgtgctcgccattaaagcatacggaaagtcgtttcgaaacagacaacaacagtcacataatgccaaagctgttgccaaacgcaagcgagagaaaatggacgacgagggtcgcgattccaagaagcaggagcctgctgatggacccctacctccgaaagagaacagcattgccatggatgtcgacaccgaggcggcacagctagcgaaggaagaccaagaagagaaatctaccgaggctgctcagctaccggcggctgaaggagaggagagcaaaccagtcgccccagcagcaagcaatacttcttcgggccccaagttcaccattcttgacgcgctgtccgcgactgggcttcgcgctttgcgctatgcccaagaactgcctttcgttacatctgtcactgctaatgacctgacgccatccgctgtcgaagccatccgtcgtaatgctgagcacaacggtgttcaggataaaatcaatgctacccagggcgatgctcgcgcccacatgtactctctactggccgaagaggtcactcgtgatcacagcagggagaaattcggcaagaagaataaaaccagacccaaaagcgccagatataatgtcattgacttggatccatatggaactgcagctccattccttgacgcggcggtcaatgctgttcgcgatgatggtggtcttctatgcgtcacatgtactgactcaggtgtctgggcctcaaacggatacccagagaaggcattttcgctgtatgggggtatccctatcaaaggattcttttctcacgaggttggactccggttgatattacagaccatcgcctcctctgcagcgagatatggcctcgccattgagccgctgttgagtctgtcgatcgactactatgtacgagtttttgtcaagatcaccaagtccccggcgcaggtgaaattcctcgcgggcaagacaatgatggtctacaattgtgaccagggctgcggagcttgggagactcagctattggcccgcaacaagaaagtgacaaacaaatcgggcaaggcatcatactacaaacacggctttgcgcaagctccatcctgtgaaccgacttgcaagcactgtgatgcgaagatgcatttggcagggcctatgtatgccggaccgctacattctccagcatttattagagagattctcgctgatttgccgaatgcgtcaagcgaagtctacggaacaaaaccgaggattgaaggcatgcttcaaactgcattggaagagaccatcgaaccccaaaaggacgatgaagtggatcttcagcaaaagtctaaggaggatgattttgctgcggtagagccgtatccattttacttccatctcggcgggcttgcgggcgctttgcattgcgtttgtccggatgaagatagcttcagaggtgcgttgcgcaagcttggctatcacgttactcgaagccattgcaaagctggcagcattaagaccaacgcgccatggtcggttatatggcacgtcatgagggaatggggtcggcaaaagcaccctatccacaccgctaagattgcagaaggcagtccgacttataaacttcttaggttaggtgattattctgacaaaatgggagacgacgaggtcgacaagctggaggtagtgttcgatcaggaacttggtcgtgacaatggcaagaagggtctgattagatatcagacgaatccaacagacaattgggggccgcaaactcgagcaaaaggtcactagaatagcgttcaggttttcaaggtaatgagaagataacaggcattgagatgtgtaaaataatgccagggccagctagaaaagatcgctagctctaattgataccctttgctttctactagtcgcaaatgctgcgtagatcttcg

SEQ ID NO: 28596 - DNA, 2925 bp, Muscodor strobelii
  misc_feature: SGI cDNA ID NO. 569810
  misc_feature: Encodes the peptide sequence at SEQ ID NO 28597
atggctgcaaacggcgctcagcatgccttctcgctcgacgacgtgctgcaggccatgctgaccatgcggggtggggatgcggacaggaaagcaaccgccaccaagtatttgggagagttccagaagtcgacagccgcgtggtccgatacgatcgccatcttgaagtccagcgccgatccgggcgacaagctctttgctgccaccaccctgaaaggaaagataacatttgacctccagacccaggtagctcccaacgagatcgccgccgtgcgcagccagctcctggagctcttgcagctctacgcctccggtccgaagcccatccgagtccagttatgcgtgtgcctggctatcttggccatccagatgaaggagtggaaggacgtcttacccgtcgtcgtctcatccctcggtaatcaagtcgagagccacgcctgcatactggacttcctcagggtcctccccgaggaggtcaccgaggggcgcaaaatcaccttgtctgacgaagatctcagtctgaggacgacagagctgttgggagataatgcaactcaggtggttcgcctcctcatcaactatgccgaatcgtccccctcggccgccacaaacccgcagcttttcgattgcattacatcctggttgcgagaagtgtctgtgaacgacatagtcaatactccccttctagatgtgatattcaacggcatagaagcagattcgtcaatgcaggcggctgctgaatgtctgacgacaatcgtcagagagacgagggaagtagacgattacgttgatacgatacaaaagctcctgccaagagtcttggctctccgacccaagatccagaaattcgtcgacgaggaggacactgactcttacaagtccttgactagagtcttttctgaggcaggaatttcttgggtggtcgctatcgcccgcgaaactaaacatttccgaccattggttgagacaatccttgagtgcgcggcgagagataaagatcgagatgttatcgacaacacttttgagttctggtatgagctcaaacaatacattgtcatggagaggtacattgaagggcgaatggagcttgttgatatttattctcgacttgtcgacattcttttcacacacttacaataccccgaacctgagtctggaggtgccgaacaagatctattcgatggcgatcgcgaagccgaggagaagttccgcgagttccgacaccaaatgggcgatactctgaaagacgcatgtgaggtaatgggagtgactgagtgtctcactaaagtgttgaatgccattcaagcttggatgcagaaatacgctagtctggctaatggtaacagcgtaccgcattggcagaaactggaagcccccttgtttgctatgcgtgcgatgggacgtatggtcgacaaagatgagagcattgttctgccacagctcatgccgttacttgttcagatgcctagccacgagaaattgcgcttcgcgacgatcatggttcttggcagatacacggagtggacttcggagcaccctgaattcctcagccctcagttcaatttcatcgtcgcttcatttgagagcaatgccaaggagatcctgcaggctgcttcgatggcaatgaagtatttctgcactgactgtaagcatctcttgagtgcgcaggtgcttcagttgcagcagttctacgagcaggttttggacaaagtgcccgctatcagtcaagaggaaatcaccgaaggagcggccactgtcgtctcagtgcaacccaagaacgaaacatacaagcttctcaagttgttctgcgaacctctagttcaacgactcatgaccaaggcgaacaacgccacagaccacgagagcaaactagcagtcgcggaccatctgcagttaataactttgtttgcacagatcgtcgtggtcatacctccagttgaaaaaggggaggaagaccctgcagtcaagtactggcaagaagtgttcccaatcttggccaaggtcatggtcagctttctggatttttctccaatctgcgagagggtttgtcggtgctggcggttaatggtcattgctcacaggactgcaatggccccaatcctcccagctatggcaaatgatctggccagcggctttgcccagtcaagacaaggctgcttcttatgggtgacgggagctattctacgcgagttctctgacgaacgggagcacgtggacccagcaatgaccgagagcatctatgcctttttcgaggcgcaagcaaccaacgtcctacgattcatcagtgatctcacaccgcaagaactacccgatgtgacagaggatttctatcgtctcgtggtagatgggcttgtctactatcctcagaagttcataccctcggcgcttttcgcaccaatttttgaggcagcgatttcagtgttgacgctggcacagcgcgaaccattatcagcaaccctccattacatacgcgacgttctggcttgggcagcaagaccacccacatcttatgacttcctcccggcagatttggttgagcagttacgagtaatggtaaaagcaatgttggtcgcgcagggcgagacgttagttaagcgtattctcgccggcatgatgatcacatttcccggcgattgcttcgccgacgccagtggagcgctgctcaccttgttcgagatactacctgatcgaactttagcacaggtggatgctactcttcgaatgcttccaccaggtaccatcacacccgccgaggtgagccgcctcattggcaaaattcgagatcgcctcaatgccaatgataccggtgacgttcggcagattcggtccctaatgcaggacttcacgaacacgtacaggagaaggtacattgcccctagagacggactgggcgatttagaaggctctcggtttcgattcaacggttga

SEQ ID NO: 28597 - protein, 974 aa, Muscodor strobelii
  misc_feature: SGI Peptide ID NO. 569810
  misc_feature (105)..(248): Pfam Id: PF08389 Pfam Desc: Exportin 1-like protein
  misc_feature (1)..(974): NCBI GI: 46136529 Blast Desc: FG09780.1 [Gibberella zeae PH-1]
  misc_feature (1)..(974): NCBI GI: 256727536 Blast Desc: [Nectria haematococca mpVI 77-13-4]
  misc_feature (1)..(974): NCBI GI: 85107512 Blast Desc: NCU06355 [Neurospora crassa OR74A] gi|28923994|gb|EAA33153.1| conserved [Neurospora crassa OR74A]
  misc_feature (3)..(974): NCBI GI: 156045545 Blast Desc: SS1G_09963 [Sclerotinia sclerotiorum 1980] gi|154694356|gb|EDN94094.1| SS1G_09963 [Sclerotinia sclerotiorum 1980]
  misc_feature (1)..(973): NCBI GI: 261352253 Blast Desc: karyopherin [Verticillium albo-atrum VaMs.102]
  misc_feature (1)..(974): NCBI GI: 39951613 Blast Desc: MGG_01449 [Magnaporthe grisea 70-15] gi|145020716|gb|EDK04845.1| MGG_01449 [Magnaporthe grisea 70-15]
  misc_feature (74)..(974): NCBI GI: 171683349 Blast Desc: protein product [Podospora anserina] gi|170941634|emb|CAP67288.1| protein product [Podospora anserina]
  misc_feature (1)..(974): NCBI GI: 116194592 Blast Desc: CHGG_03894 [Chaetomium globosum CBS 148.51] gi|88179807|gb|EAQ87275.1| CHGG_03894 [Chaetomium globosum CBS 148.51]
  misc_feature (1)..(974): NCBI GI: 119483032 Blast Desc: mRNA transport regulator (Mtr10), [Neosartorya fischeri NRRL 181] gi|119409699|gb|EAW19647.1| mRNA transport regulator (Mtr10), [Neosartorya fischeri NRRL 181]
  misc_feature (6)..(974): NCBI GI: 121711635 Blast Desc: mRNA transport regulator (Mtr10), [Aspergillus clavatus NRRL 1] gi|119401584|gb|EAW12007.1| mRNA transport regulator (Mtr10), [Aspergillus clavatus NRRL 1]
MAANGAQHAFSLDDVLQAMLTMRGGDADRKATATKYLGEFQKSTAAWSDTIAILKSSADPGDKLFAATTLKGKITFDLQTQVAPNEIAAVRSQLLELLQLYASGPKPIRVQLCVCLAILAIQMKEWKDVLPVVVSSLGNQVESHACILDFLRVLPEEVTEGRKITLSDEDLSLRTTELLGDNATQVVRLLINYAESSPSAATNPQLFDCITSWLREVSVNDIVNTPLLDVIFNGIEADSSMQAAAECLTTIVRETREVDDYVDTIQKLLPRVLALRPKIQKFVDEEDTDSYKSLTRVFSEAGISWVVAIARETKHFRPLVETILECAARDKDRDVIDNTFEFWYELKQYIVMERYIEGRMELVDIYSRLVDILFTHLQYPEPESGGAEQDLFDGDREAEEKFREFRHQMGDTLKDACEVMGVTECLTKVLNAIQAWMQKYASLANGNSVPHWQKLEAPLFAMRAMGRMVDKDESIVLPQLMPLLVQMPSHEKLRFATIMVLGRYTEWTSEHPEFLSPQFNFIVASFESNAKEILQAASMAMKYFCTDCKHLLSAQVLQLQQFYEQVLDKVPAISQEEITEGAATVVSVQPKNETYKLLKLFCEPLVQRLMTKANNATDHESKLAVADHLQLITLFAQIVVVIPPVEKGEEDPAVKYWQEVFPILAKVMVSFLDFSPICERVCRCWRLMVIAHRTAMAPILPAMANDLASGFAQSRQGCFLWVTGAILREFSDEREHVDPAMTESIYAFFEAQATNVLRFISDLTPQELPDVTEDFYRLVVDGLVYYPQKFIPSALFAPIFEAAISVLTLAQREPLSATLHYIRDVLAWAARPPTSYDFLPADLVEQLRVMVKAMLVAQGETLVKRILAGMMITFPGDCFADASGALLTLFEILPDRTLAQVDATLRMLPPGTITPAEVSRLIGKIRDRLNANDTGDVRQIRSLMQDFTNTYRRRYIAPRDGLGDLEGSRFRFNG

SEQ ID NO: 28598 - DNA, 3800 bp, Muscodor strobelii
  misc_feature: SGI EST ID NO. CUFF.67553.1
  misc_feature: Variant of the nucleotide sequence at SEQ ID NO 28596
ccaagttttattggcccctctcctctcttccctactcaggctgcggctgccaaattgcgatcctgaagctctcctaaaccttgttgcccccccatcattctttaatcgatttcactctaatttacctggtcgcccacgccacgccacgcctttcgattcctacatccgttagaaccccggtgacgacctctcgctttctctggttctggcgtcaagctctcgcccctctcaaccaccccacgagccttgcacggcatccacagccgctgctgccatcgtgcctgcccaccccacggctgtcagactgtcgtgaccttgagacccgatctgagactcggcgacacaacacacaaacccgcgcaccatggctgcaaacggcgctcagcatgccttctcgctcgacgacgtgctgcaggccatgctgaccatgcggggtggggatgcggacaggaaagcaaccgccaccaagtatttgggagagttccagaagtcgacagccgcgtggtccgatacgatcgccatcttgaagtccagcgccgatccgggcgacaagctctttgctgccaccaccctgaaaggaaagataacatttgacctccagacccaggtagctcccaacgagatcgccgccgtgcgcagccagctcctggagctcttgcagctctacgcctccggtccgaagcccatccgagtccagttatgcgtgtgcctggctatcttggccatccagatgaaggagtggaaggacgtcttacccgtcgtcgtctcatccctcggtaatcaagtcgagagccacgcctgcatactggacttcctcagggtcctccccgaggaggtcaccgaggggcgcaaaatcaccttgtctgacgaagatctcagtctgaggacgacagagctgttgggagataatgcaactcaggtggttcgcctcctcatcaactatgccgaatcgtccccctcggccgccacaaacccgcagcttttcgattgcattacatcctggttgcgagaagtgtctgtgaacgacatagtcaatactccccttctagatgtgatattcaacggcatagaagcagattcgtcaatgcaggcggctgctgaatgtctgacgacaatcgtcagagagacgagggaagtagacgattacgttgatacgatacaaaagctcctgccaagagtcttggctctccgacccaagatccagaaattcgtcgacgaggaggacactgactcttacaagtccttgactagagtcttttctgaggcaggaatttcttgggtggtcgctatcgcccgcgaaactaaacatttccgaccattggttgagacaatccttgagtgcgcggcgagagataaagatcgagatgttatcgacaacacttttgagttctggtatgagctcaaacaatacattgtcatggagaggtacattgaagggcgaatggagcttgttgatatttattctcgacttgtcgacattcttttcacacacttacaataccccgaacctgagtctggaggtgccgaacaagatctattcgatggcgatcgcgaagccgaggagaagttccgcgagttccgacaccaaatgggcgatactctgaaagacgcatgtgaggtaatgggagtgactgagtgtctcactaaagtgttgaatgccattcaagcttggatgcagaaatacgctagtctggctaatggtaacagcgtaccgcattggcagaaactggaagcccccttgtttgctatgcgtgcgatgggacgtatggtcgacaaagatgagagcattgttctgccacagctcatgccgttacttgttcagatgcctagccacgagaaattgcgcttcgcgacgatcatggttcttggcagatacacggagtggacttcggagcaccctgaattcctcagccctcagttcaatttcatcgtcgcttcatttgagagcaatgccaaggagatcctgcaggctgcttcgatggcaatgaagtatttctgcactgactgtaagcatctcttgagtgcgcaggtgcttcagttgcagcagttctacgagcaggttttggacaaagtgcccgctatcagtcaagaggaaatcaccgaaggagcggccactgtcgtctcagtgcaacccaagaacgaaacatacaagcttctcaagttgttctgcgaacctctagttcaacgactcatgaccaaggcgaacaacgccacagaccacgagagcaaactagcagtcgcggaccatctgcagttaataactttgtttgcacagatcgtcgtggtcatacctccagttgaaaaaggggaggaagaccctgcagtcaagtactggcaagaagtgttcccaatcttggccaaggtcatggtcagctttctggatttttctccaatctgcgagagggtttgtcggtgctggcggttaatggtcattgctcacaggactgcaatggccccaatcctcccagctatggcaaatgatctggccagcggctttgcccagtcaagacaaggctgcttcttatgggtgacgggagctattctacgcgagttctctgacgaacgggagcacgtggacccagcaatgaccgagagcatctatgcctttttcgaggcgcaagcaaccaacgtcctacgattcatcagtgatctcacaccgcaagaactacccgatgtgacagaggatttctatcgtctcgtggtagatgggcttgtctactatcctcagaagttcataccctcggcgcttttcgcaccaatttttgaggcagcgatttcagtgttgacgctggcacagcgcgaaccattatcagcaaccctccattacatacgcgacgttctggcttgggcagcaagaccacccacatcttatgacttcctcccggcagatttggttgagcagttacgagtaatggtaaaagcaatgttggtcgcgcagggcgagacgttagttaagcgtattctcgccggcatgatgatcacatttcccggcgattgcttcgccgacgccagtggagcgctgctcaccttgttcgagatactacctgatcgaactttagcacaggtggatgctactcttcgaatgcttccaccaggtaccatcacacccgccgaggtgagccgcctcattggcaaaattcgagatcgcctcaatgccaatgataccggtgacgttcggcagattcggtccctaatgcaggacttcacgaacacgtacaggagaaggtacattgcccctagagacggactgggcgatttagaaggctctcggtttcgattcaacggttgaaagctaggcgctcttatacttagagtcgttgggttcgtctaaagccaatcgttgcttgctctttgcaagtcatttcatcattcctatggggtccggtgagaagaatcgtagggtaatgtcggcatctgtgaagatatcacgatgggaaggggtgcagaagccagacgattgcctacaaatggtaggactagtgcgggatagtcgcttgttttacgatgcaaaagggacggagtcgagggaacagaagaatagcatacccatctctcatagataccttattcgatcttggtcgcgggctgcaactagtcggtgcgggttgcgaacgaattctaagcatttgcaggcgaagatttagttgtaacgatcatattcatggaaactgatttttcgctctcgatttagtgatggccacagtcttccaagggttagtaacgttgggtgtatgtgttagctgaaagatattctaactgattcacaacctagatctcgatacaaatgttagacggtgaca

SEQ ID NO: 28599 - DNA, 2985 bp, Muscodor strobelii
  misc_feature: SGI cDNA ID NO. 569811
  misc_feature: Reduced expression when VOC is produced
  misc_feature: Encodes the peptide sequence at SEQ ID NO 28600
atggctgcaaacggcgctcagcatgccttctcgctcgacgacgtgctgcaggccatgctgaccatgcggggtggggatgcggacaggaaagcaaccgccaccaagtatttgggagagttccagaagtcggtgcgtcgcgccacggccccctatatatatcgagatatacagtgctcacgcgccgaacagacagccgcgtggtccgatacgatcgccatcttgaagtccagcgccgatccgggcgacaagctctttgctgccaccaccctgaaaggaaagataacatttgacctccagacccaggtagctcccaacgagatcgccgccgtgcgcagccagctcctggagctcttgcagctctacgcctccggtccgaagcccatccgagtccagttatgcgtgtgcctggctatcttggccatccagatgaaggagtggaaggacgtcttacccgtcgtcgtctcatccctcggtaatcaagtcgagagccacgcctgcatactggacttcctcagggtcctccccgaggaggtcaccgaggggcgcaaaatcaccttgtctgacgaagatctcagtctgaggacgacagagctgttgggagataatgcaactcaggtggttcgcctcctcatcaactatgccgaatcgtccccctcggccgccacaaacccgcagcttttcgattgcattacatcctggttgcgagaagtgtctgtgaacgacatagtcaatactccccttctagatgtgatattcaacggcatagaagcagattcgtcaatgcaggcggctgctgaatgtctgacgacaatcgtcagagagacgagggaagtagacgattacgttgatacgatacaaaagctcctgccaagagtcttggctctccgacccaagatccagaaattcgtcgacgaggaggacactgactcttacaagtccttgactagagtcttttctgaggcaggaatttcttgggtggtcgctatcgcccgcgaaactaaacatttccgaccattggttgagacaatccttgagtgcgcggcgagagataaagatcgagatgttatcgacaacacttttgagttctggtatgagctcaaacaatacattgtcatggagaggtacattgaagggcgaatggagcttgttgatatttattctcgacttgtcgacattcttttcacacacttacaataccccgaacctgagtctggaggtgccgaacaagatctattcgatggcgatcgcgaagccgaggagaagttccgcgagttccgacaccaaatgggcgatactctgaaagacgcatgtgaggtaatgggagtgactgagtgtctcactaaagtgttgaatgccattcaagcttggatgcagaaatacgctagtctggctaatggtaacagcgtaccgcattggcagaaactggaagcccccttgtttgctatgcgtgcgatgggacgtatggtcgacaaagatgagagcattgttctgccacagctcatgccgttacttgttcagatgcctagccacgagaaattgcgcttcgcgacgatcatggttcttggcagatacacggagtggacttcggagcaccctgaattcctcagccctcagttcaatttcatcgtcgcttcatttgagagcaatgccaaggagatcctgcaggctgcttcgatggcaatgaagtatttctgcactgactgtaagcatctcttgagtgcgcaggtgcttcagttgcagcagttctacgagcaggttttggacaaagtgcccgctatcagtcaagaggaaatcaccgaaggagcggccactgtcgtctcagtgcaacccaagaacgaaacatacaagcttctcaagttgttctgcgaacctctagttcaacgactcatgaccaaggcgaacaacgccacagaccacgagagcaaactagcagtcgcggaccatctgcagttaataactttgtttgcacagatcgtcgtggtcatacctccagttgaaaaaggggaggaagaccctgcagtcaagtactggcaagaagtgttcccaatcttggccaaggtcatggtcagctttctggatttttctccaatctgcgagagggtttgtcggtgctggcggttaatggtcattgctcacaggactgcaatggccccaatcctcccagctatggcaaatgatctggccagcggctttgcccagtcaagacaaggctgcttcttatgggtgacgggagctattctacgcgagttctctgacgaacgggagcacgtggacccagcaatgaccgagagcatctatgcctttttcgaggcgcaagcaaccaacgtcctacgattcatcagtgatctcacaccgcaagaactacccgatgtgacagaggatttctatcgtctcgtggtagatgggcttgtctactatcctcagaagttcataccctcggcgcttttcgcaccaatttttgaggcagcgatttcagtgttgacgctggcacagcgcgaaccattatcagcaaccctccattacatacgcgacgttctggcttgggcagcaagaccacccacatcttatgacttcctcccggcagatttggttgagcagttacgagtaatggtaaaagcaatgttggtcgcgcagggcgagacgttagttaagcgtattctcgccggcatgatgatcacatttcccggcgattgcttcgccgacgccagtggagcgctgctcaccttgttcgagatactacctgatcgaactttagcacaggtggatgctactcttcgaatgcttccaccaggtaccatcacacccgccgaggtgagccgcctcattggcaaaattcgagatcgcctcaatgccaatgataccggtgacgttcggcagattcggtccctaatgcaggacttcacgaacacgtacaggagaaggtacattgcccctagagacggactgggcgatttagaaggctctcggtttcgattcaacggttga

SEQ ID NO: 28600 - protein, 994 aa, Muscodor strobelii
  misc_feature: SGI Peptide ID NO. 569811
  misc_feature (125)..(268): Pfam Id: PF08389 Pfam Desc: Exportin 1-like protein
  misc_feature (1)..(994): NCBI GI: 46136529 Blast Desc: FG09780.1 [Gibberella zeae PH-1]
  misc_feature (1)..(994): NCBI GI: 256727536 Blast Desc: [Nectria haematococca mpVI 77-13-4]
  misc_feature (1)..(994): NCBI GI: 85107512 Blast Desc: NCU06355 [Neurospora crassa OR74A] gi|28923994|gb|EAA33153.1| conserved [Neurospora crassa OR74A]
  misc_feature (3)..(994): NCBI GI: 156045545 Blast Desc: SS1G_09963 [Sclerotinia sclerotiorum 1980] gi|154694356|gb|EDN94094.1| SS1G_09963 [Sclerotinia sclerotiorum 1980]
  misc_feature (1)..(993): NCBI GI: 261352253 Blast Desc: karyopherin [Verticillium albo-atrum VaMs.102]
  misc_feature (1)..(994): NCBI GI: 39951613 Blast Desc: MGG_01449 [Magnaporthe grisea 70-15] gi|145020716|gb|EDK04845.1| MGG_01449 [Magnaporthe grisea 70-15]
  misc_feature (94)..(994): NCBI GI: 171683349 Blast Desc: protein product [Podospora anserina] gi|170941634|emb|CAP67288.1| protein product [Podospora anserina]
  misc_feature (106)..(994): NCBI GI: 116194592 Blast Desc: CHGG_03894 [Chaetomium globosum CBS 148.51] gi|88179807|gb|EAQ87275.1| CHGG_03894 [Chaetomium globosum CBS 148.51]
  misc_feature (3)..(994): NCBI GI: 154309619 Blast Desc: BC1G_07280 [Botryotinia fuckeliana B05.10] gi|150852303|gb|EDN27495.1| BC1G_07280 [Botryotinia fuckeliana B05.10]
  misc_feature (1)..(994): NCBI GI: 119483032 Blast Desc: mRNA transport regulator (Mtr10), [Neosartorya fischeri NRRL 181] gi|119409699|gb|EAW19647.1| mRNA transport regulator (Mtr10), [Neosartorya fischeri NRRL 181]
  misc_feature: Useful for introducing or modulating the production of volatile compounds
MAANGAQHAFSLDDVLQAMLTMRGGDADRKATATKYLGEFQKSVRRATAPYIYRDIQCSRAEQTAAWSDTIAILKSSADPGDKLFAATTLKGKITFDLQTQVAPNEIAAVRSQLLELLQLYASGPKPIRVQLCVCLAILAIQMKEWKDVLPVVVSSLGNQVESHACILDFLRVLPEEVTEGRKITLSDEDLSLRTTELLGDNATQVVRLLINYAESSPSAATNPQLFDCITSWLREVSVNDIVNTPLLDVIFNGIEADSSMQAAAECLTTIVRETREVDDYVDTIQKLLPRVLALRPKIQKFVDEEDTDSYKSLTRVFSEAGISWVVAIARETKHFRPLVETILECAARDKDRDVIDNTFEFWYELKQYIVMERYIEGRMELVDIYSRLVDILFTHLQYPEPESGGAEQDLFDGDREAEEKFREFRHQMGDTLKDACEVMGVTECLTKVLNAIQAWMQKYASLANGNSVPHWQKLEAPLFAMRAMGRMVDKDESIVLPQLMPLLVQMPSHEKLRFATIMVLGRYTEWTSEHPEFLSPQFNFIVASFESNAKEILQAASMAMKYFCTDCKHLLSAQVLQLQQFYEQVLDKVPAISQEEITEGAATVVSVQPKNETYKLLKLFCEPLVQRLMTKANNATDHESKLAVADHLQLITLFAQIVVVIPPVEKGEEDPAVKYWQEVFPILAKVMVSFLDFSPICERVCRCWRLMVIAHRTAMAPILPAMANDLASGFAQSRQGCFLWVTGAILREFSDEREHVDPAMTESIYAFFEAQATNVLRFISDLTPQELPDVTEDFYRLVVDGLVYYPQKFIPSALFAPIFEAAISVLTLAQREPLSATLHYIRDVLAWAARPPTSYDFLPADLVEQLRVMVKAMLVAQGETLVKRILAGMMITFPGDCFADASGALLTLFEILPDRTLAQVDATLRMLPPGTITPAEVSRLIGKIRDRLNANDTGDVRQIRSLMQDFTNTYRRRYIAPRDGLGDLEGSRFRFNG

SEQ ID NO: 28601 - DNA, 3800 bp, Muscodor strobelii; identical to SEQ ID NO: 28598
  misc_feature: SGI EST ID NO. CUFF.67553.1
  misc_feature: Variant of the nucleotide sequence at SEQ ID NO 28599

SEQ ID NO: 28602 - DNA, 285 bp, Muscodor strobelii
  misc_feature: SGI cDNA ID NO. 569812
  misc_feature: Encodes the peptide sequence at SEQ ID NO 28603
atgactggtcgcggtggcggtggacgcaaggtcttgctcccgcccatcaacttcatcttcaagctcctccagacacacgcccccgtcaagatctggttgtacgagcagctctccaccagaatcgaggggaagatcagaggtttcgacgagttcatgaatctggttatcgacgatgctgtagaagtcaagcaagtctctaagacgaatcccgaagagaagagaaggaatctcggccaaattctactcaagggcgacaatgtgtcgctgatacaagaagctctgtga

SEQ ID NO: 28603 - protein, 94 aa, Muscodor strobelii
  misc_feature: SGI Peptide ID NO. 569812
  misc_feature (21)..(92): Pfam Id: PF01423 Pfam Desc: LSM domain
  misc_feature (1)..(93): NCBI GI: 156045543 Blast Desc: SS1G_09962 [Sclerotinia sclerotiorum 1980] gi|154694355|gb|EDN94093.1| SS1G_09962 [Sclerotinia sclerotiorum 1980]
  misc_feature (11)..(93): NCBI GI: 46111729 Blast Desc: FG02746.1 [Gibberella zeae PH-1]
  misc_feature (11)..(91): NCBI GI: 261352254 Blast Desc: small nuclear ribonucleoprotein E [Verticillium albo-atrum VaMs.102]
  misc_feature (1)..(91): NCBI GI: 261204379 Blast Desc: small nuclear ribonucleoprotein E [Ajellomyces dermatitidis SLH14081] gi|239587188|gb|EEQ69831.1| small nuclear ribonucleoprotein E [Ajellomyces dermatitidis SLH14081] small E
  misc_feature (10)..(91): NCBI GI: 145613670 Blast Desc: MGG_01450 [Magnaporthe grisea 70-15] gi|145020715|gb|EDK04844.1| MGG_01450 [Magnaporthe grisea 70-15]
  misc_feature (1)..(91): NCBI GI: 212543921 Blast Desc: small nuclear ribonucleoprotein SmE, [Penicillium marneffei ATCC 18224] gi|242787996|ref|XP_002481132.1| small nuclear ribonucleoprotein SmE, [Talaromyces stipitatus ATCC small
  misc_feature (11)..(92): NCBI GI: 256725716 Blast Desc: [Nectria haematococca mpVI 77-13-4]
  misc_feature (1)..(91): NCBI GI: 115399850 Blast Desc: small nuclear ribonucleoprotein E [Aspergillus terreus NIH2624] gi|114191180|gb|EAU32880.1| small nuclear ribonucleoprotein E [Aspergillus terreus NIH2624]
  misc_feature (1)..(91): NCBI GI: 259480327 Blast Desc: TPA: small nuclear ribonucleoprotein SmE, (AFU_orthologue; AFUA_7G05980) [Aspergillus nidulans FGSC A4]
  misc_feature (1)..(91): NCBI GI: 238839776 Blast Desc: LSM domain-containing protein [Microsporum canis CBS 113480]
MTGRGGGGRKVLLPPINFIFKLLQTHAPVKIWLYEQLSTRIEGKIRGFDEFMNLVIDDAVEVKQVSKTNPEEKRRNLGQILLKGDNVSLIQEAL

SEQ ID NO: 28604 - DNA, 1628 bp, Muscodor strobelii
  misc_feature: SGI EST ID NO. CUFF.67418.0
  misc_feature: Variant of the nucleotide sequence at SEQ ID NO 28602
gtccactgtatctcactagcaggggtgcaccagctgcctgtaggcacccccaaaggcatttgtgccaagcctaagtttctcagccttgccaaatctcaacacctctgatttacggcgcccctccaatacctctcgcaacggccaacgtacttgcagcccacccatccgccgctgccccaacgaacgtggcctcctcgtcccacacatcgccgatcgcacttctatcccgactcccaagtctagtttcacgatgactggtcgcggtggcggtggacgcaaggtcttgctcccgcccatcaacttcatcttcaagctcctccagacacacgcccccgtcaagatctggttgtacgagcagctctccaccagaatcgaggggaagatcagaggtttcgacgagttcatgaatctggttatcgacgatgctgtagaagtcaagcaagtctctaagacgaatcccgaagagaagagaaggaatctcggccaaattctactcaagggcgacaatgtgtcgctgatacaagaagctctgtgatctacgttccctagcttcaccgcgcgagatccctttccgttcacttcacgaacagagctatcagatccaatcccgagagctatgctcggcaattacaccccatccgacaacaagattacacacgacggggaaaacaggcttatatgtagagatggatggccaagtaatatgattcagtcgcggccactctcagccttggactcttttattgtgccatcccccatcaaaacgccatcaattggctgatcatgaggcccaacgggcaccgactcccctgaaccaggggacagaagctgctctttaagagctagcgcatatagcaatacagctgctcggtttcccgacaatgccttctccctgtccgcgttggtagccagtgcatagcgatgtagaaagtaatcgtagaagcccttgccatgtccaagtctcctgaccgcgcccgtctcgggatcaaaatcaaacgccacacccggtaagaagatcaggtcaagtgctatatcggctgatctctgcccgtccaattcacccacgctccgctgccgctcgtgcaccgtggcgccgtcgacgctgggtatgccccatttgtctctctgcagagactcgtagtcttgcacgtctcgaagtctgaccatgtccatgagccgaacaggcccttcgcctgggggcaatccagatttatggaggtacggcacaaatacttgcttccctgatgctaaggcatgtcttacgatcggatctgtctgtatttcgccgccgggcatggacagatacacgccaacggtttttgcatcttgatatggcttgaatttggataaagcctcaaatactgtcttgcctggaacgtacggtgattaattggtctttttctgttgtcgcgtggctttcaggtcttcttactttgtaccgatatggactcttctgagagcttagataattgctgtttcatcaacgaccgaagtcggactttggcagtttgaagtgctgcagaattcattcttggctgattttcttgttgctgcgctgattcgggagactgtccttcggacatttccttggcatgctattttccagctctttgcttctatgtaaattg

SEQ ID NO: 28605 - DNA, 759 bp, Muscodor strobelii
  misc_feature: SGI cDNA ID NO. 569813
  misc_feature: Reduced expression when VOC is produced
  misc_feature: Encodes the peptide sequence at SEQ ID NO 28606
atgaattctgcagcacttcaaactgccaaagtccgacttcggtcgttgatgaaacagcaattatctaagctctcagaagagtccatatcggtacaaagcaagacagtatttgaggctttatccaaattcaagccatatcaagatgcaaaaaccgttggcgtgtatctgtccatgcccggcggcgaaatacagacagatccgatcgtaagacatgccttagcatcagggaagcaagtatttgtgccgtacctccataaatctggattgcccccaggcgaagggcctgttcggctcatggacatggtcagacttcgagacgtgcaagactacgagtctctgcagagagacaaatggggcatacccagcgtcgacggcgccacggtgcacgagcggcagcggagcgtgggtgaattggacgggcagagatcagccgatatagcacttgacctgatcttcttaccgggtgtggcgtttgattttgatcccgagacgggcgcggtcaggagacttggacatggcaagggcttctacgattactttctacatcgctatgcactggctaccaacgcggacagggagaaggcattgtcgggaaaccgagcagctgtattgctatatgcgctagctcttaaagagcagcttctgtcccctggttcaggggagtcggtgcccgttgggcctcatgatcagccaattgatggcgttttgatgggggatggcacaataaaagagtccaaggctgagagtggccgcgactga

SEQ ID NO: 28606 - protein, 252 aa, Muscodor strobelii
  misc_feature: SGI Peptide ID NO. 569813
  misc_feature (10)..(238): Pfam Id: PF01812 Pfam Desc: 5-formyltetrahydrofolate cyclo-ligase family
  misc_feature (4)..(247): NCBI GI: 85107504 Blast Desc: NCU06353 [Neurospora crassa OR74A] gi|28923992|gb|EAA33151.1| conserved [Neurospora crassa OR74A]
  misc_feature (3)..(245): NCBI GI: 261352255 Blast Desc: 5-formyltetrahydrofolate cyclo-ligase [Verticillium albo-atrum VaMs.102]
  misc_feature (4)..(247): NCBI GI: 171683353 Blast Desc: protein product [Podospora anserina] gi|170941636|emb|CAP67290.1| protein product [Podospora anserina]
  misc_feature (3)..(243): NCBI GI: 256727537 Blast Desc: NECHADRAFT_33521 [Nectria haematococca mpVI 77-13-4]
  misc_feature (5)..(248): NCBI GI: 145613668 Blast Desc: MGG_11208 [Magnaporthe grisea 70-15] gi|145020714|gb|EDK04843.1| MGG_11208 [Magnaporthe grisea 70-15]
  misc_feature (3)..(250): NCBI GI: 46136531 Blast Desc: FG09781.1 [Gibberella zeae PH-1]
  misc_feature (2)..(244): NCBI GI: 156045541 Blast Desc: SS1G_09961 [Sclerotinia sclerotiorum 1980] gi|154694354|gb|EDN94092.1| SS1G_09961 [Sclerotinia sclerotiorum 1980]
  misc_feature (30)..(249): NCBI GI: 116194590 Blast Desc: CHGG_03893 [Chaetomium globosum CBS 148.51] gi|88179806|gb|EAQ87274.1| CHGG_03893 [Chaetomium globosum CBS 148.51]
  misc_feature (2)..(226): NCBI GI: 154309623 Blast Desc: BC1G_07282 [Botryotinia fuckeliana B05.10] gi|150852305|gb|EDN27497.1| BC1G_07282 [Botryotinia fuckeliana B05.10]
  misc_feature (4)..(242): NCBI GI: 242788001 Blast Desc: 5-formyltetrahydrofolate cyclo-ligase, [Talaromyces stipitatus ATCC 10500] gi|218721280|gb|EED20699.1| 5-formyltetrahydrofolate cyclo-ligase, [Talaromyces stipitatus
  misc_feature (4)..(197): SWISSPROT Homolog: EC 6.3.3.2 5-formyltetrahydrofolate cyclo-ligase
  misc_feature: Useful for introducing or modulating the production of volatile compounds
MNSAALQTAKVRLRSLMKQQLSKLSEESISVQSKTVFEALSKFKPYQDAKTVGVYLSMPGGEIQTDPIVRHALASGKQVFVPYLHKSGLPPGEGPVRLMDMVRLRDVQDYESLQRDKWGIPSVDGATVHERQRSVGELDGQRSADIALDLIFLPGVAFDFDPETGAVRRLGHGKGFYDYFLHRYALATNADREKALSGNRAAVLLYALALKEQLLSPGSGESVPVGPHDQPIDGVLMGDGTIKESKAESGRD

SEQ ID NO: 28607 - DNA, 1677 bp, Muscodor strobelii
  misc_feature: SGI EST ID NO. CUFF.67419.1
  misc_feature: Variant of the nucleotide sequence at SEQ ID NO 28605
caatttacatagaagcaaagagctggaaaatagcatgccaaggaaatgtccgaaggacagtctcccgaatcagcgcagcaacaagaaaatcagccaagaatgaattctgcagcacttcaaactgccaaagtccgacttcggtcgttgatgaaacagcaattatctaagctctcagaagagtccatatcggtacaaagcaagacagtatttgaggctttatccaaattcaagccatatcaagatgcaaaaaccgttggcgtgtatctgtccatgcccggcggcgaaatacagacagatccgatcgtaagacatgccttagcatcagggaagcaagtatttgtgccgtacctccataaatctggattgcccccaggcgaagggcctgttcggctcatggacatggtcagacttcgagacgtgcaagactacgagtctctgcagagagacaaatggggcatacccagcgtcgacggcgccacggtgcacgagcggcagcggagcgtgggtgaattggacgggcagagatcagccgatatagcacttgacctgatcttcttaccgggtgtggcgtttgattttgatcccgagacgggcgcggtcaggagacttggacatggcaagggcttctacgattactttctacatcgctatgcactggctaccaacgcggacagggagaaggcattgtcgggaaaccgagcagctgtattgctatatgcgctagctcttaaagagcagcttctgtcccctggttcaggggagtcggtgcccgttgggcctcatgatcagccaattgatggcgttttgatgggggatggcacaataaaagagtccaaggctgagagtggccgcgactgaatcatattacttggccatccatctctacatataagcctgttttccccgtcgtgtgtaatcttgttgtcggatggggtgtaattgccgagcatagctctcgggattggatctgatagctctgttcgtgaagtgaacggaaagggatctcgcgcggtgaagctagggaacgtagatcacagagcttcttgtatcagcgacacattgtcgcccttgagtagaatttggcctgtcacagatgtcagcatgcgagtcacagtggtgggaatggtagcaggaagacggaccgagattccttctcttctcttcgggattcgtcttagagacttgcttgacttctacagcatcgtcgataaccagattcatgaactcgtcgaaaccctggcagtccatgtcagttggataggttcaagtcacagcagtaggacacatactctgatcttcccctcgattctggtggagagctgctcgtacaaccagatcttgacgggggcgtgtgtctggaggagcttgaagatgaagttgatgggcgggagcaagaccttgcgtccaccgccaccgcgaccagtcatcgtgaaactagacttgggagtcgggatagaagtgcgatcggcgatgtgtgggacgaggaggccacgttcgttggggcagcggcggatgggtgggctgcaagtacgttggccgttgcgagaggtattggaggggcgccgtaaatcagaggtgttgagatttggcaaggctgagaaacttaggcttggcacaaatgcctttgggggtgcctacaggcagctggtgcacccctgctagtgagatacagtggac

SEQ ID NO: 28608 - DNA, 1119 bp, Muscodor strobelii
  misc_feature: SGI cDNA ID NO. 569814
  misc_feature: Encodes the peptide sequence at SEQ ID NO 28609
atggcggaggaggctcctaactcagaaacgaatcgagtaaggcctgaagagatttcttcacctagtgtctcaaatgaaggcaacagtcgtgatgctgccattgcacaatcaagcgaacctgctcaagatcatcaacctattaatgaagatgcgccaccaccaccattaccacagcggccggcagtcgcgcatggtcagcctatgccccagcagtactatcctcaacagtaccagatgccagccgcgcctttcatgtttcctgcaaatcaacaattcacgtatgcgaagcccacgcgacagttgcctgagttgagccaagcctacattgggacaaggattggcttgacggttctctcatccattctcggcatcatcgtcatcgcattgacgagtgtgctgttcagtgaaggaagttgggttgcagagaccgcactttatgcgtatcctatttctgcggcctcgatcatttggaatacggcggagctgatcacatatctcgtgcggttacgcaaacaccaccaacgcggtattcacccgggtgcccacgttgctctacatctgatattctggcttgctggcgtctttgcaatccttcttactgcgtcactgctagttggtgtgcagagcaatcttgagtattgcaacagctcttacgacgactatggctataacagtggctactgcgacgagttttcgccctatggctactataggagcatgatccttccaattgttcaaggcttgttagcagtcttcgcattgtggcttgttgtccacttcacgctgttcgtactagcttgcattgagacacacaagcgcaatacgatgttgccagccgctattctggttcctgtttctcagtccggcgcagctccgatgcagtactatccacagcagggagtcgtgccgatgcaatattatcagcaaccagtcatgtcaatgccagctatgcctcccggtgcagttacgacaaacccggaaatgcgttcgccaaccgcctccgagaaacagcctgttcaggattaccagaacttgactggattctatggaccagaatcgcagcctcagtcgcgcacgaatgaagtgccgccaagcaatggtcacgcaggaccatcataa

SEQ ID NO: 28609 - protein, 372 aa, Muscodor strobelii
  misc_feature: SGI Peptide ID NO. 569814
  misc_feature (105)..(327): NCBI GI: 46116312 Blast Desc: FG03998.1 [Gibberella zeae PH-1]
  misc_feature (113)..(321): NCBI GI: 261352923 Blast Desc: VDBG_01460 [Verticillium albo-atrum VaMs.102]
  misc_feature (143)..(288): NCBI GI: 145611794 Blast Desc: [Magnaporthe grisea 70-15] gi|145019044|gb|EDK03323.1| [Magnaporthe grisea 70-15]
  misc_feature (106)..(274): NCBI GI: 171677774 Blast Desc: protein product [Podospora anserina] gi|170936955|emb|CAP61614.1| protein product [Podospora anserina]
  misc_feature (19)..(274): NCBI GI: 85082505 Blast Desc: NCU04518 [Neurospora crassa OR74A] gi|28918010|gb|EAA27693.1| NCU04518 [Neurospora crassa OR74A]
  misc_feature (31)..(283): NCBI GI: 256723132 Blast Desc: NECHADRAFT_94095 [Nectria haematococca mpVI 77-13-4]
  misc_feature (162)..(272): NCBI GI: 116195408 Blast Desc: [Chaetomium globosum CBS 148.51] gi|88180215|gb|EAQ87683.1| [Chaetomium globosum CBS 148.51]
  misc_feature (120)..(292): NCBI GI: 171678143 Blast Desc: protein product [Podospora anserina] gi|170937141|emb|CAP61798.1| protein product [Podospora anserina]
  misc_feature (111)..(301): NCBI GI: 261360936 Blast Desc: [Verticillium albo-atrum VaMs.102]
MAEEAPNSETNRVRPEEISSPSVSNEGNSRDAAIAQSSEPAQDHQPINEDAPPPPLPQRPAVAHGQPMPQQYYPQQYQMPAAPFMFPANQQFTYAKPTRQLPELSQAYIGTRIGLTVLSSILGIIVIALTSVLFSEGSWVAETALYAYPISAASIIWNTAELITYLVRLRKHHQRGIHPGAHVALHLIFWLAGVFAILLTASLLVGVQSNLEYCNSSYDDYGYNSGYCDEFSPYGYYRSMILPIVQGLLAVFALWLVVHFTLFVLACIETHKRNTMLPAAILVPVSQSGAAPMQYYPQQGVVPMQYYQQPVMSMPAMPPGAVTTNPEMRSPTASEKQPVQDYQNLTGFYGPESQPQSRTNEVPPSNGHAGPS

SEQ ID NO: 28610 - DNA, 1632 bp, Muscodor strobelii
  misc_feature: SGI EST ID NO. CUFF.67357.0
  misc_feature: Variant of the nucleotide sequence at SEQ ID NO 28608
tttggattcaaggagccatcgtactctgggccagtgtatcacgatgaagaacttcttgactagccgggtttctcaacagcacactttcgttgcctaaatttcctcttgtttccttaccacttgccacttccctctcgtgataatatcgcgaccacgctcgttcatttcactcgtttcgttccccccacactcgtttgtctaatctgcaaatcttcaatttttatttcaccttgctgcgcctttctactattattatagccaataaaccacatacaagggaacccaaagcgaacactcacgaagtgcaagacaacacgaccatggcggaggaggctcctaactcagaaacgaatcgagtaaggcctgaagagatttcttcacctagtgtctcaaatgaaggcaacagtcgtgatgctgccattgcacaatcaagcgaacctgctcaagatcatcaacctattaatgaagatgcgccaccaccaccattaccacagcggccggcagtcgcgcatggtcagcctatgccccagcagtactatcctcaacagtaccagatgccagccgcgcctttcatgtttcctgcaaatcaacaattcacgtatgcgaagcccacgcgacagttgcctgagttgagccaagcctacattgggacaaggattggcttgacggttctctcatccattctcggcatcatcgtcatcgcattgacgagtgtgctgttcagtgaaggaagttgggttgcagagaccgcactttatgcgtatcctatttctgcggcctcgatcatttggaatacggcggagctgatcacatatctcgtgcggttacgcaaacaccaccaacgcggtattcacccgggtgcccacgttgctctacatctgatattctggcttgctggcgtctttgcaatccttcttactgcgtcactgctagttggtgtgcagagcaatcttgagtattgcaacagctcttacgacgactatggctataacagtggctactgcgacgagttttcgccctatggctactataggagcatgatccttccaattgttcaaggcttgttagcagtcttcgcattgtggcttgttgtccacttcacgctgttcgtactagcttgcattgagacacacaagcgcaatacgatgttgccagccgctattctggttcctgtttctcagtccggcgcagctccgatgcagtactatccacagcagggagtcgtgccgatgcaatattatcagcaaccagtcatgtcaatgccagctatgcctcccggtgcagttacgacaaacccggaaatgcgttcgccaaccgcctccgagaaacagcctgttcaggattaccagaacttgactggattctatggaccagaatcgcagcctcagtcgcgcacgaatgaagtgccgccaagcaatggtcacgcaggaccatcataagtatagaacaagagacgaatgataggacgagtggggtgcgttgaggcttaattatacaaggcatgcctcaccagtaacgacacgcccattctcattgatgagatcaggcaactttgataccccggcgaaatgagacaaatactagactacgatagcctctaatgtttaatgcttcaagacaatttgaccaacg

SEQ ID NO: 28611 - DNA, 408 bp, Muscodor strobelii
  misc_feature: SGI cDNA ID NO. 569815
  misc_feature: Encodes the peptide sequence at SEQ ID NO 28612
atgggacgcccaagacgcgatgtgcgggccgcggctgaggagtctatcaatccgccagagcaactgacgcagacgcagtcaattgccaaagtcattaagctggagggcaacagtctatgcagctgcttgcttccaacccagcaaactgttctggtggagcttgcaacccgtttccgtagcaccgtttggatcaaacgcgggggctatgttttagtggatcttgcgagcgattcagaccagaagagcaaagtcgagggcgagattgtgaatgtcgttcgcgaggaaagggaatggcgcaaacaatcgtactggccacaagctttcggtaaatcggttgctgatatcgaagatgaggaggactcaacagtcggcaaaatgccgccagcatattctgacgacgaggattga

SEQ ID NO: 28612 - protein, 135 aa, Muscodor strobelii
  misc_feature: SGI Peptide ID NO. 569815
  misc_feature (23)..(91): Pfam Id: PF01176 Pfam Desc: Translation initiation factor 1A / IF-1
  misc_feature (1)..(134): NCBI GI: 156031215 Blast Desc: SS1G_14029 [Sclerotinia sclerotiorum 1980] gi|154699431|gb|EDN99169.1| SS1G_14029 [Sclerotinia sclerotiorum 1980]
  misc_feature (1)..(134): NCBI GI: 154309159 Blast Desc: BC1G_07474 [Botryotinia fuckeliana B05.10] gi|150852517|gb|EDN27709.1| BC1G_07474 [Botryotinia fuckeliana B05.10]
  misc_feature (1)..(134): NCBI GI: 164424976 Blast Desc: NCU06553 [Neurospora crassa OR74A] gi|157070736|gb|EAA33024.2| conserved [Neurospora crassa OR74A]
  misc_feature (1)..(134): NCBI GI: 39945778 Blast Desc: MGG_08009 [Magnaporthe grisea 70-15] gi|145019243|gb|EDK03471.1| MGG_08009 [Magnaporthe grisea 70-15]
  misc_feature (1)..(134): NCBI GI: 261354936 Blast Desc: conserved [Verticillium albo-atrum VaMs.102]
  misc_feature (1)..(135): NCBI GI: 170940112 Blast Desc: protein product [Podospora anserina]
  misc_feature (1)..(134): NCBI GI: 116195074 Blast Desc: CHGG_04135 [Chaetomium globosum CBS 148.51] gi|88180048|gb|EAQ87516.1| CHGG_04135 [Chaetomium globosum CBS 148.51]
  misc_feature (1)..(134): NCBI GI: 12802364 Blast Desc: AF309689_9 protein G6G8.9 [Neurospora crassa]
  misc_feature (1)..(134): NCBI GI: 154283337 Blast Desc: conserved [Ajellomyces capsulatus NAm1] gi|150410644|gb|EDN06032.1| conserved [Ajellomyces capsulatus NAm1]
  misc_feature (1)..(134): NCBI GI: 225561801 Blast Desc: conserved [Ajellomyces capsulatus G186AR]
MGRPRRDVRAAAEESINPPEQLTQTQSIAKVIKLEGNSLCSCLLPTQQTVLVELATRFRSTVWIKRGGYVLVDLASDSDQKSKVEGEIVNVVREEREWRKQSYWPQAFGKSVADIEDEEDSTVGKMPPAYSDDED

SEQ ID NO: 28613 - DNA, 1717 bp, Muscodor strobelii
  misc_feature: SGI EST ID NO. CUFF.67365.0
  misc_feature: Variant of the nucleotide sequence at SEQ ID NO 28611
ttgcactgaaatgttttttatttttcatccgctcattgtgatatatacggaattcctctcgacctcctgcaaaattgtgtagcatctgtcaccatgggacgcccaagacgcgatgtgcgggccgcggctgaggagtctatcaatccgccagagcaactgacgcagacgcagtcaattgccaaagtcattaagctggagggcaacagtctatgcagctgcttgcttccaacccagcaaactgttctggtggagcttgcaacccgtttccgtagcaccgtttggatcaaacgcgggggctatgttttagtggatcttgcgagcgattcagaccagaagagcaaagtcgagggcgagattgtgaatgtcgttcgcgaggaaagggaatggcgcaaacaatcgtactggccacaagctttcggtaaatcggttgctgatatcgaagatgaggaggactcaacagtcggcaaaatgccgccagcatattctgacgacgaggattgatttgctacggaacccaatgggttcttcaaactgcttttcgttcctgacttggatgggctgatggagatggaaattgagttttgctagctgccatcaagccaactgtcatcgccattacactgacaacgacttgtgagctggtatttgtgcttgggaaaacattccaagcccattcctgaagcatccacagcccgtattgaatgatgggatgcgcgccactacgccagaggagatatggcgtagaccacgcgagatacgcgtaaaactggtaatgcagtgagcgggcaaagagaagtccgatggcgttggcagacaatatagtggtcataacgtattctggcgtaactcgtctcgagatacgttgctgctcttcagattcgaatggggaattgagtcgaagaagaggtatgaagatggcaaacaatgatttgcctgtaggtttcagccatctgttcgagataaaccatagcagaacgatggcatgcattgccagtagacctaatgcaaatggacgagacaagaaggtctcttcaccaacaaagcgccagttgactgtccatttgaagaagaattgtcgcgacagctcaaacgcacgtgccaaatatccttgcgcattctctctcagaaatgggaggccaagaaggatttgtgcttgggctatgatagcagccaacaataggctactagcaagcccgcttcccaagaaaagtatgatgccaactgctggtagcataagcaacagtgacatctttatacccaatccccatgtgtaagtgatactgccgagtgtccaagcccgtctttggaacaggtagatcgtcagccacatgaagaacacggcgaaacagtcgttgaagcagcgcagtacaaatatactgtgaaggcgttttgatagaatcaaaagggggaagacatagggtgggacctaggtatcttatgcgtcagcatctgttacataatacagaagggcggcctgatatatctacctgggcttttgaatagcaggccatcaccaatgctaaggtcgccatatagagtaccgtaaagagttgctgggcaaagaatatgtcctggccctcaccggtcatgtagtaaaggccagtgtaagtatagacgtgagcggctggatatacaagcggacctgtaccgcccttgatcagggtgtaatcacgttctccagcaacatactgggcaacttgttccatgtaagccttcc

SEQ ID NO: 28614 - DNA, 1299 bp, Muscodor strobelii
  misc_feature: SGI cDNA ID NO. 569816
  misc_feature: Encodes the peptide sequence at SEQ ID NO 28615
atgcctggtgacaaccgtgggctggccgtaaaggcaatcgaactgggttttgatgttgctaacggtcgcaatgccatgctatcgtggcttgtgcctccatgtctttttcttctggatgccatgctctgtgggcttgtcatttggaaagtaccatacacagaaattgactggaaggcttacatggaacaagttgcccagtatgttgctggagaacgtgattacaccctgatcaagggcggtacaggtccgcttgtatatccagccgctcacgtctatacttacactggcctttactacatgaccggtgagggccaggacatattctttgcccagcaactctttacggtactctatatggcgaccttagcattggtgatggcctgctattcaaaagcccaggtcccaccctatgtcttcccccttttgattctatcaaaacgccttcacagtatatttgtactgcgctgcttcaacgactgtttcgccgtgttcttcatgtggctgacgatctacctgttccaaagacgggcttggacactcggcagtatcacttacacatggggattgggtataaagatgtcactgttgcttatgctaccagcagttggcatcatacttttcttgggaagcgggcttgctagtagcctattgttggctgctatcatagcccaagcacaaatccttcttggcctcccatttctgagagagaatgcgcaaggatatttggcacgtgcgtttgagctgtcgcgacaattcttcttcaaatggacagtcaactggcgctttgttggtgaagagaccttcttgtctcgtccatttgcattaggtctactggcaatgcatgccatcgttctgctatggtttatctcgaacagatggctgaaacctacaggcaaatcattgtttgccatcttcatacctcttcttcgactcaattccccattcgaatctgaagagcagcaacgtatctcgagacgagttacgccagaatacgttatgaccactatattgtctgccaacgccatcggacttctctttgcccgctcactgcattaccagttttacgcgtatctcgcgtggtctacgccatatctcctctggcgtagtggcgcgcatcccatcattcaatacgggctgtggatgcttcaggaatgggcttggaatgttttcccaagcacaaataccagctcacaagtcgttgtcagtgtaatggcgatgacagttggcttgatggcagctagcaaaactcaatttccatctccatcagcccatccaagtcaggaacgaaaagcagtttga

SEQ ID NO: 28615 - protein, 432 aa, Muscodor strobelii
  misc_feature: SGI Peptide ID NO. 569816
  misc_feature (31)..(397): Pfam Id: PF05208 Pfam Desc: ALG3 protein
  misc_feature (18)..(430): NCBI GI: 46136275 Blast Desc: FG09653.1 [Gibberella zeae PH-1]
  misc_feature (2)..(397): NCBI GI: 85106839 Blast Desc: NCU06552 [Neurospora crassa OR74A] gi|74623776|sp|Q9C1K8.1|ALG3_NEUCR RecName: Full=Dolichyl-P-Man:Man(5)GlcNAc(2)-PP-dolichyl AltName: AltName:
  misc_feature (1)..(391): NCBI GI: 256727375 Blast Desc: NECHADRAFT_57958 [Nectria haematococca mpVI 77-13-4]
  misc_feature (1)..(409): NCBI GI: 170940111 Blast Desc: protein product [Podospora anserina]
  misc_feature (31)..(430): NCBI GI: 169779159 Blast Desc: [Aspergillus oryzae RIB40] gi|121799818|sp|Q2U6A4.1|ALG3_ASPOR RecName: Full=Dolichyl-P-Man:Man(5)GlcNAc(2)-PP-dolichyl AltName: AltName:
  misc_feature (8)..(428): NCBI GI: 189206303 Blast Desc: Lethal(2)neighbour of Tid protein [Pyrenophora tritici-repentis Pt-1C-BFP] gi|187975579|gb|EDU42205.1| Lethal(2)neighbour of Tid protein [Pyrenophora tritici-repentis
  misc_feature (31)..(414): NCBI GI: 119478936 Blast Desc: alpha-1,3-mannosyltransferase (Alg3), [Neosartorya fischeri NRRL 181] gi|206558090|sp|A1DDZ3.1|ALG3_NEOFI RecName: Full=Dolichyl-P-Man:Man(5)GlcNAc(2)-PP-dolichyl AltName: AltName:
  misc_feature (8)..(432): NCBI GI: 255954001 Blast Desc: Pc21g07120 [Penicillium chrysogenum Wisconsin 54-1255] gi|211589464|emb|CAP95609.1| Pc21g07120 [Penicillium chrysogenum Wisconsin 54-1255]
  misc_feature (31)..(424): NCBI GI: 121713758 Blast Desc: alpha-1,3-mannosyltransferase (Alg3), [Aspergillus clavatus NRRL 1] gi|206558081|sp|A1CBE6.1|ALG3_ASPCL RecName: Full=Dolichyl-P-Man:Man(5)GlcNAc(2)-PP-dolichyl AltName: AltName:
  misc_feature (14)..(408): NCBI GI: 225684441 Blast Desc: mannosyltransferase [Paracoccidioides brasiliensis Pb03] gi|226294093|gb|EEH49513.1| mannosyltransferase [Paracoccidioides brasiliensis Pb18]
  misc_feature (2)..(391): SWISSPROT Homolog: EC 2.4.1.130 Dolichyl-phosphate-mannose--glycolipid alpha-mannosyltransferase
MPGDNRGLAVKAIELGFDVANGRNAMLSWLVPPCLFLLDAMLCGLVIWKVPYTEIDWKAYMEQVAQYVAGERDYTLIKGGTGPLVYPAAHVYTYTGLYYMTGEGQDIFFAQQLFTVLYMATLALVMACYSKAQVPPYVFPLLILSKRLHSIFVLRCFNDCFAVFFMWLTIYLFQRRAWTLGSITYTWGLGIKMSLLLMLPAVGIILFLGSGLASSLLLAAIIAQAQILLGLPFLRENAQGYLARAFELSRQFFFKWTVNWRFVGEETFLSRPFALGLLAMHAIVLLWFISNRWLKPTGKSLFAIFIPLLRLNSPFESEEQQRISRRVTPEYVMTTILSANAIGLLFARSLHYQFYAYLAWSTPYLLWRSGAHPIIQYGLWMLQEWAWNVFPSTNTSSQVVVSVMAMTVGLMAASKTQFPSPSAHPSQERKAV

SEQ ID NO: 28616 - DNA, 2078 bp, Muscodor strobelii
  misc_feature: SGI EST ID NO. CUFF.67366.2
  misc_feature: Variant of the nucleotide sequence at SEQ ID NO 28614
caactttcatttcgtacatgtattcaagttgacaagcacttgcatcgcaacctgtcgcaaatcacataccacttgtttcttgacctcatccatcttcattcagggttacaacatctctttcctcaacagccgcgaaacatacgtcatcccaattcaccgcaattggtcagctgtgacccataaacagcaatctatatcatggcaatgcctggtgacaaccgtgggctggccgtaaaggcaatcgaactgggttttgatgttgctaacggtcgcaatgccatgctatcgtggcttgtgcctccatgtctttttcttctggatgccatgctctgtgggcttgtcatttggaaagtaccatacacagaaattgactggaaggcttacatggaacaagttgcccagtatgttgctggagaacgtgattacaccctgatcaagggcggtacaggtccgcttgtatatccagccgctcacgtctatacttacactggcctttactacatgaccggtgagggccaggacatattctttgcccagcaactctttacggtactctatatggcgaccttagcattggtgatggcctgctattcaaaagcccaggtcccaccctatgtcttcccccttttgattctatcaaaacgccttcacagtatatttgtactgcgctgcttcaacgactgtttcgccgtgttcttcatgtggctgacgatctacctgttccaaagacgggcttggacactcggcagtatcacttacacatggggattgggtataaagatgtcactgttgcttatgctaccagcagttggcatcatacttttcttgggaagcgggcttgctagtagcctattgttggctgctatcatagcccaagcacaaatccttcttggcctcccatttctgagagagaatgcgcaaggatatttggcacgtgcgtttgagctgtcgcgacaattcttcttcaaatggacagtcaactggcgctttgttggtgaagagaccttcttgtctcgtccatttgcattaggtctactggcaatgcatgccatcgttctgctatggtttatctcgaacagatggctgaaacctacaggcaaatcattgtttgccatcttcatacctcttcttcgactcaattccccattcgaatctgaagagcagcaacgtatctcgagacgagttacgccagaatacgttatgaccactatattgtctgccaacgccatcggacttctctttgcccgctcactgcattaccagttttacgcgtatctcgcgtggtctacgccatatctcctctggcgtagtggcgcgcatcccatcattcaatacgggctgtggatgcttcaggaatgggcttggaatgttttcccaagcacaaataccagctcacaagtcgttgtcagtgtaatggcgatgacagttggcttgatggcagctagcaaaactcaatttccatctccatcagcccatccaagtcaggaacgaaaagcagtttgaagaacccattgggttccgtagcaaatcaatcctcgtcgtcagaatatgctggcggcattttgccgactgttgagtcctcctcatcttcgatatcagcaaccgatttaccgaaagcttgtggcctagatcaaggatcagaaatggttgccataagggattaacgttgcttaccagtacgattgtttgcgccattccctttcctcgcgaacgacattcacaatctcgccctcgactttgctcttctggtctgaatcgctcgcaagatccactaaaacatagcccccgcgtttgatccaaacggtgctacggaaacgggttgcaagctccaccagaacagtttgctgggttggaagcaagcagctgcatagactgttgccctccagcttaatgactttggcaattgactgcgtctgcgtcagttgctctggcggattgatagactcctcagccgcggcccgcacatcgcgtcttgggcgtcccatggtgacagatgctacacaattttgcaggaggtcgagaggaattccgtatatatcacaatgagcggatgaaaaataaaaaacatttcagtgcaa

SEQ ID NO: 28617 - DNA, 1143 bp, Muscodor strobelii
  misc_feature: SGI cDNA ID NO. 569817
  misc_feature: Encodes the peptide sequence at SEQ ID NO 28618
atgccgaacattgtagtcatcggcgcaggagtgtcaggtttaacgtcggcttacctactctccaagcaggaaagtaatacaatcaccatcattgcgaagcacatgccaggcgactatgacatagaatacgcatctccgatgtacgttagtgctcgtcggcaatcggaatcttctgtcctggcctttgccggcgcgaacgttctgccaatggctacggaggaaagaagtagctgggagcgccggacctggaaagagcttagaagacttgccgtggatgtgccagaagcaggcattcatctacagaaatctcgagtttaccgacgagagaaagatcttgataagctcagaaaaggtgggtatagcttcgacggcttattcatggagaatccctggttcaaatccttattcgaggatttcagagagctgcccgaggaagaattgcccaagggcatggcatctggctgtgagttcggatcagtgtgcatcaatgtgatgctctatctaccgtggctcgttggtcagtgtcgtaaaaacggtgtggtgctgaagcgtggccaagtaaagcacgtgacagaagcctccaacatgtcccatactgggaagaaagcagatgtggttatcaacactacgggcttgatggcgtcaagacttggcggtgttatagaccaaaatgttacgcctatacgaggacaggtagtagtggtacgaaatgaggctcctttcatgttgaccaagtcaggaacagacgacgctgaggacgaagtatgctatgtaatgacgagagctgcaggtggaggtacagtcctcggtggtacctattccaaaggtcaatgggagagccagcctgatccaaaccaagccatgcgaatcatgcgtcgagtgtatgagatgatgccagaaataacaaaaaaccaaggcgtcaaagggttcgatgagaatgatctaacatggcagattgttcgtcatgccgtcggccttcgtccatatcgaaatggtggcgtcagaattgagaaagagaagattggagacacgtgggtagttcacaactatggtcactcaggttggggatatcaaggaagctatggatgtggagaagacgttgttaagctagtcggagaggttctgaatcgtgcaagactatga

SEQ ID NO: 28618 - protein, 380 aa, Muscodor strobelii
  misc_feature: SGI Peptide ID NO. 569817
  misc_feature (3)..(370): Pfam Id: PF01266 Pfam Desc: FAD dependent oxidoreductase
  misc_feature (137)..(370): Pfam Id: PF01266 Pfam Desc: FAD dependent oxidoreductase
  misc_feature (3)..(37): Pfam Id: PF01266 Pfam Desc: FAD dependent oxidoreductase
  misc_feature (3)..(374): NCBI GI: 46136273 Blast Desc: FG09652.1 [Gibberella zeae PH-1]
  misc_feature (1)..(379): NCBI GI: 170940110 Blast Desc: protein product [Podospora anserina]
  misc_feature (4)..(379): NCBI GI: 256727376 Blast Desc: [Nectria haematococca mpVI 77-13-4]
  misc_feature (4)..(379): NCBI GI: 129302 Blast Desc: OXDA_FUSSO RecName: Full=D-amino-acid oxidase; Short=DAMOX; Short=DAAO; Short=DAO gi|217923|dbj|BAA00692.1| D-amino acid oxidase [Nectria haematococca]
  misc_feature (1)..(375): NCBI GI: 156049637 Blast Desc: SS1G_08525 [Sclerotinia sclerotiorum 1980] gi|154692924|gb|EDN92662.1| SS1G_08525 [Sclerotinia sclerotiorum 1980]
  misc_feature (1)..(373): NCBI GI: 145611999 Blast Desc: MGG_08011 [Magnaporthe grisea 70-15] gi|145019245|gb|EDK03473.1| MGG_08011 [Magnaporthe grisea 70-15]
  misc_feature (1)..(380): NCBI GI: 85106862 Blast Desc: D-amino-acid oxidase [Neurospora crassa OR74A] gi|12802361|gb|AAK07844.1|AF309689_6 D-amino acid oxidase G6G8.6 [Neurospora crassa] gi|28923866|gb|EAA33029.1| D-amino-acid
  misc_feature (1)..(379): NCBI GI: 116195078 Blast Desc: CHGG_04137 [Chaetomium globosum CBS 148.51] gi|88180050|gb|EAQ87518.1| CHGG_04137 [Chaetomium globosum CBS 148.51]
  misc_feature (4)..(377): NCBI GI: 145228745 Blast Desc: An01g02430 [Aspergillus niger] gi|134054773|emb|CAK43613.1| protein product [Aspergillus niger]
  misc_feature (3)..(380): NCBI GI: 169775315 Blast Desc: [Aspergillus oryzae RIB40] gi|238496055|ref|XP_002379263.1| D-amino acid oxidase [Aspergillus flavus NRRL3357] gi|83769988|dbj|BAE60123.1| protein
  misc_feature (4)..(379): SWISSPROT Homolog: EC 1.4.3.3 D-amino-acid oxidase
MPNIVVIGAGVSGLTSAYLLSKQESNTITIIAKHMPGDYDIEYASPMYVSARRQSESSVLAFAGANVLPMATEERSSWERRTWKELRRLAVDVPEAGIHLQKSRVYRREKDLDKLRKGGYSFDGLFMENPWFKSLFEDFRELPEEELPKGMASGCEFGSVCINVMLYLPWLVGQCRKNGVVLKRGQVKHVTEASNMSHTGKKADVVINTTGLMASRLGGVIDQNVTPIRGQVVVVRNEAPFMLTKSGTDDAEDEVCYVMTRAAGGGTVLGGTYSKGQWESQPDPNQAMRIMRRVYEMMPEITKNQGVKGFDENDLTWQIVRHAVGLRPYRNGGVRIEKEKIGDTWVVHNYGHSGWGYQGSYGCGEDVVKLVGEVLNRARL

SEQ ID NO: 28619 - DNA, 788 bp, Muscodor strobelii
  misc_feature: SGI EST ID NO. CUFF.67413.0
  misc_feature: Variant of the nucleotide sequence at SEQ ID NO 28617
acgttctgccaatggctacggaggaaagaagtagctgggagcgccggacctggaaagagcttagaagacttgccgtggatgtgccagaagcaggcattcatctacagagtaaatcgatctcttgagtgtaaattaaaaggtgtctgacatttgcagaatctcgagtttaccgacgagagaaagatcttgataagctcagaaaaggtgggtatagcttcgacggcttattcatggagaatccctggttcaaatccttattcgaggatttcagagagctgcccgaggaagaattgcccaagggcatggcatctggctgtgagttcggatcagtgtgcatcaatgtgatgctctatctaccgtggctcgttggtcagtgtcgtaaaaacggtgtggtgctgaagcgtggccaagtaaagcacgtgacagaagcctccaacatgtcccatactgggaagaaagcagatgtggttatcaacactacgggcttgatggcgtcaagacttggcggtgttatagaccaaaatgttacgcctatacgaggacaggtagtagtggtacgaaatgaggctcctttcatgttgaccaagtcaggaacagacgacgctgaggacgaagtatgctatgtaatgacgagagctgcaggtggaggtacagtcctcggtggtacctattccaaaggtcaatgggagagccagcctgatccaaaccaagccatgcgaatcatgcgtcgagtgtatgagatgatgccagaaataacaaaaaaccaaggcgtcaaagggttcgatggt

SEQ ID NO: 28620 - DNA, 1170 bp, Muscodor strobelii
  misc_feature: SGI cDNA ID NO. 569818
  misc_feature: Encodes the peptide sequence at SEQ ID NO 28621
atgccgaacattgtagtcatcggcgcaggagtgtcaggtttaacgtcggcttacctactctccaagcaggaaagtaatacaatcaccatcattgcgaagcacatgccaggcgactatgacatagaatacgcatctccgatgtacgttagtgctcgtcggcaatcggaatcttctgtcctggccttgtatgataaagtcgtgaaaagagctaacgtgagttctgaccaagaaagaatggctacggaggaaagaagtagctgggagcgccggacctggaaagagcttagaagacttgccgtggatgtgccagaagcaggcattcatctacagaaatctcgagtttaccgacgagagaaagatcttgataagctcagaaaaggtgggtatagcttcgacggcttattcatggagaatccctggttcaaatccttattcgaggatttcagagagctgcccgaggaagaattgcccaagggcatggcatctggctgtgagttcggatcagtgtgcatcaatgtgatgctctatctaccgtggctcgttggtcagtgtcgtaaaaacggtgtggtgctgaagcgtggccaagtaaagcacgtgacagaagcctccaacatgtcccatactgggaagaaagcagatgtggttatcaacactacgggcttgatggcgtcaagacttggcggtgttatagaccaaaatgttacgcctatacgaggacaggtagtagtggtacgaaatgaggctcctttcatgttgaccaagtcaggaacagacgacgctgaggacgaagtatgctatgtaatgacgagagctgcaggtggaggtacagtcctcggtggtacctattccaaaggtcaatgggagagccagcctgatccaaaccaagccatgcgaatcatgcgtcgagtgtatgagatgatgccagaaataacaaaaaaccaaggcgtcaaagggttcgatgagaatgatctaacatggcagattgttcgtcatgccgtcggccttcgtccatatcgaaatggtggcgtcagaattgagaaagagaagattggagacacgtgggtagttcacaactatggtcactcaggttggggatatcaaggaagctatggatgtggagaagacgttgttaagctagtcggagaggttctgaatcgtgcaagactatga

SEQ ID NO: 28621 - protein, 389 aa, Muscodor strobelii
  misc_feature: SGI Peptide ID NO. 569818
  misc_feature (3)..(379): Pfam Id: PF01266 Pfam Desc: FAD dependent oxidoreductase
  misc_feature (146)..(379): Pfam Id: PF01266 Pfam Desc: FAD dependent oxidoreductase
  misc_feature (3)..(37): Pfam Id: PF01266 Pfam Desc: FAD dependent oxidoreductase
  misc_feature (3)..(383): NCBI GI: 46136273 Blast Desc: FG09652.1 [Gibberella zeae PH-1]
  misc_feature (4)..(388): NCBI GI: 256727376 Blast Desc: [Nectria haematococca mpVI 77-13-4]
  misc_feature (4)..(388): NCBI GI: 129302 Blast Desc: OXDA_FUSSO RecName: Full=D-amino-acid oxidase; Short=DAMOX; Short=DAAO; Short=DAO gi|217923|dbj|BAA00692.1| D-amino acid oxidase [Nectria haematococca]
  misc_feature (1)..(388): NCBI GI: 170940110 Blast Desc: protein product [Podospora anserina]
  misc_feature (1)..(384): NCBI GI: 156049637 Blast Desc: SS1G_08525 [Sclerotinia sclerotiorum 1980] gi|154692924|gb|EDN92662.1| SS1G_08525 [Sclerotinia sclerotiorum 1980]
  misc_feature (1)..(382): NCBI GI: 145611999 Blast Desc: MGG_08011 [Magnaporthe grisea 70-15] gi|145019245|gb|EDK03473.1| MGG_08011 [Magnaporthe grisea 70-15]
  misc_feature (1)..(389): NCBI GI: 85106862 Blast Desc: D-amino-acid oxidase [Neurospora crassa OR74A] gi|12802361|gb|AAK07844.1|AF309689_6 D-amino acid oxidase G6G8.6 [Neurospora crassa] gi|28923866|gb|EAA33029.1| D-amino-acid
  misc_feature (1)..(388): NCBI GI: 116195078 Blast Desc: CHGG_04137 [Chaetomium globosum CBS 148.51] gi|88180050|gb|EAQ87518.1| CHGG_04137 [Chaetomium globosum CBS 148.51]
  misc_feature (4)..(386): NCBI GI: 145228745 Blast Desc: An01g02430 [Aspergillus niger] gi|134054773|emb|CAK43613.1| protein product [Aspergillus niger]
  misc_feature (3)..(389): NCBI GI: 169775315 Blast Desc: [Aspergillus oryzae RIB40] gi|238496055|ref|XP_002379263.1| D-amino acid oxidase [Aspergillus flavus NRRL3357] gi|83769988|dbj|BAE60123.1| protein
  misc_feature (4)..(388): SWISSPROT Homolog: EC 1.4.3.3 D-amino-acid oxidase
MPNIVVIGAGVSGLTSAYLLSKQESNTITIIAKHMPGDYDIEYASPMYVSARRQSESSVLALYDKVVKRANVSSDQERMATEERSSWERRTWKELRRLAVDVPEAGIHLQKSRVYRREKDLDKLRKGGYSFDGLFMENPWFKSLFEDFRELPEEELPKGMASGCEFGSVCINVMLYLPWLVGQCRKNGVVLKRGQVKHVTEASNMSHTGKKADVVINTTGLMASRLGGVIDQNVTPIRGQVVVVRNEAPFMLTKSGTDDAEDEVCYVMTRAAGGGTVLGGTYSKGQWESQPDPNQAMRIMRRVYEMMPEITKNQGVKGFDENDLTWQIVRHAVGLRPYRNGGVRIEKEKIGDTWVVHNYGHSGWGYQGSYGCGEDVVKLVGEVLNRARL

SEQ ID NO: 28622 - DNA, 788 bp, Muscodor strobelii; identical to SEQ ID NO: 28619
  misc_feature: SGI EST ID NO. CUFF.67413.0
  misc_feature: Variant of the nucleotide sequence at SEQ ID NO 28620

SEQ ID NO: 28623 - DNA, 1176 bp, Muscodor strobelii
  misc_feature: SGI cDNA ID NO. 569819
  misc_feature: Reduced expression when VOC is produced
  misc_feature: Encodes the peptide sequence at SEQ ID NO 28624
atgccgaacattgtagtcatcggcgcaggagtgtcaggtttaacgtcggcttacctactctccaagcaggaaagtaatacaatcaccatcattgcgaagcacatgccaggcgactatgacatagaatacgcatctccgatggtatgtggaaaaaccgacgcgatgctctgccggcgcgaacgttctgccgtaagttttgaagaagcattagatctgaatcagagttctgaccaagaaagaatggctacggaggaaagaagtagctgggagcgccggacctggaaagagcttagaagacttgccgtggatgtgccagaagcaggcattcatctacagaaatctcgagtttaccgacgagagaaagatcttgataagctcagaaaaggtgggtatagcttcgacggcttattcatggagaatccctggttcaaatccttattcgaggatttcagagagctgcccgaggaagaattgcccaagggcatggcatctggctgtgagttcggatcagtgtgcatcaatgtgatgctctatctaccgtggctcgttggtcagtgtcgtaaaaacggtgtggtgctgaagcgtggccaagtaaagcacgtgacagaagcctccaacatgtcccatactgggaagaaagcagatgtggttatcaacactacgggcttgatggcgtcaagacttggcggtgttatagaccaaaatgttacgcctatacgaggacaggtagtagtggtacgaaatgaggctcctttcatgttgaccaagtcaggaacagacgacgctgaggacgaagtatgctatgtaatgacgagagctgcaggtggaggtacagtcctcggtggtacctattccaaaggtcaatgggagagccagcctgatccaaaccaagccatgcgaatcatgcgtcgagtgtatgagatgatgccagaaataacaaaaaaccaaggcgtcaaagggttcgatgagaatgatctaacatggcagattgttcgtcatgccgtcggccttcgtccatatcgaaatggtggcgtcagaattgagaaagagaagattggagacacgtgggtagttcacaactatggtcactcaggttggggatatcaaggaagctatggatgtggagaagacgttgttaagctagtcggagaggttctgaatcgtgcaagactatga

SEQ ID NO: 28624 - protein, 391 aa, Muscodor strobelii
  misc_feature: SGI Peptide ID NO. 569819
  misc_feature (3)..(381): Pfam Id: PF01266 Pfam Desc: FAD dependent oxidoreductase
  misc_feature (148)..(381): Pfam Id: PF01266 Pfam Desc: FAD dependent oxidoreductase
  misc_feature (3)..(37): Pfam Id: PF01266 Pfam Desc: FAD dependent oxidoreductase
  misc_feature (3)..(385): NCBI GI: 46136273 Blast Desc: FG09652.1 [Gibberella zeae PH-1]
  misc_feature (4)..(390): NCBI GI: 256727376 Blast Desc: [Nectria haematococca mpVI 77-13-4]
  misc_feature (4)..(390): NCBI GI: 129302 Blast Desc: OXDA_FUSSO RecName: Full=D-amino-acid oxidase; Short=DAMOX; Short=DAAO; Short=DAO gi|217923|dbj|BAA00692.1| D-amino acid oxidase [Nectria haematococca]
  misc_feature (1)..(390): NCBI GI: 170940110 Blast Desc: protein product [Podospora anserina]
  misc_feature (1)..(386): NCBI GI: 156049637 Blast Desc: SS1G_08525 [Sclerotinia sclerotiorum 1980] gi|154692924|gb|EDN92662.1| SS1G_08525 [Sclerotinia sclerotiorum 1980]
  misc_feature (1)..(384): NCBI GI: 145611999 Blast Desc: MGG_08011 [Magnaporthe grisea 70-15] gi|145019245|gb|EDK03473.1| MGG_08011 [Magnaporthe grisea 70-15]
  misc_feature (1)..(391): NCBI GI: 85106862 Blast Desc: D-amino-acid oxidase [Neurospora crassa OR74A] gi|12802361|gb|AAK07844.1|AF309689_6 D-amino acid oxidase G6G8.6 [Neurospora crassa] gi|28923866|gb|EAA33029.1| D-amino-acid
  misc_feature (1)..(390): NCBI GI: 116195078 Blast Desc: CHGG_04137 [Chaetomium globosum CBS 148.51] gi|88180050|gb|EAQ87518.1| CHGG_04137 [Chaetomium globosum CBS 148.51]
  misc_feature (4)..(388): NCBI GI: 145228745 Blast Desc: An01g02430 [Aspergillus niger] gi|134054773|emb|CAK43613.1| protein product [Aspergillus niger]
  misc_feature (3)..(391): NCBI GI: 169775315 Blast Desc: [Aspergillus oryzae RIB40] gi|238496055|ref|XP_002379263.1| D-amino acid oxidase [Aspergillus flavus NRRL3357] gi|83769988|dbj|BAE60123.1| protein
  misc_feature (4)..(390): SWISSPROT Homolog: EC 1.4.3.3 D-amino-acid oxidase
  misc_feature: Useful for introducing or modulating the production of volatile compounds
MPNIVVIGAGVSGLTSAYLLSKQESNTITIIAKHMPGDYDIEYASPMVCGKTDAMLCRRERSAVSFEEALDLNQSSDQERMATEERSSWERRTWKELRRLAVDVPEAGIHLQKSRVYRREKDLDKLRKGGYSFDGLFMENPWFKSLFEDFRELPEEELPKGMASGCEFGSVCINVMLYLPWLVGQCRKNGVVLKRGQVKHVTEASNMSHTGKKADVVINTTGLMASRLGGVIDQNVTPIRGQVVVVRNEAPFMLTKSGTDDAEDEVCYVMTRAAGGGTVLGGTYSKGQWESQPDPNQAMRIMRRVYEMMPEITKNQGVKGFDENDLTWQIVRHAVGLRPYRNGGVRIEKEKIGDTWVVHNYGHSGWGYQGSYGCGEDVVKLVGEVLNRARL

SEQ ID NO: 28625 - DNA, 788 bp, Muscodor strobelii; identical to SEQ ID NO: 28619
  misc_feature: SGI EST ID NO. CUFF.67413.0
  misc_feature: Variant of the nucleotide sequence at SEQ ID NO 28623

SEQ ID NO: 28626 - DNA, 26787 bp, Muscodor strobelii
  misc_feature: SGI cDNA ID NO. 569820
  misc_feature: Encodes the peptide sequence at SEQ ID NO 28627
atggcaccacacgctgagactaacgatggagcaatccacaactcgccctcaccaaatggctcttacacttccacgagagtcaatgggcggcgcgcaaatggccaaaggccatcaaacccaggtgctacacaggcattcgacgcctgtgtacacgatatggtccaaaagagagcctattcccagcccaaggcagctgcagtctgtgcctgggacggtgacctcacctacgaggagcttgaccaactttcatcatcactcgccgcacgcctagtgcggcagggagtttccccagagacatatgttccaatcttctcagagaagtccgtatgggtcccgatagcgatgctcgcagtgttgaaggcaggcggagcctttgtactgctggatgcatcccacccaacctcccgactggaggagatttgccagacagttgacgcaagggtcattgtgacttcgaagcaactggttgaaaaagccggaacccttgcgcccaacgtcgtcgctgctaccgatgtcctccggagcagggactcacccgccctgaacgatgtaggtgtgcaccccggaaatgctgtgtacgccgtgttcacctcgggcacgtccggaaaacccaagggcgtcaccattgagcaccgcgcattctgcagcagcgcactgccacatgccggtgctctgaagatgaacaatggctcccgtgtgctgcaattcgcatcattcgcttttgatgcttgcattacagagattctgacggcactggtcgtcggcgcatgcgtgtgtattccgtcggacgaaggacgcacacatgacttggcagacgagtgtcgccgattgcagcccaattggactattctcacaccgtctgtgacgaggatcatcgacgccggcgagttccccacgcttcgcacgatggtgctcggcggcgaagcgatccacgccgacgacgtgaagaagtgggcgccacacttggatctgttcgtcgcgtacggcgtcagcgaagctgctgttgtcaacacagcgcggcgcgcctcacttagcgacgtcgatcacagcaatatcggctttggagtgggtgttacgtgttggatcgtggaccctgaagaccatgaccgtttgttggagacagctggccaggtcggagagttgctcctggacgggccgactgtcggtcggagttacatcaacgatgaagaacgcacggccgaggtcttcatcaacccgcccaagtggcatcctgaattcacttcttcgcgatcaatatcgaaactctacaagaccggcgacttggtttcccgcagcaccaaagacggttccattcgctatgttgcacgcaaggatgaccaggttaaataccatggtcaacgcctcgaagtcgatgaggttgaacaccacctccgacgcgtgctcccgggcattcggggtcttgttgtcgacgcgatcaaggtcgatggcaccgaaactctggcagctttcgtccttcccaagctggacgacgcggttcgaaattccctcaacgagggattcctcgaacccagcgatgattttcgagaggccgcccggtctgctcagcaggagctatcgggctcgctacctaaatggatgatcccatcggcattcttgcctctcaaatccatgccactaagaccgagtggaaaaagcgatcgtaaaattctacgcacaatggctgctgaattgacgcgttcccagcttcaatcatacgcgtcgtctcagtccttgccttctgagaaacgacaacctgcgactaccagcgaacaggtggtccaccgaatctgggctgatgttctgcgtctctcgccctcggatattggcctggatgatagcttcttcgacctcggcggagattctgtctctgctatgaagctagcgggcgcggctcgacgagagggactgaccctccctgtgcgtctcatttatgagaaccacaccctgacggacatggcgtcttgcattaagacgagccaaaaaggagctgtccaggcacccagcccattctctctgctccctgtatcagagaaccgcgaatcatgtatcgctactgccgtgcaacagtgcgagctccacgacagagcaactattgaggatatgtatccgtgcacaccgcttcaagagggactcatgtctctgactatgaagagtcctggtgcctattctgttttgttcgagtaccaactgcccgccgatctcgatgtcgcccggttcaagaacgcctggaccgctgttatagcagcgaacccgattcttagaacgcgaatcgtacaggtcaatggcgttctctatcaagtcgtgatgcgcgactcgttggagtgggaatctgtaccagccggaaagtcagatggggataactggactctgggtcgtgcactcgcccggctttctcttcgtcaagagtctggctccaacgtcctaacctttgcccttcaccacgcattgagtgatggatgggctctccccttagtcttgcagcaagtccagaaattctacgagggctctaagctatcgccacatccattcagcccattcatcgactatatcgtcaagagccggcctgaatccaaggagttttggccaacaagcttcaaagatctggaggctgctgcatttccagctctaccatctgcttcctacatccccaacgcgacctcgaggagaagactcgagattcctgtttcgcctcgcggaacctacgagttcaacgtgcccaaccgactgaaactcgcctggagcattttaatctcactctacacagataatcctgacaccctctttggaacaactgtgtccggccgtggtgtttcagtgctcggtattgaggagatgactgggccgacgatcgccacagttccttgccgtctcaacatttcctccactactagtgttgccgacgcccttcggattgttcagcagcagtccattgacgctattccattcgagcaagctggtcttcaacacatcagccgactggggccggaagctgcagcagcttgctgcttccagagtttgctggtgatccaaccagaatcttctgcttcaccagagctattcaggaatgccaaagatctcgcgactctggatgcctttagcacatacgccatcactctcatctgccgacagacctcttcgtcggtcgaggtggacgccacctttgatcacgaagtcatagaagaaacgcagtttagtcgaatgcttaatctgtggcgccacatcttcggacagctcatttcggacaagcaagatgtccagctcagcgaaattgacacgacaagtgtcgaagattggtctgagcttaagcagtggaaccgtacactgcctgcccctatcgaggcttgtgctcatgacttgattcgagagcaatcagatgcacgcccaaacgcccctgctgtatgcgcttgggatggtgctttcagttatggcgaactggacgtgctttcatctagcctagcgtcctacctcatgcggcaaggcgtcggtcctgaggttttcgttccactgtgctttgaaaagtctcgctggactactgtggccatgcttggtgttttgaaagcgggaggagcctttgtgcttctcgatccgtcccatccgcctcagcggctgcgaggaatttgccgggatgctaaggcacccttgatgatcagctctgaacgacactcgcaaatggctcgaggctttggaccaaagacgattgtgatgggcgacgattggaagcctacagacaaggcagactcgaagtcgacaattccgaacccctcagtgtcacctgcgagttcaatttatgccgtcttcacctcgggctcgactggagcgccaaagggcgccctccactcccacacttcctggtgcacaagtgctgttgcgaaccgcattggcctctatttggagccttcgtccagggtcttccaattcgctgcctacgcattcgatatcagtatcgccgacaacttgctcacccttattgctggtggatgtatctgtgtaccatccgaacaaggcattcaaggaggcagcctgatcgagtctattagagatcttggagcaaactgggcgtgtatcaccccttcagtagcccgcattatcgatcccaagaagacgtcagagctgaaaacgcttgtgctttgcggcgaaccgattgcaagcgaggtcatctcgctctgggcacctcatgcgcacttactgaacctgtacggtcccgcggagtgtgcgattttgaccactctgcaccgcaatgttcgcgaccatcaggatccaaacaatatcgctttccctacaagcgctgtgtgctgggtcgtcgatgcgaacaacgagaaaagactagctcctgttggcacagttggcgaattgttcgtcgaaagccccattgtagggtttgggtatctcaataaccccgagcgcacggcagccgcattcgtatcaaaggagagctacccgtcctggttgaccggctttcgcggtgggaatgagtctcgactctatcgtactggagacctcgtccaatatgccaaagacggctcgctacggtacgtcagccgtaaagatacccagatcaagctacgtggccaacgaatcgaacttggcgaggtagaataccatctgcgccaatgttttcccgaggcagatgaggccgtggttgaggtcatcacccataaagggacagggcgctcggctctgactgcgtttgtcataccaaagcagacgatgttcaagatgtcggacgagcgcttcagagtgctcgcggctgaagcagcggataagcttcaagccttagtacccgtctacatggtcccaacagcttttgtgcctgtcaaccgtctcccatatagcaagtctggcaagctcgatcgcaagctacttcgaagcatggcagcagagatgccggtggatgagtacagtaacaaggccccagcagcaccggcgaaagcatcgcccgtttcgaaggatgaggagatccttcagaaactatttgctgaagctttgaaagtcggcgtcgaagaagttacccccaacgataatttcttccgcttgggtggcgactccatcctggctatgaacttggtcgcctccgccaaagagcacggcctgaccttcagtaccgctgatgttttcaaacactccaccggtgcttcgctggcgaaggttgcccagaagtataccaatggcgtcgaacatcggactgtgcccatgtctctgcttgacgctgatgtcaacccggaagtggtgaggaaagatgtggttagccagtgcaaagttgacgaacgctcattcgaggatgtttatccctgtacgccactccaagaaggtctgatggcgctggctgcgaagtcgcctggcatgtacattgctcggttcaagtacgaggtccccttgaccacggatcttgatcggttccaggctgcgtggtcagccgtggccgatgccaaccccattcttcgcactcgcatcgttcagattgagaacaagggcatcttccaagttgttctgaagccagccccgacatttcaacttcatgactccttggacggccaactccggtattcggagtcccaagtcatggacttgggctcgcccttggttcatctgtctctcgcgcctctatctgacagtgatgatggccaccagttcatgctgaccatccaccactctctgtatgatgggtggtcgatgccattactttggcagcaggttcaagaggcgtatcgaggagaagagctgatgagccgggctttcagtcccttcgtccgccacatcaaagagatcaaggggggcgaagagttctggcgacgccagtttagcgatatgaatgcagcagcattcccgtccctcccttacgttgactacactcccaatgccaagcagtcgtttactcattcgatcacagcccctgaggcacagatgggcgaatacactctctcgaccatgatacagttatcgtgggcgatggtactctcccattataccgggtcggaagatgtcatctttgggctaacttcaaacggccgtgctgcagcgatggacaacatcgctgatatcaccggcccaaccatcgccaccgtcccagtgcgtgtatccttggccgcagatcagacagtcactggttcgctgtcatccctacagaaacagacaattgcgacaatcccttttctacaccacgggttgcacaacattcgtaagctcagtgccaacgcagctcttgcctgtgatttccaatcgcagctggtaatccagccggccgacatcacggcagaattagacctaggcggcttggcatcacctgagcaagaagactttcacggctacgagggttttgctagctatgcgtttgtgatgttcgcgcatttgcaacaagactccaacgacctggaaatctctgtcaatttcgaccccaacgttctagatgaaagcgaggcacgcagattggtagagcagttcaattctgtgttgaaccagctctccgcgaaacagaacgagcagatcgcggatctggaagtcatcagcacggaagacatgtttcagctggagagctggaacagccaacttcctcccgccgtacctgatacactgcacgaccttgtcatccgccatagcgtgacgcacccgcagcgcgaagcggtatctgcctgggatggccagctgactttcggggaattggataaatggtctgctcgactggctgcccacctactcagccagggtgtgaagaatgaggctagaattgcggtgctactcgagaagtcaaggtggtccatcgtggccttgctggctgctcttcgcgctggctgcgcgtgtgtcctggtcgaccctgggcacccccttcgccgcatgcaagacattgttggcaggactcaaccagctcttatcgtcgcttcagaaacgcatatcgacctagctcgtgagctttcgacgaacaaggttgtcagtatttcgggcaaattcatgcaaaacctgccaccgctcacgtctcgactccctgttgtgggctcacgacagccagcaatcattctctttacctctggcagtactggaactcccaagggtatcatcatggaacatgtgaatttgagcacaagcattgttcatcatgccccgagcatggaggtcaaagctagctcacgatccttgcacttcgcctcctacgcgttcgatgtcagcatttacgaaatcttcaacacgctcacatttgggggctgcctatgtgtcccatccgaacacgatcgactgaacagattggcggaatttatccgcgatcagcaagtcaattgggctctactaaccccttctacccttagcctattccaacctcacgaagtcccctccatgaagacacttgtgctctgtggcgaagccgtcacgcgcgatcctgttgacaagtggggtgacaaggtaagtctgattaacgcatatggcccagcggagggaacgttctgcactgcaggccctatccatacagacaggcctgggaccattggtcgtatgacaggtagtgtcggttggatcacggactctacgaacactaacaaactagccgctatcggagccatcggtgaactcatcatcgaaggccctatcgttacaaggggctatctcaacgaacctgaaaggacagctgcttcatttatccggcctccagtatggctgaagaacttccgatcgaatcgcacatctggtcggctctataagaccggcgatctagtgcagtacaattcggatggtaccattcgctttgttggacgaaaggacacccaggttaagctgcgtggacaacgaattgagctgggggaggttgagtatcacgtcaagagctgcttcacaggtgctacggatgccattgccgatgttatcaagcctacggctgaaggtaaagcgccgttcctggttgcttttatctggtcagatcggtatgaagcagattcaaccagtgaggatgagtctctcttcctcggaccaagcgacaccttccgcaaactttcacaaaaagcaatgcgcgaattgtccgcctctattccttcgtacatggtgcccgagctgctgctgcccttgcgaagactgcccctgactcggagcggcaaagtcgaccgtcgtcaactgcgggaagcccttggccatctctcctctgacaatatgcagtcctattcagctgtagcaacaactacgaaacggtcgcccacaaatgagactgagcgaatcctacaaggtgtatgggcccgagtacttaacaccgatgctgactcaattggtattgatgataacttcttccgcctcggaggagactccatcaatgcaatgcaagtcgttgcgcaatgcgtcactgctggcttgaaaacgtctgtagccactttgttccagggcaagacaatcgcccagatgagtctcaagaccaaacagatgcagcagcgactatcatttggtgttgaacggctaaacaagcacttcgcgttatccccagcgcagcagatgttcttcagctcagctggacaggagtacaatcacttcaatcagagcgtcgcattccgcccttccattcccgtcacgagcgacaagattgaacaggctatgcgctgggtcgtccgaaatcattccatgctacgcgcccgattcattcagacttccgctggactttgggaacaggtgattcccgacgatggtgccgataagtacactttcatcgagtccaaggtaccgggcattgccgaggcgagacagttagtcgaaggggaccagaaaagcctcgatgtcgaacacggccctgtgttcatatgtcgtatactcaatatcggacgtgctggtgacttttacgtctccctcactgctcaccatcttgtcattgacatagtatcctggaagattttactttcggacatcgaacaattgcttgttggcggcactgaaccgcctgagccggatctttcattccagatctggactcgactgcaggccggctacgccacaaagcatctgcaccccgccaaggttcttagagaataccaagtatctgacatgtctggatactggggaatcaataaggtcgacaatacctggggcaatgctatcgaagccgggttttcgatgaccgagagcgagacgcaagccctacttggcagtgccaataacgcttacggaacgaacccggccgaagttgtacatgcagcacttctccaggccttcgtgcaaacattccgcgatagagccgctcctgtccttcacagcgagggacacggccgagaaccgtgggattcttccatcgacctcacccgaacagttggttggttcacaacaatgtggcctgctgaagttcccgtgggcactacggatgacatcctcgagatcgtgaggaagacaaaggatgcccgccgtggcgtcgaccgtaatgggtgggcgcacttcacctcccgctatcttcaccccgaggccatcgccaagtcacagagtcagggtcctctcgaaattctatttaattatgatcccggtttctctggtgattccaaatctgtcctgcagccgtgctcgctactggagggtgagcttgctcaaatgtccccgaggctgtcgcgatttgccctcgtggatgttctagcagagatcaaagattcccggttctcagtcaacttcatcttcaatcgaggcatgcgacatcaagaagcctcgatacctgattgggttaccaaaaccaaggaatgcttacagtctgccatacctgttctctcacagcatgaacgaaccgttactgcttccgatttcgcgttgttgaaatacacgtacgcagaagcagacgagttcaataagacgaccattgctacgctcaagacatgctctctagaaatcgaagacgcatatccctgctcttcgattcaagaaggcatgatcctcagtcaagccaaggtctctggccagtatgtcaaccggtggttttggtccgtaaagtcgcacggggactcgtcattgaacgtcgagaatttgaggaatgcctggagccaagttttacagaagcatcctttgttacgaacggtaatctacgataagcccgaccgaagcggtcgccacgatcagctggtcctcaagagagctggaacagaactgtgcgaaattctgcagacaagcgatgccccactcgcccatcttgagaaccaccaattcaaaatgtcccccttaagtcctccccatcggcttgccatttgctctgctgcgtcgggtgaggtcgcttgcttgttagaaatcaaccacacggtggttgacggtatatcaagacagctcttcctccgggatctgcgtcttgcgtatgacggcaagctgcaaccaggccagtcgcatgcgtacagggactacgttgaatacctccaaacgctttcccctagcaaggccatgacacactgggagaaatacctccagtcggtcgaaccatgcattcttccgtcgtcgcctccccgggcattgccacatgacgccaatagcgcgaaacaggttgtgggcgtcaagttgccgttctacgaaaagctacgagacttctgtgcgcagaacgaactgacaatggcaaatgccttccaactggcttgggctcttgttctcagactctatatcaacgcgaactcggcatgcttcggttacatggcatccggccgagatatgcctatccccgatattgacaacaccgtgggcccgttcatcaacatgcttatatgccatctcgatctcgacagtgaacagtctgcgttggatgtactcaagcgcaaccagactgatttcgttcagaacctggctcatcagcatctctctatggcggacaagatgaaggcagcaagatcagccgacagcacactcttcaacacggtgatgtctgtccagaaagaaattgaagagacggatagtgattgcaatcttcagtttgaggacttttctggcgaagatcccaacgagtatgatttcgtcgtcaatattggcgttttagagtctggcgtcgagatctcctgggagtactccaggacatatatgtctgaagagcaagtcggaaacatcgcagacgcctttgaacaagctctatcgagcattattgctgacccgcaggaaaagatcggcaacatcagcttgttcggtactcttagcaccagtcgtgtctttcaatacaatgagcttgatgcgccatcggtcgatgagtatgttgatgtactcatcgagcagcgctgtctctcacggccttctgccaaggcggtgaacgcttgggacggcgatttcacatacggtgcagtcaatgaactgtcatcacgcgtggccggggagcttgttcgccgaggcgtaaagcctaatcaatacgtgccacttgttttcgaaagatcacgctggaccgcaatcgccctcctcggagcgctgaaagccggagctgcattcatgcttctggacccctctcacccccctgagcgacttcatgatatctgccaagacgccggtgcgagtgtggttctcacatctgagacccagaaggagctgtcgacgcgcctagctaaggaagtcatcattatcgaccaacgagtatcgagctgggaggctcattctccatctgcggtcaaacagacacgaagtctcgacgatgccgtattcgttgtctttaccagtggatcgacggggaagccgaaaggtgtcgtgattgagcacagagctctggcgacaagcgctatagctcatggcaaggccctctacatggacattaactcccgagtgctccaattcgcttcctacgcctttgatgtggctgtcatggagcatgtcacgacgatgcttatgggaggttgcatctgcgtgccgtctggtacgcagcggcatgatattgcgaagtctgccgccgccttcgaagtcaattgggcctttctcacaccttcagtggccagagtgatggacccatccgaattccccacgttacgaactcttgtctctggcggcgagtcaatcactgccaaggaacttggagcctggcgctctcacgtcaacttcttcttggcttatggcccctcggagtgctctatcatgtgttccacacagctggtcacgaaggagatcaacgacagccgcaaccttggtcactgtttcggtagcagtggctgggtggtaagcgccaacgatccaaaccagcttctccccattggggctgtcggcgagttgatactcgaaggacccatcgttggtcgcgggtatctgcatgatcccgagaagacagcggcggcctggattgagcctcccgaatggttgctcaagttccgaggcaagtccaccggccgcgtgtacaagagcggtgaccttgtacgatacatcgacaatggcgaattccagtttgtcgcccgcaaggacttccaggttaaattgcgtgggcagcgtatcgagctcggcgaagtcgaaactaatctccacgcctctttccgcggagctggagatgccatagtcgatatcgtgactccagtgggcgacggtcgtcagcccatgcttgtggccttcgtctgctggaatgccaacaaggatgagaaggagttacttcgcaagcccgaccgggagttttcgctccgcgcacagtctgctgagacacagatgtccaagtcgcttcccatctacatggttcctgtggtctatctcccactgtcgcatatgcccttgaccggcaatggaaaactagatcgcaagaaactccgcgccatagcggagcgcctgacgccggaggagctggaacagtacaactcgtccgccgtacctaatgaaatgcccacttcggaggcagagacactgctacagaaagtatggagccgcgttctgaacaaggacgtagcctcaatcggcattcataacaacttcttccgactcggaggcgattccatcagcgccatgcaggtgacgtcccaatgcagcgcccttggtgtcagtgtcacagttgccgatatcttccgttataaaacaatatctcaactcgctacggtggtccagagatccaaggctgttgaacacccaaccgaggtggttgacaacccgtttgagctctcgcctatccagaatgtctacttcgaagcagcacctcttggcaaccatcacttcaaccagagttgcttcctccgccttaatcgcaacgtctcttccaagtcgctcaaggctgctatacaccgcatcgtcgagctgcactccatgctcagggccaggtactcgtgcgatgaggatggcaattggacgcagaccattgtgaaggatgctgagcacagctatttctaccagaactactgcgttcctgaccttgcttccgcccaggatcttatctcggtcaatgaaaaaatcattgatattaagaagggtcccatcttggccgccagtctatttctcgttgacgggtttgaacagtacctgtttattgcagcgcatcatctcgtaaccgacttggtgtcatggcgaattattcttggtgatcttgaagaacacctcctgaacgggaagatctctcgcaacgtgccgttgtcattccagtcctggttgactctgcagaaagaatatgctgttgataaccttgatcccgcgctaatcagggatgagatgccaacacctccgcaagactactggggaatagagggccattccaacttggtcaaagacacgatgcaagccagcttttctctcgacgagaacagcactaccaatctgttcgaatctgccaaccaagctttccaaacgcagcccgtcgagctgcttcaggctgcgctcgttcactcatttgcccagaccttcaaagacagacctccacccgcagtgtggaacgaaggacatggtcgcgagccttggacctccagcatcgacctcagcggaacggtcggttggttcactaccatgtggccgatgttcgtatctgcagagggtaccaacgtattggatgtcattcggcgggtcaaagacacacgccgatcgataccaagcaacggatgggcgcactttgcgtcttcgcttcatccgaacgcacaaaagtcaaacgacgtgaaggaagtaacgttcaacttctttggtcgataccaacagctcgaacgtgctgatgccctgtttcaatcatgtgaaaagccgaagggctgcttgtccgatgtttctgatgagttgggccgattctcagtgatcgatgtggtggccgagatggttgacaaacgtcttcgctttggattccacttcaatcatctcgcggctaccaaccgaccagtcctagaatggatcacaaactgcgagacatctctccttgacatcgcagcgaggttgccagatctcaaccggtctctgacacttacggacttcccgcttgtatcgttcacctatgagtctttggacgtcttcaaggatcgatgcgttactgaacatggtattcccgcagacaacattgaagacgtttacccctgttcaccgattcaacgaggcataattctctcccaagctaagtctccggaacactaccaaaccctcgtggtctggaagattcatgccaatgatgccgcggtagtcgatatttcacgagtccaggcagcctgggccaacatcgtctcgcggcatacaatcttcaggaccatgttcgtgaagagcccgagcagtgaagacttcatggagcaagtagtccttgcagacgtacctgctgccatcaccgtacttccatcggacgcagaggagaaactgcttcgtaagctcgagagtgggcgaaacatgtcccttgataagagtgcacttccctataaggtgactctgggtcaaacgaatgctggggatgtcttgttcggtctcgaaatcagtcacgccctcttcgatggcaccacgaggcaaaatctacaacacgagctcatggaggcttacatagactcggcaacgatgcagaccccgggccctgcttatcgcgaatacatctcctacctcagcggccaatcctctgccgcagaaaagaaagagtattggacaaagtatctcaacggggtcgttccctgtcatttcccagctatgactaccgtcaatgccaagcccaccagggagactctgggatcaattcaaatcgatatgggagacgccgcagcaatccgtcgtttctgcgaggtacacgaagccacactctcaaacgtgttccaggtcgcttggggaatggttctgaagtcgtacatcaacttggaagctgtctgcttcggttacctttcggctggccgcgatgtacccgttccacaagttcaagaagcaatgggcccttacatcaacatgctcgtctgccgtatggatctcgccaactcggaatctttgacgaaggtactccaggataaccaaaataccttcgtcgagagtctgaggcatcaacactaccctctgactgatattgtgcgtgccgcgcaattgccaggcggtggctcccttttcaacacggtcatgtctctccagaatgttcgtcaagattctgaagaggagaaacgtcctattggcctagacgtgatcgggggtcaagacccctctgaatacgacatgacagtacacattgtcgttgggcctcagcgcattgatgtggccttggagtactggcattctttcattaccgatgagatggccacaagtatagcggactcgttccgtcacattctccatgaggtgatcagtcgggccgacccctccgttggcagtctctcagtaattggggttcccagcagcaacatcttacacaactggagcggaaagctgctcgaaaccgagcatcggctcgttcacgaaatgatacaccagcgatgcgtcgcccagcccaatgctactgcggtcgagtcttgggatggaagcttcacttattgtgaggttgatgatctcagttctgagttggctctgcatctggcacagtatgatgttggaccggacacgttcattcctgtatgcttcgaaaagtcgcgatggactaccgtcgttatgctggccatcatcaagaccgggtccgccttcattctcctcgacccgtcccaacccgcgcagagacgcaaagagatctgcgagactgctcagtctaagttaattgtcacatcggagcagcaggcgcccgaggcttcgactttcgcagccgacgcagtgattgttggtgaccagcatcgatcctggtctggagacgcttccaagcctcttccgcttgcgtcgccggagaacattctttacgccgtatttaccagtggctcgaccggcaaacccaagggtgtcatgatcgaaaaccgagcctttgctaccagtgcccgcgagcacagcgtagccctgaccatcaccaggagttcccgggtcctacagtttgcatcatatgcctttgatgctagcatcgctgagaacctcaccacgcttttgatgggtggctgcatctgtgtcgtttccgataccgaacggaaagaatcccttgccaaggccgtcgcaaggatgcaggtcaactggatattcacaacaccgtccatggcccgtatcctgaatcccaaggacttcccatccgtcagaaccctgatttgcggtggtgagctcgtttctgataaagagctgaggatgtggagagacaatgtggacttgtatctggcctacggaccgactgaatgtgccatcttctgtggttctacggtacgtgtcacggctggactcgccggaaggaacattggcaagatgttcggctgtcgctcatgggttgttgacccgaatgaccacgagaagctagtccctgtgggtgccgtcggtgagctcatgctcgaaggtcccatagtggcgcgtggctatctcaatgagccggagaaaacggcatccgtgttcattcaacagcctggctggcttcaggcattcaaagacggaccatccaagctctacaagactggtgacttagtcaagtacaatgccgatggcactctacactacatctccagaaaagacactcaagtgaagcttcgtggccaacgcgtggaactcggagaagtcgagcatcgggtgcgacaatgttatccgactgcgactgatgctgttgtcgaattagtcgtctttgaagatggctctcgtcgacctctcctcgtcgcattcatctggaacgaggacaaatcagtcgccgagtcccaggcgatccttgcccagccctcgcctgaattccgtgcccaagcacagcaagccgaagcgagtctgaacgaacagctaccgagttacatggtcccgactctgtacctgcctcttcagcgtttgccattgagcactaatggtaaagccgaccgccgtctcttgcgacaatctgtcacgcttctctcgcaagaggaaacactcgcgtacagcgcgcctctggcagcgaaaagccaagcatctaccgacacggagcaaattttgcaatctgtatgggcgcgtgtcttgaatatcgcacccgagcaaattggcatggaagacaacttcttccgtcttggtggtgattccattagtgcgatgcagatcgtggcctcttgcgccagccaccagcttgatgttaagattgccgacctcttccgctacaagacgatttctgctattgcccaacgcaccacagcttccaaggcatctgtttacagcaccgaagccaagacaggcgtttcttttgcactttcgcccattcaacagatgttcttcgactcggcccgcgacggtgtcaatcacttcaatcaaagcttcttctttcgcatcaacactcctgtcgcatccaccgacctccttaaagcgattaacgcgctcgtggcgaggcatcatatgctcagagcgcgtttcagaaagaacgagagccaggaggggaagtcatgctgctgggagcaactgatactccctgaggttgaggggagtttccggttcgatgcccaccagatcatcttcctcgaggaaacaaaggatatcattgctgaagcccagacgtcgcttgatttcgtatctggtccggtattttccgtcgatctgatgaccacccgatcaggtgtgcaatacttgttcctcgtggcgcaccatcttgtcattgatcttgtttcgtggagaatcatcctcaaggatcttgaggatctcttttctcctggagccaccctacctcagcaatcaataccctttccaacctgggtgtcgctgcaagcaagatacgccgccaagttcttgacaccggagagtgcgataaccggcgatatccccccacccatgctagactactggggactatctgacaagagcaatctcgtcagagatgcgctggacaaagagttttcactcagcgaagagatgacgcaggctctccttgggcctgctaatgaagccttccagacgcagccggttgaactattccaggctgcactgctccattcattcatgcgcacctttgatgatcgcacagaagcgccgaccatcttcagtgaaggccacggacgagagccatgggactcgggcatcgacctcaccaacaccgtaggctggtttactaccatgtcgcctacgcacgttcaatcccacgacttgcttgatacagtacgcaggaccaaggatcagaggcgccaacttcgtaataatggatgggcttacttcgcatcccgttacctgaacgagaagggccgcgattctttgcgaatttccggtcctgcggaaattgtcttcaacttcactggcctgtatcagcagctcgagcggaaagagacgctcttttcaaccgttgagaacttccagcatggtgttctcgacatcgcagacgactctcctcgtttcgcaatcttcgatgtcaccgcaaccgtgttcaagaatcgcctccagttcagcttcttctacaaccgccatgctgatgataaacgtcccattagtaaatggattgccaactacgagaagtcgcttttggaacttgcttcgaacctttcgtcccattctcgtactgcgactcttatcgatttccctcgcatgtctctcgactacccaatgctcgactcgttggtggaggagatactgcctgcacacggcgtgtcttcaagtgaagtggaggatgtatatccttgctctcctatccagaacggcatgcttctcagtcagtccaaagcgacgctggtctatgacaatcgtttcatcttgaagatcagctcggcctcagagacaacggccatctccacgaccagtttcataacagcatggaatcaagtcatgaaacggcacccgatttttagaacattcttcattccgagtcaaggaagtgtgagctacatggaccaggtcgtcttgaagaacattcccgagcacatggttaccattctgcctctcagctccaatcctgaggagacactcgcgaaccgcgattcagtcacaccagcaaagggactgccccctctccacttaactctctgcagtgacgccgctactggcgaacttttctgtctgtttgaaatcaaccattctcttcttgatggcacatcgctgcaggtgttggtgagagatttacatcgcgcctacgacaaggctctgccaacctcgcccgcgctaatgtacagcgaatacgttgattacatccagtcgctctcgacggacgcagccaaggagtactggcagcaatatctacgcggcagtgatccgtgcttgttcccggcctccacaaacggcgagcaactcgttcggaagatgaaagcagctaccgccaagctagcagctagtagccagctcagcaagttctgtgaggcacatgcactaacgctatctaatgtcgtccaacttgcctggagtcttgtcttgcgagcttacactggttctgatgatgtttgctttggctacctcgtttctggacgagaaatcccgctcaagggcatcgaggacgcctgtggaccgttcatcaacatgctggtgtgccgatccaagttcgcagatgacgtctcagtgagccagcttctcgaaactacacagaaagactacttgaacaataccgagcatcagcatctttctctggcagagatcaagcgttccctcaatctgcctgatatcccgctcttcaatacaatcatatcccttcaaagagagggcatggctactcagtcgggcgatgcctcttccgtgcgtatcgagccactaaagggagaggatccaacggagtacgacatcactctcaacgtgtgggcaacagaaagtgatatcgaaattgccctacactattggaatacatcaatgagcgaatcccaggcctatgtcgtaatcgacactctggagaaggctctttcagagatcactagcaaagtcgcgcagcccctcggcgaccttgacctcttcggcgaccggagccgagcccagattctcaagtggaatgagaacgtgccagcgcgcgtcaacaggtgtgcccacgagctcattatggagcgaaacgcgcatcgtctcgaagccccagcaatttgcgcatgggacggagatttcacctacgccgaactggatgccaagtcgtcgcgattggctgcgcacttggtccagaactacaatgtcggtcccgagaccttcgttcccgtctacttcgagaaatccaaatggacctccgtcgctctcttgggtatcctgaaagctggcggcgcattcgtgcagatggatccatctcatccgatccagcggctgagggacatatgtcatgactcgaacgctccggtcgtcatcacatcctcagcaaaagccactgtcgcctctgagctaggccgcagtgtgcttgtcatcagcgatgaccaatttggctgggcacgagatgacgagtctttccagtctactaccgtgaccccagacaaccctatatgtgagtatcaacctgatcagccaacaatcaatgccgttttcacatcgggttccactggcaagcccaagggtgctgtcatgtcgcacgcttcgtggtgcacgagtgctgaagcaaaccgcatagggcttttcctgaacaacgaatcaagagtcctacagttcgcttcttatgcttttgacattagtatcgcagatatgctgctgaccctgcttgctggaggttgcatctgtgtaccttcggatgaagaccgtcactccaatttgattggcgccgtcgctgctctccaagccaactgggtgtgctggacaccgtcagtcactcgaatcatcgaccccgccacggtggccacactcaagacaatggttctctgcggagagcccattgcacctggcgatatcgccaagtggaaacctcacgttcatcttctcaacttgtatggaccagctgaatgtgccatcctgaccacgctcaaccgctacgtggaaaatgagaaagaccccaacaatgtcggtctaccgacaagtgcagtaacctggctcgctgaccctcaaaaccacgagaggctggtaccaatcggcaccatcggtgaactggttgttgaaagccctattgtgggccgcgagtacatgggagagcctgccaaaacgaaggcctccttcctcgagtaccctccttggctacgcgagattcgtggccccagcgcccatggacgtttatatcgcactggtgacttgcttcaatatttggacgatgggtccatgcgatacgtcggccgcaaggatacacaagtcaagctccgcggtcaacgtgtggaactgggagaggtcgaataccacttgcgccaaaagttccccggcgccagtgatgttctcgccgaggtcatcaaagcaacaggcgacgacagaccccctgtgcttatggcattcgtgcatgtcaagtcagatcttgaacccgaagaggactcagaaatctttggagcacccgacgaccttttcaagaaagctgtggtaactacaacctcgcagctcgatggcgtcttgcccgttttcatggttcccaccatcttcatcccgctcgtccgattgcccctcacaaagacgggcaaaacggatcgccgtgcggtgagaattgccgctgccaatctcactcgggggcagatcggcttctacacctcaatgaatgccgtcaagaggatgcctaccacccaggctgagaaacagttccagcgcctctttgccgatgtctttagcctcccagctagggacattggtatggatgaccacttcttccgcttgggaggcgattctatcgtcgcaatgacactcattccgaaggctcgtgaagccggttactcgatccatatggcggacgttttcaaccaccccaagctttgcgaccttgctaccgcttccaagcatggcgatgctgcagtcttagtagacgtcgagccattctcactcattggcacccagactaacaaagatgagcttgttctgtctgctgcacaacagtgccaaatctcgaacgaagaggtcgaagacatttacccttgtacaccactacaggagggtctcgtcgcactggtggcgaagcgaccgggtcactacatcgcaaccttcgattatgacttgacggatactattgatatcgacaagtttacaactgcttggggcgaaaccgtggctaccaacactatcctgcgcactcgtgtcattcagtccgaatcggcaggcttcttccaggtcgtcgtccgagagcccattacgtgggatatgtttgatgacgaggatgcttatgcggcccacactaagaccatgttgatgggaatgggagacaagttggtacactttgctctcattaaaccagatggtgtctcacgaaaggccttcaaattccatcttacgctgcatcactcgctatacgatggatcttcactacccaggctttggggccaggtggaagctgcgtataacggcctggctctgtcgccgcgacccttcaatcggttcatcgaatatgttctggcagcagagggcgccggcgacttctggaagactgaattccagggtctcaatgctccggttttccctgccttgccatcgtctcgctacatcccggacccaagcgcatcgctcgagtacgtcatggcaaacgtcgatatcaaatcagccgattatactgcatccacagctattcaattagcctgggctgttatcatgtcttgttacactgactccgaggatgttctctacggactgactgtcaacggacggagtgcccctctcgacggcattgaggacatgactggtccaacatttgctactttccctgtgcgtacccaggtgcctcagcagggattggtacgtgacattctggaaacccttcagaagaagaccgtcaggatgatgccataccaacagtttggtatgcaaaacatgcgtcaactaagccgcgaggcagcttcagcctgcgacttccaatgccaacttgccattcaggcacctggcagcccatcgtccagtgcgctcctctccaatgcgagcacgaagcatgcagactacggcgcattcgctaactatgcgttcgtccttgtctgccatcttccagccattggcgagagcgacatcattgtcaccgccaactatgacaagagcatcatcgagcctgtcgaggccgaaagaatggtccgacaattcgagcatgtgctccgtcagctgcagctatcgcaggtccaagagtcaatgaaagtggcagatatcaatcttgtcagcccggcagatcgacagcagctaaccaaatggaaccctaccattccaccttcctacgacgaatgtctgcatgatcttgtgcttcgtcatgcacaggatcgccctactgcacaagccatctccgcatgggacggcgacatgaccttccaggagctccagtcggcatctgccgttctcgcccagcaacttcagtctcgaggtatcacagccggtgcgttagtaccactgttattcgatagatcgagatgggtcatcgtgaccatgacggcccttcatcgtatcggagcggcttgtgtcaacatcgatcccacccatcctaagggccgtattcaagagatattggatcgcacaaaggccagattcattctcactagtcccaatcatgcggattctgcggtattccccgatacgactcgcatctcagtacccatgtccggagaccaaccccgggcgagcgagttctcagcgcctcgtgtcagccccgatgatgccgccttcatcatctttacttcgggtagcactggcaaacctaagggcattgttatggaacacagacatcttgctaccagtatccgaggctacactagcggagcttatatgaccaaagatactcgtgggctacacttcgcatcgtatgcctttgacgccagcatttacgagatctttggtatcctcttgaacggtggatgcatatgcattccttccgaatttgatcgcatcaacgatgttgtcccctttgttaaccgagttggcgtgaactgggccttgctaacaccctcctttatggctcttctcgaacccgatagcataccctctgtccgcaccattgttcttggtggtgaggctatctcgcaggagaatgtgcgcacctgggcttccagagcaactctggttacggcctatggtcctgctgaagctaccatctgcgcaattgggccactgcccgagactggttggaagcaaggcactcttggcaacgtgacgggcggtgttggatgggttacgatgccatcagaccccagccgtcttgctcccatcggcgttccaggtgaattggtacttgagggtgccgtagtcacccggggttatctccatgaccccgaaaagacagccgcagcctacatcaccggcccatcatggctttcctcgttccgacagagctgtcccagctcgagggtctactatagcggtgatctcgtcatgtacaatgtagatgggacgatccgctacctgggtcgtcgagacacacaagtcaaactccgcggtcaaagaatcgaactgggtgaagtggaacatcaggtccggcacgcattcctcaacgtcaccgacgtggtggccgaagtcgtgactccgcagaatggtcaacctactctcattgcctttgtcgccaacgctcccagccagagcggtgatcgactgtttgagcccccgagcgatgatttcctcctccaggtcgaggcggcgatccgaaaacttggtagcgtcattcctagctatatgatgccgtcggtcttccttcaactatccgacattcccagaacgagcagcgacaaggccaatcgacgcatgttaagagaagcagccgccgccttgacgcctgatcaaattcaagcttattcgggcagccaaggttccaaacgccaaccagagacagatcaagagaggcttttgcagtttctctgggcccagaccttcaagatgaaggcagaggacatcggtgcagatgacgacttcttccgcatcggtggagactcgatcgtgggaatgcgacttgcaggcattgctcgccgtcaaggtttacacattccagtgtctcacatcttccgctaccctatcttgtcggagcaggctgctgcgatgacaacgcttgaatcagccacctcggctgaccaataccgcccgggatccctcgtgggcgtgaacaatctgacaaccttcttcgatcgacatctctccactcaagtcgggccaccatacgagtcacaagacgtggaagacattctccctaccacagagttgcagtgttctctcattcgcggcaacaatgtgacgttcagccgtcttcacctaggcaacgcaaacatcgaccgaaggcagcttgaagcagctctctatgctctgcttaagaaacacgccatcctgcgatcggtctttgtgtcactccgtgatgttattttgcaagtgattttgcgcagagtatcgttcaacctaatcacgttgggctgcgaagaggatctttggaactactcggagaagctgtgcacgcaactctccgactctccggtcccgctaggctcgctgcatttccaacctttcctcgtgtctcgatctgacacggagcacatgctcatcatccgaatgacgcatgctcaatacgacggtgtctcgttcccgctgatttccaatgatctcacatcagcctacaatggagcgcaactgactgataccggctcctttgctgattatctgcgataccgtctcagccaccgcaagtcgggcgaggcgcacaagttctggaaagagtatctcaacggcgccgagatgacggacagccaagccctctgcagacgctcaaccccaactactgacaaggaattcctcgtcaaaccgctgcgcgacatccctctgcccgtcgcgcccgagggcatcacccttgctactctagtcaaggctgcttgggctgttacgctagcacgagccacgggaagccaagacgtcgtcttcggccatattgtcaatggccgcgacgcacccttgcgcaacgtcgacaccatctcaggtccctgcatcaccatctcacccttccgcgtgactatgcaaggtagcaacaagctaaaggtgctggacctcttgaagcacgtgcaatcacagtacacccagagcatgccgcactcgaacatggacttccgagacataatgaagagtgcgaccacctggaagcccgatacggactttggcagcgtcctcacccaccaagatggcaacatcgatctcagcgggtctgtcggcaacgacgagacgaccaatgcagacggtcagatgaccgccgcggcgacctcgcagtggaagacgatgaacatgggcatccagccacatttccacgtcgtcacgtaccctgtcgcgacagaagagaagctcctcgttcagtttgccgtgtcgagccatcgcttgcatcccagagatgccgttctcgcgattgacgcattctgtcgtgctatgaaggagctgtctggcaatccacaaggatttgtggagttgtaa

SEQ ID NO: 28627 - protein, 8928 aa, Muscodor strobelii
  misc_feature: SGI Peptide ID NO. 569820
  misc_feature (7890)..(8288): Pfam Id: PF00501 Pfam Desc: AMP-binding enzyme
  misc_feature (2215)..(2613): Pfam Id: PF00501 Pfam Desc: AMP-binding enzyme
  misc_feature (5268)..(5666): Pfam Id: PF00501 Pfam Desc: AMP-binding enzyme
  misc_feature (6799)..(7211): Pfam Id: PF00501 Pfam Desc: AMP-binding enzyme
  misc_feature (3745)..(4144): Pfam Id: PF00501 Pfam Desc: AMP-binding enzyme
  misc_feature (1141)..(1547): Pfam Id: PF00501 Pfam Desc: AMP-binding enzyme
  misc_feature (75)..(476): Pfam Id: PF00501 Pfam Desc: AMP-binding enzyme
  misc_feature (6328)..(6618): Pfam Id: PF00668 Pfam Desc: Condensation domain
  misc_feature (3276)..(3566): Pfam Id: PF00668 Pfam Desc: Condensation domain
  misc_feature (1758)..(2028): Pfam Id: PF00668 Pfam Desc: Condensation domain
  misc_feature (2809)..(3103): Pfam Id: PF00668 Pfam Desc: Condensation domain
  misc_feature (698)..(960): Pfam Id: PF00668 Pfam Desc: Condensation domain
  misc_feature (4794)..(5087): Pfam Id: PF00668 Pfam Desc: Condensation domain
  misc_feature (4333)..(4625): Pfam Id: PF00668 Pfam Desc: Condensation domain
  misc_feature (5858)..(6157): Pfam Id: PF00668 Pfam Desc: Condensation domain
  misc_feature (7431)..(7702): Pfam Id: PF00668 Pfam Desc: Condensation domain
  misc_feature (8506)..(8782): Pfam Id: PF00668 Pfam Desc: Condensation domain
  misc_feature (591)..(656): Pfam Id: PF00550 Pfam Desc: Phosphopantetheine attachment site
  misc_feature (4255)..(4320): Pfam Id: PF00550 Pfam Desc: Phosphopantetheine attachment site
  misc_feature (5779)..(5844): Pfam Id: PF00550 Pfam Desc: Phosphopantetheine attachment site
  misc_feature (2730)..(2795): Pfam Id: PF00550 Pfam Desc: Phosphopantetheine attachment site
  misc_feature (1652)..(1717): Pfam Id: PF00550 Pfam Desc: Phosphopantetheine attachment site
  misc_feature (8397)..(8462): Pfam Id: PF00550 Pfam Desc: Phosphopantetheine attachment site
  misc_feature (7325)..(7390): Pfam Id: PF00550 Pfam Desc: Phosphopantetheine attachment site
  misc_feature (3387)..(3566): Pfam Id: PF00668 Pfam Desc: Condensation domain
  misc_feature (2809)..(2972): Pfam Id: PF00668 Pfam Desc: Condensation domain
  misc_feature (1758)..(1942): Pfam Id: PF00668 Pfam Desc: Condensation domain
  misc_feature (5858)..(6039): Pfam Id: PF00668 Pfam Desc: Condensation domain
  misc_feature (4333)..(4507): Pfam Id: PF00668 Pfam Desc: Condensation domain
  misc_feature (698)..(768): Pfam Id: PF00668 Pfam Desc: Condensation domain
  misc_feature (1972)..(2028): Pfam Id: PF00668 Pfam Desc: Condensation domain
  misc_feature (7431)..(7628): Pfam Id: PF00668 Pfam Desc: Condensation domain
  misc_feature (912)..(960): Pfam Id: PF00668 Pfam Desc: Condensation domain
  misc_feature (8724)..(8782): Pfam Id: PF00668 Pfam Desc: Condensation domain
  misc_feature (8615)..(8689): Pfam Id: PF00668 Pfam Desc: Condensation domain
  misc_feature (3023)..(3103): Pfam Id: PF00668 Pfam Desc: Condensation domain
  misc_feature (7646)..(7702): Pfam Id: PF00668 Pfam Desc: Condensation domain
  misc_feature (4539)..(4625): Pfam Id: PF00668 Pfam Desc: Condensation domain
  misc_feature (799)..(875): Pfam Id: PF00668 Pfam Desc: Condensation domain
  misc_feature (3276)..(3339): Pfam Id: PF00668 Pfam Desc: Condensation domain
  misc_feature (7325)..(7381): Pfam Id: PF00550 Pfam Desc: Phosphopantetheine attachment site
  misc_feature (1256)..(7709): NCBI GI: 116204347 Blast Desc: CHGG_10057 [Chaetomium globosum CBS 148.51] gi|88176185|gb|EAQ83653.1| CHGG_10057 [Chaetomium globosum CBS 148.51]
  misc_feature (6960)..(8572): NCBI GI: 116204347 Blast Desc: CHGG_10057 [Chaetomium globosum CBS 148.51] gi|88176185|gb|EAQ83653.1| CHGG_10057 [Chaetomium globosum CBS 148.51]
  misc_feature (185)..(1724): NCBI GI: 116204347 Blast Desc: CHGG_10057 [Chaetomium globosum CBS 148.51] gi|88176185|gb|EAQ83653.1| CHGG_10057 [Chaetomium globosum CBS 148.51]
  misc_feature (6059)..(7593): NCBI GI: 116204347 Blast Desc: CHGG_10057 [Chaetomium globosum CBS 148.51] gi|88176185|gb|EAQ83653.1| CHGG_10057 [Chaetomium globosum CBS 148.51]
  misc_feature (4535)..(5836): NCBI GI: 116204347 Blast Desc: CHGG_10057 [Chaetomium globosum CBS 148.51] gi|88176185|gb|EAQ83653.1| CHGG_10057 [Chaetomium globosum CBS 148.51]
  misc_feature (1751)..(8823): NCBI GI: 46138059 Blast Desc: FG10544.1 [Gibberella zeae PH-1]
  misc_feature (1085)..(7398): NCBI GI: 46138059 Blast Desc: FG10544.1 [Gibberella zeae PH-1]
  misc_feature (3269)..(7505): NCBI GI: 46138059 Blast Desc: FG10544.1 [Gibberella zeae PH-1]
  misc_feature (668)..(2963): NCBI GI: 46138059 Blast Desc: FG10544.1 [Gibberella zeae PH-1]
  misc_feature (38)..(2041): NCBI GI: 46138059 Blast Desc: FG10544.1 [Gibberella zeae PH-1]
  misc_feature (44)..(4325): SWISSPROT Homolog: EC 5.1.1.3 Glutamate racemase
MAPHAETNDGAIHNSPSPNGSYTSTRVNGRRANGQRPSNPGATQAFDACVHDMVQKRAYSQPKAAAVCAWDGDLTYEELDQLSSSLAARLVRQGVSPETYVPIFSEKSVWVPIAMLAVLKAGGAFVLLDASHPTSRLEEICQTVDARVIVTSKQLVEKAGTLAPNVVAATDVLRSRDSPALNDVGVHPGNAVYAVFTSGTSGKPKGVTIEHRAFCSSALPHAGALKMNNGSRVLQFASFAFDACITEILTALVVGACVCIPSDEGRTHDLADECRRLQPNWTILTPSVTRIIDAGEFPTLRTMVLGGEAIHADDVKKWAPHLDLFVAYGVSEAAVVNTARRASLSDVDHSNIGFGVGVTCWIVDPEDHDRLLETAGQVGELLLDGPTVGRSYINDEERTAEVFINPPKWHPEFTSSRSISKLYKTGDLVSRSTKDGSIRYVARKDDQVKYHGQRLEVDEVEHHLRRVLPGIRGLVVDAIKVDGTETLAAFVLPKLDDAVRNSLNEGFLEPSDDFREAARSAQQELSGSLPKWMIPSAFLPLKSMPLRPSGKSDRKILRTMAAELTRSQLQSYASSQSLPSEKRQPATTSEQVVHRIWADVLRLSPSDIGLDDSFFDLGGDSVSAMKLAGAARREGLTLPVRLIYENHTLTDMASCIKTSQKGAVQAPSPFSLLPVSENRESCIATAVQQCELHDRATIEDMYPCTPLQEGLMSLTMKSPGAYSVLFEYQLPADLDVARFKNAWTAVIAANPILRTRIVQVNGVLYQVVMRDSLEWESVPAGKSDGDNWTLGRALARLSLRQESGSNVLTFALHHALSDGWALPLVLQQVQKFYEGSKLSPHPFSPFIDYIVKSRPESKEFWPTSFKDLEAAAFPALPSASYIPNATSRRRLEIPVSPRGTYEFNVPNRLKLAWSILISLYTDNPDTLFGTTVSGRGVSVLGIEEMTGPTIATVPCRLNISSTTSVADALRIVQQQSIDAIPFEQAGLQHISRLGPEAAAACCFQSLLVIQPESSASPELFRNAKDLATLDAFSTYAITLICRQTSSSVEVDATFDHEVIEETQFSRMLNLWRHIFGQLISDKQDVQLSEIDTTSVEDWSELKQWNRTLPAPIEACAHDLIREQSDARPNAPAVCAWDGAFSYGELDVLSSSLASYLMRQGVGPEVFVPLCFEKSRWTTVAMLGVLKAGGAFVLLDPSHPPQRLRGICRDAKAPLMISSERHSQMARGFGPKTIVMGDDWKPTDKADSKSTIPNPSVSPASSIYAVFTSGSTGAPKGALHSHTSWCTSAVANRIGLYLEPSSRVFQFAAYAFDISIADNLLTLIAGGCICVPSEQGIQGGSLIESIRDLGANWACITPSVARIIDPKKTSELKTLVLCGEPIASEVISLWAPHAHLLNLYGPAECAILTTLHRNVRDHQDPNNIAFPTSAVCWVVDANNEKRLAPVGTVGELFVESPIVGFGYLNNPERTAAAFVSKESYPSWLTGFRGGNESRLYRTGDLVQYAKDGSLRYVSRKDTQIKLRGQRIELGEVEYHLRQCFPEADEAVVEVITHKGTGRSALTAFVIPKQTMFKMSDERFRVLAAEAADKLQALVPVYMVPTAFVPVNRLPYSKSGKLDRKLLRSMAAEMPVDEYSNKAPAAPAKASPVSKDEEILQKLFAEALKVGVEEVTPNDNFFRLGGDSILAMNLVASAKEHGLTFSTADVFKHSTGASLAKVAQKYTNGVEHRTVPMSLLDADVNPEVVRKDVVSQCKVDERSFEDVYPCTPLQEGLMALAAKSPGMYIARFKYEVPLTTDLDRFQAAWSAVADANPILRTRIVQIENKGIFQVVLKPAPTFQLHDSLDGQLRYSESQVMDLGSPLVHLSLAPLSDSDDGHQFMLTIHHSLYDGWSMPLLWQQVQEAYRGEELMSRAFSPFVRHIKEIKGGEEFWRRQFSDMNAAAFPSLPYVDYTPNAKQSFTHSITAPEAQMGEYTLSTMIQLSWAMVLSHYTGSEDVIFGLTSNGRAAAMDNIADITGPTIATVPVRVSLAADQTVTGSLSSLQKQTIATIPFLHHGLHNIRKLSANAALACDFQSQLVIQPADITAELDLGGLASPEQEDFHGYEGFASYAFVMFAHLQQDSNDLEISVNFDPNVLDESEARRLVEQFNSVLNQLSAKQNEQIADLEVISTEDMFQLESWNSQLPPAVPDTLHDLVIRHSVTHPQREAVSAWDGQLTFGELDKWSARLAAHLLSQGVKNEARIAVLLEKSRWSIVALLAALRAGCACVLVDPGHPLRRMQDIVGRTQPALIVASETHIDLARELSTNKVVSISGKFMQNLPPLTSRLPVVGSRQPAIILFTSGSTGTPKGIIMEHVNLSTSIVHHAPSMEVKASSRSLHFASYAFDVSIYEIFNTLTFGGCLCVPSEHDRLNRLAEFIRDQQVNWALLTPSTLSLFQPHEVPSMKTLVLCGEAVTRDPVDKWGDKVSLINAYGPAEGTFCTAGPIHTDRPGTIGRMTGSVGWITDSTNTNKLAAIGAIGELIIEGPIVTRGYLNEPERTAASFIRPPVWLKNFRSNRTSGRLYKTGDLVQYNSDGTIRFVGRKDTQVKLRGQRIELGEVEYHVKSCFTGATDAIADVIKPTAEGKAPFLVAFIWSDRYEADSTSEDESLFLGPSDTFRKLSQKAMRELSASIPSYMVPELLLPLRRLPLTRSGKVDRRQLREALGHLSSDNMQSYSAVATTTKRSPTNETERILQGVWARVLNTDADSIGIDDNFFRLGGDSINAMQVVAQCVTAGLKTSVATLFQGKTIAQMSLKTKQMQQRLSFGVERLNKHFALSPAQQMFFSSAGQEYNHFNQSVAFRPSIPVTSDKIEQAMRWVVRNHSMLRARFIQTSAGLWEQVIPDDGADKYTFIESKVPGIAEARQLVEGDQKSLDVEHGPVFICRILNIGRAGDFYVSLTAHHLVIDIVSWKILLSDIEQLLVGGTEPPEPDLSFQIWTRLQAGYATKHLHPAKVLREYQVSDMSGYWGINKVDNTWGNAIEAGFSMTESETQALLGSANNAYGTNPAEVVHAALLQAFVQTFRDRAAPVLHSEGHGREPWDSSIDLTRTVGWFTTMWPAEVPVGTTDDILEIVRKTKDARRGVDRNGWAHFTSRYLHPEAIAKSQSQGPLEILFNYDPGFSGDSKSVLQPCSLLEGELAQMSPRLSRFALVDVLAEIKDSRFSVNFIFNRGMRHQEASIPDWVTKTKECLQSAIPVLSQHERTVTASDFALLKYTYAEADEFNKTTIATLKTCSLEIEDAYPCSSIQEGMILSQAKVSGQYVNRWFWSVKSHGDSSLNVENLRNAWSQVLQKHPLLRTVIYDKPDRSGRHDQLVLKRAGTELCEILQTSDAPLAHLENHQFKMSPLSPPHRLAICSAASGEVACLLEINHTVVDGISRQLFLRDLRLAYDGKLQPGQSHAYRDYVEYLQTLSPSKAMTHWEKYLQSVEPCILPSSPPRALPHDANSAKQVVGVKLPFYEKLRDFCAQNELTMANAFQLAWALVLRLYINANSACFGYMASGRDMPIPDIDNTVGPFINMLICHLDLDSEQSALDVLKRNQTDFVQNLAHQHLSMADKMKAARSADSTLFNTVMSVQKEIEETDSDCNLQFEDFSGEDPNEYDFVVNIGVLESGVEISWEYSRTYMSEEQVGNIADAFEQALSSIIADPQEKIGNISLFGTLSTSRVFQYNELDAPSVDEYVDVLIEQRCLSRPSAKAVNAWDGDFTYGAVNELSSRVAGELVRRGVKPNQYVPLVFERSRWTAIALLGALKAGAAFMLLDPSHPPERLHDICQDAGASVVLTSETQKELSTRLAKEVIIIDQRVSSWEAHSPSAVKQTRSLDDAVFVVFTSGSTGKPKGVVIEHRALATSAIAHGKALYMDINSRVLQFASYAFDVAVMEHVTTMLMGGCICVPSGTQRHDIAKSAAAFEVNWAFLTPSVARVMDPSEFPTLRTLVSGGESITAKELGAWRSHVNFFLAYGPSECSIMCSTQLVTKEINDSRNLGHCFGSSGWVVSANDPNQLLPIGAVGELILEGPIVGRGYLHDPEKTAAAWIEPPEWLLKFRGKSTGRVYKSGDLVRYIDNGEFQFVARKDFQVKLRGQRIELGEVETNLHASFRGAGDAIVDIVTPVGDGRQPMLVAFVCWNANKDEKELLRKPDREFSLRAQSAETQMSKSLPIYMVPVVYLPLSHMPLTGNGKLDRKKLRAIAERLTPEELEQYNSSAVPNEMPTSEAETLLQKVWSRVLNKDVASIGIHNNFFRLGGDSISAMQVTSQCSALGVSVTVADIFRYKTISQLATVVQRSKAVEHPTEVVDNPFELSPIQNVYFEAAPLGNHHFNQSCFLRLNRNVSSKSLKAAIHRIVELHSMLRARYSCDEDGNWTQTIVKDAEHSYFYQNYCVPDLASAQDLISVNEKIIDIKKGPILAASLFLVDGFEQYLFIAAHHLVTDLVSWRIILGDLEEHLLNGKISRNVPLSFQSWLTLQKEYAVDNLDPALIRDEMPTPPQDYWGIEGHSNLVKDTMQASFSLDENSTTNLFESANQAFQTQPVELLQAALVHSFAQTFKDRPPPAVWNEGHGREPWTSSIDLSGTVGWFTTMWPMFVSAEGTNVLDVIRRVKDTRRSIPSNGWAHFASSLHPNAQKSNDVKEVTFNFFGRYQQLERADALFQSCEKPKGCLSDVSDELGRFSVIDVVAEMVDKRLRFGFHFNHLAATNRPVLEWITNCETSLLDIAARLPDLNRSLTLTDFPLVSFTYESLDVFKDRCVTEHGIPADNIEDVYPCSPIQRGIILSQAKSPEHYQTLVVWKIHANDAAVVDISRVQAAWANIVSRHTIFRTMFVKSPSSEDFMEQVVLADVPAAITVLPSDAEEKLLRKLESGRNMSLDKSALPYKVTLGQTNAGDVLFGLEISHALFDGTTRQNLQHELMEAYIDSATMQTPGPAYREYISYLSGQSSAAEKKEYWTKYLNGVVPCHFPAMTTVNAKPTRETLGSIQIDMGDAAAIRRFCEVHEATLSNVFQVAWGMVLKSYINLEAVCFGYLSAGRDVPVPQVQEAMGPYINMLVCRMDLANSESLTKVLQDNQNTFVESLRHQHYPLTDIVRAAQLPGGGSLFNTVMSLQNVRQDSEEEKRPIGLDVIGGQDPSEYDMTVHIVVGPQRIDVALEYWHSFITDEMATSIADSFRHILHEVISRADPSVGSLSVIGVPSSNILHNWSGKLLETEHRLVHEMIHQRCVAQPNATAVESWDGSFTYCEVDDLSSELALHLAQYDVGPDTFIPVCFEKSRWTTVVMLAIIKTGSAFILLDPSQPAQRRKEICETAQSKLIVTSEQQAPEASTFAADAVIVGDQHRSWSGDASKPLPLASPENILYAVFTSGSTGKPKGVMIENRAFATSAREHSVALTITRSSRVLQFASYAFDASIAENLTTLLMGGCICVVSDTERKESLAKAVARMQVNWIFTTPSMARILNPKDFPSVRTLICGGELVSDKELRMWRDNVDLYLAYGPTECAIFCGSTVRVTAGLAGRNIGKMFGCRSWVVDPNDHEKLVPVGAVGELMLEGPIVARGYLNEPEKTASVFIQQPGWLQAFKDGPSKLYKTGDLVKYNADGTLHYISRKDTQVKLRGQRVELGEVEHRVRQCYPTATDAVVELVVFEDGSRRPLLVAFIWNEDKSVAESQAILAQPSPEFRAQAQQAEASLNEQLPSYMVPTLYLPLQRLPLSTNGKADRRLLRQSVTLLSQEETLAYSAPLAAKSQASTDTEQILQSVWARVLNIAPEQIGMEDNFFRLGGDSISAMQIVASCASHQLDVKIADLFRYKTISAIAQRTTASKASVYSTEAKTGVSFALSPIQQMFFDSARDGVNHFNQSFFFRINTPVASTDLLKAINALVARHHMLRARFRKNESQEGKSCCWEQLILPEVEGSFRFDAHQIIFLEETKDIIAEAQTSLDFVSGPVFSVDLMTTRSGVQYLFLVAHHLVIDLVSWRIILKDLEDLFSPGATLPQQSIPFPTWVSLQARYAAKFLTPESAITGDIPPPMLDYWGLSDKSNLVRDALDKEFSLSEEMTQALLGPANEAFQTQPVELFQAALLHSFMRTFDDRTEAPTIFSEGHGREPWDSGIDLTNTVGWFTTMSPTHVQSHDLLDTVRRTKDQRRQLRNNGWAYFASRYLNEKGRDSLRISGPAEIVFNFTGLYQQLERKETLFSTVENFQHGVLDIADDSPRFAIFDVTATVFKNRLQFSFFYNRHADDKRPISKWIANYEKSLLELASNLSSHSRTATLIDFPRMSLDYPMLDSLVEEILPAHGVSSSEVEDVYPCSPIQNGMLLSQSKATLVYDNRFILKISSASETTAISTTSFITAWNQVMKRHPIFRTFFIPSQGSVSYMDQVVLKNIPEHMVTILPLSSNPEETLANRDSVTPAKGLPPLHLTLCSDAATGELFCLFEINHSLLDGTSLQVLVRDLHRAYDKALPTSPALMYSEYVDYIQSLSTDAAKEYWQQYLRGSDPCLFPASTNGEQLVRKMKAATAKLAASSQLSKFCEAHALTLSNVVQLAWSLVLRAYTGSDDVCFGYLVSGREIPLKGIEDACGPFINMLVCRSKFADDVSVSQLLETTQKDYLNNTEHQHLSLAEIKRSLNLPDIPLFNTIISLQREGMATQSGDASSVRIEPLKGEDPTEYDITLNVWATESDIEIALHYWNTSMSESQAYVVIDTLEKALSEITSKVAQPLGDLDLFGDRSRAQILKWNENVPARVNRCAHELIMERNAHRLEAPAICAWDGDFTYAELDAKSSRLAAHLVQNYNVGPETFVPVYFEKSKWTSVALLGILKAGGAFVQMDPSHPIQRLRDICHDSNAPVVITSSAKATVASELGRSVLVISDDQFGWARDDESFQSTTVTPDNPICEYQPDQPTINAVFTSGSTGKPKGAVMSHASWCTSAEANRIGLFLNNESRVLQFASYAFDISIADMLLTLLAGGCICVPSDEDRHSNLIGAVAALQANWVCWTPSVTRIIDPATVATLKTMVLCGEPIAPGDIAKWKPHVHLLNLYGPAECAILTTLNRYVENEKDPNNVGLPTSAVTWLADPQNHERLVPIGTIGELVVESPIVGREYMGEPAKTKASFLEYPPWLREIRGPSAHGRLYRTGDLLQYLDDGSMRYVGRKDTQVKLRGQRVELGEVEYHLRQKFPGASDVLAEVIKATGDDRPPVLMAFVHVKSDLEPEEDSEIFGAPDDLFKKAVVTTTSQLDGVLPVFMVPTIFIPLVRLPLTKTGKTDRRAVRIAAANLTRGQIGFYTSMNAVKRMPTTQAEKQFQRLFADVFSLPARDIGMDDHFFRLGGDSIVAMTLIPKAREAGYSIHMADVFNHPKLCDLATASKHGDAAVLVDVEPFSLIGTQTNKDELVLSAAQQCQISNEEVEDIYPCTPLQEGLVALVAKRPGHYIATFDYDLTDTIDIDKFTTAWGETVATNTILRTRVIQSESAGFFQVVVREPITWDMFDDEDAYAAHTKTMLMGMGDKLVHFALIKPDGVSRKAFKFHLTLHHSLYDGSSLPRLWGQVEAAYNGLALSPRPFNRFIEYVLAAEGAGDFWKTEFQGLNAPVFPALPSSRYIPDPSASLEYVMANVDIKSADYTASTAIQLAWAVIMSCYTDSEDVLYGLTVNGRSAPLDGIEDMTGPTFATFPVRTQVPQQGLVRDILETLQKKTVRMMPYQQFGMQNMRQLSREAASACDFQCQLAIQAPGSPSSSALLSNASTKHADYGAFANYAFVLVCHLPAIGESDIIVTANYDKSIIEPVEAERMVRQFEHVLRQLQLSQVQESMKVADINLVSPADRQQLTKWNPTIPPSYDECLHDLVLRHAQDRPTAQAISAWDGDMTFQELQSASAVLAQQLQSRGITAGALVPLLFDRSRWVIVTMTALHRIGAACVNIDPTHPKGRIQEILDRTKARFILTSPNHADSAVFPDTTRISVPMSGDQPRASEFSAPRVSPDDAAFIIFTSGSTGKPKGIVMEHRHLATSIRGYTSGAYMTKDTRGLHFASYAFDASIYEIFGILLNGGCICIPSEFDRINDVVPFVNRVGVNWALLTPSFMALLEPDSIPSVRTIVLGGEAISQENVRTWASRATLVTAYGPAEATICAIGPLPETGWKQGTLGNVTGGVGWVTMPSDPSRLAPIGVPGELVLEGAVVTRGYLHDPEKTAAAYITGPSWLSSFRQSCPSSRVYYSGDLVMYNVDGTIRYLGRRDTQVKLRGQRIELGEVEHQVRHAFLNVTDVVAEVVTPQNGQPTLIAFVANAPSQSGDRLFEPPSDDFLLQVEAAIRKLGSVIPSYMMPSVFLQLSDIPRTSSDKANRRMLREAAAALTPDQIQAYSGSQGSKRQPETDQERLLQFLWAQTFKMKAEDIGADDDFFRIGGDSIVGMRLAGIARRQGLHIPVSHIFRYPILSEQAAAMTTLESATSADQYRPGSLVGVNNLTTFFDRHLSTQVGPPYESQDVEDILPTTELQCSLIRGNNVTFSRLHLGNANIDRRQLEAALYALLKKHAILRSVFVSLRDVILQVILRRVSFNLITLGCEEDLWNYSEKLCTQLSDSPVPLGSLHFQPFLVSRSDTEHMLIIRMTHAQYDGVSFPLISNDLTSAYNGAQLTDTGSFADYLRYRLSHRKSGEAHKFWKEYLNGAEMTDSQALCRRSTPTTDKEFLVKPLRDIPLPVAPEGITLATLVKAAWAVTLARATGSQDVVFGHIVNGRDAPLRNVDTISGPCITISPFRVTMQGSNKLKVLDLLKHVQSQYTQSMPHSNMDFRDIMKSATTWKPDTDFGSVLTHQDGNIDLSGSVGNDETTNADGQMTAAATSQWKTMNMGIQPHFHVVTYPVATEEKLLVQFAVSSHRLHPRDAVLAIDAFCRAMKELSGNPQGFVEL

SEQ ID NO: 28628 - DNA, 17934 bp, Muscodor strobelii
  misc_feature: SGI EST ID NO. CUFF.67456.0
  misc_feature: Variant of the nucleotide sequence at SEQ ID NO 28626
gtttcagtgctcggtattgaggagatgactgggccgacgatcgccacagttccttgccgtctcaacatttcctccactactagtgttgccgacgcccttcggattgttcagcagcagtccattgacgctattccattcgagcaagctggtcttcaacacatcagccgactggggccggaagctgcagcagcttgctgcttccagagtttgctggtgatccaaccagaatcttctgcttcaccagagctattcaggaatgccaaagatctcgcgactctggatgcctttagcacatacgccatcactctcatctgccgacagacctcttcgtcggtcgaggtggacgccacctttgatcacgaagtcatagaagaaacgcagtttagtcgaatgcttaatctgtggcgccacatcttcggacagctcatttcggacaagcaagatgtccagctcagcgaaattgacacgacaagtgtcgaagattggtctgagcttaagcagtggaaccgtacactgcctgcccctatcgaggcttgtgctcatgacttgattcgagagcaatcagatgcacgcccaaacgcccctgctgtatgcgcttgggatggtgctttcagttatggcgaactggacgtgctttcatctagcctagcgtcctacctcatgcggcaaggcgtcggtcctgaggttttcgttccactgtgctttgaaaagtctcgctggactactgtggccatgcttggtgttttgaaagcgggaggagcctttgtgcttctcgatccgtcccatccgcctcagcggctgcgaggaatttgccgggatgctaaggcacccttgatgatcagctctgaacgacactcgcaaatggctcgaggctttggaccaaagacgattgtgatgggcgacgattggaagcctacagacaaggcagactcgaagtcgacaattccgaacccctcagtgtcacctgcgagttcaatttatgccgtcttcacctcgggctcgactggagcgccaaagggcgccctccactcccacacttcctggtgcacaagtgctgttgcgaaccgcattggcctctatttggagccttcgtccagggtcttccaattcgctgcctacgcattcgatatcagtatcgccgacaacttgctcacccttattgctggtggatgtatctgtgtaccatccgaacaaggcattcaaggaggcagcctgatcgagtctattagagatcttggagcaaactgggcgtgtatcaccccttcagtagcccgcattatcgatcccaagaagacgtcagagctgaaaacgcttgtgctttgcggcgaaccgattgcaagcgaggtcatctcgctctgggcacctcatgcgcacttactgaacctgtacggtcccgcggagtgtgcgattttgaccactctgcaccgcaatgttcgcgaccatcaggatccaaacaatatcgctttccctacaagcgctgtgtgctgggtcgtcgatgcgaacaacgagaaaagactagctcctgttggcacagttggcgaattgttcgtcgaaagccccattgtagggtttgggtatctcaataaccccgagcgcacggcagccgcattcgtatcaaaggagagctacccgtcctggttgaccggctttcgcggtgggaatgagtctcgactctatcgtactggagacctcgtccaatatgccaaagacggctcgctacggtacgtcagccgtaaagatacccagatcaagctacgtggccaacgaatcgaacttggcgaggtagaataccatctgcgccaatgttttcccgaggcagatgaggccgtggttgaggtcatcacccataaagggacagggcgctcggctctgactgcgtttgtcataccaaagcagacgatgttcaagatgtcggacgagcgcttcagagtgctcgcggctgaagcagcggataagcttcaagccttagtacccgtctacatggtcccaacagcttttgtgcctgtcaaccgtctcccatatagcaagtctggcaagctcgatcgcaagctacttcgaagcatggcagcagagatgccggtggatgagtacagtaacaaggccccagcagcaccggcgaaagcatcgcccgtttcgaaggatgaggagatccttcagaaactatttgctgaagctttgaaagtcggcgtcgaagaagttacccccaacgataatttcttccgcttgggtggcgactccatcctggctatgaacttggtcgcctccgccaaagagcacggcctgaccttcagtaccgctgatgttttcaaacactccaccggtgcttcgctggcgaaggttgcccagaagtataccaatggcgtcgaacatcggactgtgcccatgtctctgcttgacgctgatgtcaacccggaagtggtgaggaaagatgtggttagccagtgcaaagttgacgaacgctcattcgaggatgtttatccctgtacgccactccaagaaggtctgatggcgctggctgcgaagtcgcctggcatgtacattgctcggttcaagtacgaggtccccttgaccacggatcttgatcggttccaggctgcgtggtcagccgtggccgatgccaaccccattcttcgcactcgcatcgttcagattgagaacaagggcatcttccaagttgttctgaagccagccccgacatttcaacttcatgactccttggacggccaactccggtattcggagtcccaagtcatggacttgggctcgcccttggttcatctgtctctcgcgcctctatctgacagtgatgatggccaccagttcatgctgaccatccaccactctctgtatgatgggtggtcgatgccattactttggcagcaggttcaagaggcgtatcgaggagaagagctgatgagccgggctttcagtcccttcgtccgccacatcaaagagatcaaggggggcgaagagttctggcgacgccagtttagcgatatgaatgcagcagcattcccgtccctcccttacgttgactacactcccaatgccaagcagtcgtttactcattcgatcacagcccctgaggcacagatgggcgaatacactctctcgaccatgatacagttatcgtgggcgatggtactctcccattataccgggtcggaagatgtcatctttgggctaacttcaaacggccgtgctgcagcgatggacaacatcgctgatatcaccggcccaaccatcgccaccgtcccagtgcgtgtatccttggccgcagatcagacagtcactggttcgctgtcatccctacagaaacagacaattgcgacaatcccttttctacaccacgggttgcacaacattcgtaagctcagtgccaacgcagctcttgcctgtgatttccaatcgcagctggtaatccagccggccgacatcacggcagaattagacctaggcggcttggcatcacctgagcaagaagactttcacggctacgagggttttgctagctatgcgtttgtgatgttcgcgcatttgcaacaagactccaacgacctggaaatctctgtcaatttcgaccccaacgttctagatgaaagcgaggcacgcagattggtagagcagttcaattctgtgttgaaccagctctccgcgaaacagaacgagcagatcgcggatctggaagtcatcagcacggaagacatgtttcagctggagagctggaacagccaacttcctcccgccgtacctgatacactgcacgaccttgtcatccgccatagcgtgacgcacccgcagcgcgaagcggtatctgcctgggatggccagctgactttcggggaattggataaatggtctgctcgactggctgcccacctactcagccagggtgtgaagaatgaggctagaattgcggtgctactcgagaagtcaaggtggtccatcgtggccttgctggctgctcttcgcgctggctgcgcgtgtgtcctggtcgaccctgggcacccccttcgccgcatgcaagacattgttggcaggactcaaccagctcttatcgtcgcttcagaaacgcatatcgacctagctcgtgagctttcgacgaacaaggttgtcagtatttcgggcaaattcatgcaaaacctgccaccgctcacgtctcgactccctgttgtgggctcacgacagccagcaatcattctctttacctctggcagtactggaactcccaagggtatcatcatggaacatgtgaatttgagcacaagcattgttcatcatgccccgagcatggaggtcaaagctagctcacgatccttgcacttcgcctcctacgcgttcgatgtcagcatttacgaaatcttcaacacgctcacatttgggggctgcctatgtgtcccatccgaacacgatcgactgaacagattggcggaatttatccgcgatcagcaagtcaattgggctctactaaccccttctacccttagcctattccaacctcacgaagtcccctccatgaagacacttgtgctctgtggcgaagccgtcacgcgcgatcctgttgacaagtggggtgacaaggtaagtctgattaacgcatatggcccagcggagggaacgttctgcactgcaggccctatccatacagacaggcctgggaccattggtcgtatgacaggtagtgtcggttggatcacggactctacgaacactaacaaactagccgctatcggagccatcggtgaactcatcatcgaaggccctatcgttacaaggggctatctcaacgaacctgaaaggacagctgcttcatttatccggcctccagtatggctgaagaacttccgatcgaatcgcacatctggtcggctctataagaccggcgatctagtgcagtacaattcggatggtaccattcgctttgttggacgaaaggacacccaggttaagctgcgtggacaacgaattgagctgggggaggttgagtatcacgtcaagagctgcttcacaggtgctacggatgccattgccgatgttatcaagcctacggctgaaggtaaagcgccgttcctggttgcttttatctggtcagatcggtatgaagcagattcaaccagtgaggatgagtctctcttcctcggaccaagcgacaccttccgcaaactttcacaaaaagcaatgcgcgaattgtccgcctctattccttcgtacatggtgcccgagctgctgctgcccttgcgaagactgcccctgactcggagcggcaaagtcgaccgtcgtcaactgcgggaagcccttggccatctctcctctgacaatatgcagtcctattcagctgtagcaacaactacgaaacggtcgcccacaaatgagactgagcgaatcctacaaggtgtatgggcccgagtacttaacaccgatgctgactcaattggtattgatgataacttcttccgcctcggaggagactccatcaatgcaatgcaagtcgttgcgcaatgcgtcactgctggcttgaaaacgtctgtagccactttgttccagggcaagacaatcgcccagatgagtctcaagaccaaacagatgcagcagcgactatcatttggtgttgaacggctaaacaagcacttcgcgttatccccagcgcagcagatgttcttcagctcagctggacaggagtacaatcacttcaatcagagcgtcgcattccgcccttccattcccgtcacgagcgacaagattgaacaggctatgcgctgggtcgtccgaaatcattccatgctacgcgcccgattcattcagacttccgctggactttgggaacaggtgattcccgacgatggtgccgataagtacactttcatcgagtccaaggtaccgggcattgccgaggcgagacagttagtcgaaggggaccagaaaagcctcgatgtcgaacacggccctgtgttcatatgtcgtatactcaatatcggacgtgctggtgacttttacgtctccctcactgctcaccatcttgtcattgacatagtatcctggaagattttactttcggacatcgaacaattgcttgttggcggcactgaaccgcctgagccggatctttcattccagatctggactcgactgcaggccggctacgccacaaagcatctgcaccccgccaaggttcttagagaataccaagtatctgacatgtctggatactggggaatcaataaggtcgacaatacctggggcaatgctatcgaagccgggttttcgatgaccgagagcgagacgcaagccctacttggcagtgccaataacgcttacggaacgaacccggccgaagttgtacatgcagcacttctccaggccttcgtgcaaacattccgcgatagagccgctcctgtccttcacagcgagggacacggccgagaaccgtgggattcttccatcgacctcacccgaacagttggttggttcacaacaatgtggcctgctgaagttcccgtgggcactacggatgacatcctcgagatcgtgaggaagacaaaggatgcccgccgtggcgtcgaccgtaatgggtgggcgcacttcacctcccgctatcttcaccccgaggccatcgccaagtcacagagtcagggtcctctcgaaattctatttaattatgatcccggtttctctggtgattccaaatctgtcctgcagccgtgctcgctactggagggtgagcttgctcaaatgtccccgaggctgtcgcgatttgccctcgtggatgttctagcagagatcaaagattcccggttctcagtcaacttcatcttcaatcgaggcatgcgacatcaagaagcctcgatacctgattgggttaccaaaaccaaggaatgcttacagtctgccatacctgttctctcacagcatgaacgaaccgttactgcttccgatttcgcgttgttgaaatacacgtacgcagaagcagacgagttcaataagacgaccattgctacgctcaagacatgctctctagaaatcgaagacgcatatccctgctcttcgattcaagaaggcatgatcctcagtcaagccaaggtctctggccagtatgtcaaccggtggttttggtccgtaaagtcgcacggggactcgtcattgaacgtcgagaatttgaggaatgcctggagccaagttttacagaagcatcctttgttacgaacggtaatctacgataagcccgaccgaagcggtcgccacgatcagctggtcctcaagagagctggaacagaactgtgcgaaattctgcagacaagcgatgccccactcgcccatcttgagaaccaccaattcaaaatgtcccccttaagtcctccccatcggcttgccatttgctctgctgcgtcgggtgaggtcgcttgcttgttagaaatcaaccacacggtggttgacggtatatcaagacagctcttcctccgggatctgcgtcttgcgtatgacggcaagctgcaaccaggccagtcgcatgcgtacagggactacgttgaatacctccaaacgctttcccctagcaaggccatgacacactgggagaaatacctccagtcggtcgaaccatgcattcttccgtcgtcgcctccccgggcattgccacatgacgccaatagcgcgaaacaggttgtgggcgtcaagttgccgttctacgaaaagctacgagacttctgtgcgcagaacgaactgacaatggcaaatgccttccaactggcttgggctcttgttctcagactctatatcaacgcgaactcggcatgcttcggttacatggcatccggccgagatatgcctatccccgatattgacaacaccgtgggcccgttcatcaacatgcttatatgccatctcgatctcgacagtgaacagtctgcgttggatgtactcaagcgcaaccagactgatttcgttcagaacctggctcatcagcatctctctatggcggacaagatgaaggcagcaagatcagccgacagcacactcttcaacacggtgatgtctgtccagaaagaaattgaagagacggatagtgattgcaatcttcagtttgaggacttttctggcgaagatcccaacgagtatgatttcgtcgtcaatattggcgttttagagtctggcgtcgagatctcctgggagtactccaggacatatatgtctgaagagcaagtcggaaacatcgcagacgcctttgaacaagctctatcgagcattattgctgacccgcaggaaaagatcggcaacatcagcttgttcggtactcttagcaccagtcgtgtctttcaatacaatgagcttgatgcgccatcggtcgatgagtatgttgatgtactcatcgagcagcgctgtctctcacggccttctgccaaggcggtgaacgcttgggacggcgatttcacatacggtgcagtcaatgaactgtcatcacgcgtggccggggagcttgttcgccgaggcgtaaagcctaatcaatacgtgccacttgttttcgaaagatcacgctggaccgcaatcgccctcctcggagcgctgaaagccggagctgcattcatgcttctggacccctctcacccccctgagcgacttcatgatatctgccaagacgccggtgcgagtgtggttctcacatctgagacccagaaggagctgtcgacgcgcctagctaaggaagtcatcattatcgaccaacgagtatcgagctgggaggctcattctccatctgcggtcaaacagacacgaagtctcgacgatgccgtattcgttgtctttaccagtggatcgacggggaagccgaaaggtgtcgtgattgagcacagagctctggcgacaagcgctatagctcatggcaaggccctctacatggacattaactcccgagtgctccaattcgcttcctacgcctttgatgtggctgtcatggagcatgtcacgacgatgcttatgggaggttgcatctgcgtgccgtctggtacgcagcggcatgatattgcgaagtctgccgccgccttcgaagtcaattgggcctttctcacaccttcagtggccagagtgatggacccatccgaattccccacgttacgaactcttgtctctggcggcgagtcaatcactgccaaggaacttggagcctggcgctctcacgtcaacttcttcttggcttatggcccctcggagtgctctatcatgtgttccacacagctggtcacgaaggagatcaacgacagccgcaaccttggtcactgtttcggtagcagtggctgggtggtaagcgccaacgatccaaaccagcttctccccattggggctgtcggcgagttgatactcgaaggacccatcgttggtcgcgggtatctgcatgatcccgagaagacagcggcggcctggattgagcctcccgaatggttgctcaagttccgaggcaagtccaccggccgcgtgtacaagagcggtgaccttgtacgatacatcgacaatggcgaattccagtttgtcgcccgcaaggacttccaggttaaattgcgtgggcagcgtatcgagctcggcgaagtcgaaactaatctccacgcctctttccgcggagctggagatgccatagtcgatatcgtgactccagtgggcgacggtcgtcagcccatgcttgtggccttcgtctgctggaatgccaacaaggatgagaaggagttacttcgcaagcccgaccgggagttttcgctccgcgcacagtctgctgagacacagatgtccaagtcgcttcccatctacatggttcctgtggtctatctcccactgtcgcatatgcccttgaccggcaatggaaaactagatcgcaagaaactccgcgccatagcggagcgcctgacgccggaggagctggaacagtacaactcgtccgccgtacctaatgaaatgcccacttcggaggcagagacactgctacagaaagtatggagccgcgttctgaacaaggacgtagcctcaatcggcattcataacaacttcttccgactcggaggcgattccatcagcgccatgcaggtgacgtcccaatgcagcgcccttggtgtcagtgtcacagttgccgatatcttccgttataaaacaatatctcaactcgctacggtggtccagagatccaaggctgttgaacacccaaccgaggtggttgacaacccgtttgagctctcgcctatccagaatgtctacttcgaagcagcacctcttggcaaccatcacttcaaccagagttgcttcctccgccttaatcgcaacgtctcttccaagtcgctcaaggctgctatacaccgcatcgtcgagctgcactccatgctcagggccaggtactcgtgcgatgaggatggcaattggacgcagaccattgtgaaggatgctgagcacagctatttctaccagaactactgcgttcctgaccttgcttccgcccaggatcttatctcggtcaatgaaaaaatcattgatattaagaagggtcccatcttggccgccagtctatttctcgttgacgggtttgaacagtacctgtttattgcagcgcatcatctcgtaaccgacttggtgtcatggcgaattattcttggtgatcttgaagaacacctcctgaacgggaagatctctcgcaacgtgccgttgtcattccagtcctggttgactctgcagaaagaatatgctgttgataaccttgatcccgcgctaatcagggatgagatgccaacacctccgcaagactactggggaatagagggccattccaacttggtcaaagacacgatgcaagccagcttttctctcgacgagaacagcactaccaatctgttcgaatctgccaaccaagctttccaaacgcagcccgtcgagctgcttcaggctgcgctcgttcactcatttgcccagaccttcaaagacagacctccacccgcagtgtggaacgaaggacatggtcgcgagccttggacctccagcatcgacctcagcggaacggtcggttggttcactaccatgtggccgatgttcgtatctgcagagggtaccaacgtattggatgtcattcggcgggtcaaagacacacgccgatcgataccaagcaacggatgggcgcactttgcgtcttcgcttcatccgaacgcacaaaagtcaaacgacgtgaaggaagtaacgttcaacttctttggtcgataccaacagctcgaacgtgctgatgccctgtttcaatcatgtgaaaagccgaagggctgcttgtccgatgtttctgatgagttgggccgattctcagtgatcgatgtggtggccgagatggttgacaaacgtcttcgctttggattccacttcaatcatctcgcggctaccaaccgaccagtcctagaatggatcacaaactgcgagacatctctccttgacatcgcagcgaggttgccagatctcaaccggtctctgacacttacggacttcccgcttgtatcgttcacctatgagtctttggacgtcttcaaggatcgatgcgttactgaacatggtattcccgcagacaacattgaagacgtttacccctgttcaccgattcaacgaggcataattctctcccaagctaagtctccggaacactaccaaaccctcgtggtctggaagattcatgccaatgatgccgcggtagtcgatatttcacgagtccaggcagcctgggccaacatcgtctcgcggcatacaatcttcaggaccatgttcgtgaagagcccgagcagtgaagacttcatggagcaagtagtccttgcagacgtacctgctgccatcaccgtacttccatcggacgcagaggagaaactgcttcgtaagctcgagagtgggcgaaacatgtcccttgataagagtgcacttccctataaggtgactctgggtcaaacgaatgctggggatgtcttgttcggtctcgaaatcagtcacgccctcttcgatggcaccacgaggcaaaatctacaacacgagctcatggaggcttacatagactcggcaacgatgcagaccccgggccctgcttatcgcgaatacatctcctacctcagcggccaatcctctgccgcagaaaagaaagagtattggacaaagtatctcaacggggtcgttccctgtcatttcccagctatgactaccgtcaatgccaagcccaccagggagactctgggatcaattcaaatcgatatgggagacgccgcagcaatccgtcgtttctgcgaggtacacgaagccacactctcaaacgtgttccaggtcgcttggggaatggttctgaagtcgtacatcaacttggaagctgtctgcttcggttacctttcggctggccgcgatgtacccgttccacaagttcaagaagcaatgggcccttacatcaacatgctcgtctgccgtatggatctcgccaactcggaatctttgacgaaggtactccaggataaccaaaataccttcgtcgagagtctgaggcatcaacactaccctctgactgatattgtgcgtgccgcgcaattgccaggcggtggctcccttttcaacacggtcatgtctctccagaatgttcgtcaagattctgaagaggagaaacgtcctattggcctagacgtgatcgggggtcaagacccctctgaatacgacatgacagtacacattgtcgttgggcctcagcgcattgatgtggccttggagtactggcattctttcattaccgatgagatggccacaagtatagcggactcgttccgtcacattctccatgaggtgatcagtcgggccgacccctccgttggcagtctctcagtaattggggttcccagcagcaacatcttacacaactggagcggaaagctgctcgaaaccgagcatcggctcgttcacgaaatgatacaccagcgatgcgtcgcccagcccaatgctactgcggtcgagtcttgggatggaagcttcacttattgtgaggttgatgatctcagttctgagttggctctgcatctggcacagtatgatgttggaccggacacgttcattcctgtatgcttcgaaaagtcgcgatggactaccgtcgttatgctggccatcatcaagaccgggtccgccttcattctcctcgacccgtcccaacccgcgcagagacgcaaagagatctgcgagactgctcagtctaagttaattgtcacatcggagcagcaggcgcccgaggcttcgactttcgcagccgacgcagtgattgttggtgaccagcatcgatcctggtctggagacgcttccaagcctcttccgcttgcgtcgccggagaacattctttacgccgtatttaccagtggctcgaccggcaaacccaagggtgtcatgatcgaaaaccgagcctttgctaccagtgcccgcgagcacagcgtagccctgaccatcaccaggagttcccgggtcctacagtttgcatcatatgcctttgatgctagcatcgctgagaacctcaccacgcttttgatgggtggctgcatctgtgtcgtttccgataccgaacggaaagaatcccttgccaaggccgtcgcaaggatgcaggtcaactggatattcacaacaccgtccatggcccgtatcctgaatcccaaggacttcccatccgtcagaaccctgatttgcggtggtgagctcgtttctgataaagagctgaggatgtggagagacaatgtggacttgtatctggcctacggaccgactgaatgtgccatcttctgtggttctacggtacgtgtcacggctggactcgccggaaggaacattggcaagatgttcggctgtcgctcatgggttgttgacccgaatgaccacgagaagctagtccctgtgggtgccgtcggtgagctcatgctcgaaggtcccatagtggcgcgtggctatctcaatgagccggagaaaacggcatccgtgttcattcaacagcctggctggcttcaggcattcaaagacggaccatccaagctctacaagactggtgacttagtcaagtacaatgccgatggcactctacactacatctccagaaaagacactcaagtgaagcttcgtggccaacgcgtggaactcggagaagtcgagcatcgggtgcgacaatgttatccgactgcgactgatgctgttgtcgaattagtcgtctttgaagatggctctcgtcgacctctcctcgtcgcattcatctggaacgaggacaaatcagtcgccgagtcccaggcgatccttgcccagccctcgcctgaattccgtgcccaagcacagcaagccgaagcgagtctgaacgaacagctaccgagttacatggtcccgactctgtacctgcctcttcagcgtttgccattgagcactaatggtaaagccgaccgccgtctcttgcgacaatctgtcacgcttctctcgcaagaggaaacactcgcgtacagcgcgcctctggcagcgaaaagccaagcatctaccgacacggagcaaattttgcaatctgtatgggcgcgtgtcttgaatatcgcacccgagcaaattggcatggaagacaacttcttccgtcttggtggtgattccattagtgcgatgcagatcgtggcctcttgcgccagccaccagcttgatgttaagattgccgacctcttccgctacaagacgatttctgctattgcccaacgcaccacagcttccaaggcatctgtttacagcaccgaagccaagacaggcgtttcttttgcactttcgcccattcaacagatgttcttcgactcggcccgcgacggtgtcaatcacttcaatcaaagcttcttctttcgcatcaacactcctgtcgcatccaccgacctccttaaagcgattaacgcgctcgtggcgaggcatcatatgctcagagcgcgtttcagaaagaacgagagccaggaggggaagtcatgctgctgggagcaactgatactccctgaggttgaggggagtttccggttcgatgcccaccagatcatcttcctcgaggaaacaaaggatatcattgctgaagcccagacgtcgcttgatttcgtatctggtccggtattttccgtcgatctgatgaccacccgatcaggtgtgcaatacttgttcctcgtggcgcaccatcttgtcattgatcttgtttcgtggagaatcatcctcaaggatcttgaggatctcttttctcctggagccaccctacctcagcaatcaataccctttccaacctgggtgtcgctgcaagcaagatacgccgccaagttcttgacaccggagagtgcgataaccggcgatatccccccacccatgctagactactggggactatctgacaagagcaatctcgtcagagatgcgctggacaaagagttttcactcagcgaagagatgacgcaggctctccttgggcctgctaatgaagccttccagacgcagccggttgaactattccaggctgcactgctccattcattcatgcgcacctttgatgatcgcacagaagcgccgaccatcttcagtgaaggccacggacgagagccatgggactcgggcatcgacctcaccaacaccgtaggctggtttactaccatgtcgcctacgcacgttcaatcccacgacttgcttgatacagtacgcaggaccaaggatcagaggcgccaacttcgtaataatggatgggcttacttcgcatcccgttacctgaacgagaagggccgcgattctttgcgaatttccggtcctgcggaaattgtcttcaacttcactggcctgtatcagcagctcgagcggaaagagacgctcttttcaaccgttgagaacttccagcatggtgttctcgacatcgcagacgactctcctcgtttcgcaatcttcgatgtcaccgcaaccgtgttcaagaatcgcctccagttcagcttcttctacaaccgccatgctgatgataaacgtcccattagtaaatggattgccaactacgagaagtcgcttttggaacttgcttcgaacctttcgtcccattctcgtactgcgactcttatcgatttccctcgcatgtctctcgactacccaatgctcgactcgttggtggaggagatactgcctgcacacggcgtgtcttcaagtgaagtggaggatgtatatccttgctctcctatccagaacggcatgcttctcagtcagtccaaagcgacgctggtctatgacaatcgtttcatcttgaagatcagctcggcctcagagacaacggccatctccacgaccagtttcataacagcatggaatcaagtcatgaaacggcacccgatttttagaacattcttcattccgagtcaaggaagtgtgagctacatggaccaggtcgtcttgaagaacattcccgagcacatggttaccattctgcctctcagctccaatcctgaggagacactcgcgaaccgcgattcagtcacaccagcaaagggactgccccctctccacttaactctctgcagtgacgccgctactggcgaacttttctgtctgtttgaaatcaaccattctcttcttgatggcacatcgctgcaggtgttggtgagagatttacatcgcgcctacgacaaggctctgccaacctcgcccgcgctaatgtacagcgaatacgttgattacatccagtcgctctcgacggacgcagccaaggagtactggcagcaatatctacgcggcagtgatccgtgcttgttcccggcctccacaaacggcgagcaactcgttcggaagatgaaagcagctaccgccaagctagcagctagtagccagctcagcaagttctgtgaggcacatgcactaacgctatctaatgtcgtccaacttgcctggagtcttgtcttgcgagcttacactggttctgatgatgtttgctttggctacctcgtttctggacgagaaatcccgctcaagggcatcgaggacgcctgtggaccgttcatcaacatgctggtgtgccgatccaagttcgcagatgacgtctcagtgagccagcttctcgaaactacacagaaagactacttgaacaataccgagcatcagcatctttctctggcagagatcaagcgttccctcaatctgcctgatatcccgctcttcaatacaatcatatcccttcaaagagagggcatggctactcagtcgggcgatgcctcttccgtgcgtatcgagccactaaagggagaggatccaacggagtacgacatcactctcaacgtgtgggcaacagaaagtgatatcgaaattgccctacactattggaatacatcaatgagcgaatcccaggcctatgtcgtaatcgacactctggagaaggctctttcagagatcactagcaaagtcgcgcagcccctcggcgaccttgacctcttcggcgaccggagccgagcccagattctcaagtggaatgagaacgtgccagcgcgcgtcaacaggtgtgcccacgagctcattatggagcgaaacgcgcatcgtctcgaagccccagcaatttgcgcatgggacggagatttcacctacgccgaactggatgccaagtcgtcgcgattggctgcgcacttggtccagaactacaatgtcggtcccgagaccttcgttcccgtctacttcgagaaatccaaatggacctccgtcgctctcttgggtatcctgaaagctggcggcgcattcgtgcagatggatccatctcatccgatccagcggctgagggacatatgtcatgactcgaacgctccggtcgtcatcacatcctcagcaaaagccactgtcgcctctgagctaggccgcagtgtgcttgtcatcagcgatgaccaatttggctgggcacgagatgacgagtctttccagtctactaccgtgacc

SEQ ID NO: 28629 - DNA, 1053 bp, Muscodor strobelii
  misc_feature: SGI cDNA ID NO. 569821
  misc_feature: Encodes the peptide sequence at SEQ ID NO 28630
atgtctgagaccaccactatgctgagccctcaagctactacagaggttaagcttcacagcattcgaaactctaagctcttagacttgagagaatgcatcgtcaaaggattgcaggagagccccaaaaacatcccctcgctcctactttgggatgatcagggtctgcagaactttgacgcttggactcaagcacctgcatattatcccaagcgctgcgagtgggagatcctgacgcaaaattgccaggacatcgccagtcagttccccactagatctgtactgatcgagctgggttgtggaaacctgagcaagacagcctggttgcttggtgccatggaaaatcagcgtcgtgaagtccactattgcgctcttgatgtatcggacgatgcactcaacaagaacctgggcgatctgaagaagcactttgctcagtctaagtacatcaacatttcagggctgagtggtacatatgatgactgtgcggagtggcttgccacatctgctcgtcttccgggctcatcggtcactttcctctggctaggaaacagcattgccaatcttacaaaagccgatgcaagcacactgatcggtcagtttcaccgggcctgccagaaaatgtcgttggactgcaatttcctagtctcggccgactcatgtagtgatgaagaacgcatcgcaaaagcatacgagcccaaggaaggcccatcgcgaacgttcctgttccacgggctgcatcacgccaactccttgctgggcagaaaagttttcagagaggatgaatgggacgcggttcctacatgggacaagtctgagaacgagcttcgatacagctatgctcccaagatggatatgacactagacctcggcgagatccaagtgaatgtcaaagctggagagccggtcaattactttatgtctgggaaatggactgaggcccagatggcttggattgcggagaatgcgggactcaaggttgaaaatacttggaaagacagccaaaaccagtaccgtttttacttgatgagcagcaaaggtggacgtgcgctgatatag

SEQ ID NO: 28630 - protein, 350 aa, Muscodor strobelii
  misc_feature: SGI Peptide ID NO. 569821
  misc_feature (8)..(336): NCBI GI: 121717277 Blast Desc: conserved [Aspergillus clavatus NRRL 1] gi|119404218|gb|EAW14635.1| conserved [Aspergillus clavatus NRRL 1]
  misc_feature (2)..(345): NCBI GI: 238497506 Blast Desc: N-methyltransferase, [Aspergillus flavus NRRL3357] gi|220693262|gb|EED49607.1| N-methyltransferase, [Aspergillus flavus NRRL3357]
  misc_feature (2)..(336): NCBI GI: 169768218 Blast Desc: [Aspergillus oryzae RIB40] gi|83766437|dbj|BAE56577.1| protein product [Aspergillus oryzae]
  misc_feature (27)..(336): NCBI GI: 94490328 Blast Desc: [Xylaria sp. BCC 1067]
  misc_feature (11)..(342): NCBI GI: 238503023 Blast Desc: conserved [Aspergillus flavus NRRL3357] gi|220691555|gb|EED47903.1| conserved [Aspergillus flavus NRRL3357]
  misc_feature (3)..(336): NCBI GI: 169776339 Blast Desc: [Aspergillus oryzae RIB40] gi|83771371|dbj|BAE61503.1| protein product [Aspergillus oryzae]
  misc_feature (16)..(336): NCBI GI: 70984451 Blast Desc: conserved [Aspergillus fumigatus Af293] gi|66845359|gb|EAL85694.1| conserved [Aspergillus fumigatus Af293]
  misc_feature (16)..(336): NCBI GI: 159122516 Blast Desc: conserved [Aspergillus fumigatus A1163]
  misc_feature (16)..(336): NCBI GI: 119494144 Blast Desc: NFIA_007610 [Neosartorya fischeri NRRL 181] gi|119412144|gb|EAW22085.1| conserved [Neosartorya fischeri NRRL 181]
  misc_feature (11)..(339): NCBI GI: 85107734 Blast Desc: NCU07917 [Neurospora crassa OR74A] gi|28924039|gb|EAA33197.1| [Neurospora crassa OR74A]
MSETTTMLSPQATTEVKLHSIRNSKLLDLRECIVKGLQESPKNIPSLLLWDDQGLQNFDAWTQAPAYYPKRCEWEILTQNCQDIASQFPTRSVLIELGCGNLSKTAWLLGAMENQRREVHYCALDVSDDALNKNLGDLKKHFAQSKYINISGLSGTYDDCAEWLATSARLPGSSVTFLWLGNSIANLTKADASTLIGQFHRACQKMSLDCNFLVSADSCSDEERIAKAYEPKEGPSRTFLFHGLHHANSLLGRKVFREDEWDAVPTWDKSENELRYSYAPKMDMTLDLGEIQVNVKAGEPVNYFMSGKWTEAQMAWIAENAGLKVENTWKDSQNQYRFYLMSSKGGRALI

SEQ ID NO: 28631 - DNA, 1768 bp, Muscodor strobelii
  misc_feature: SGI EST ID NO. CUFF.67437.0
  misc_feature: Variant of the nucleotide sequence at SEQ ID NO 28629
gtcggagaccgactggggtggaagatgtctcatgtggattattcattgattatttgaatagaaagaaagtgaagaaaagcgatcggtcaaccggtgtacccaatgtcaggcgggcaagggtagacatcttacaaggtcgctccggggcaagggtgggtactatacagtcctatttgggccagaaatattggcacgccacaccctatctacatgtatggttcaaagaggtatcagggtgggtagaggggtgtgaactagattggcatgaagtactgtacttcgccaaatggatgttgggtcctcataacaaagtcactggagaaacacggctgtgtgaacgcacgtggtggagttgcctcctcggaatttatatcggtttccaacggtaatccttgttgtgcgctcgacacaacatcctgactgagtgaggacagacggacggcgttggctgggtgctctgataatctatgctacctccacaatacaactagcgagacgataatgcagcacgatgaatgaaaagaaaagaatcagcacttcataacattacatcaacttctatgtttgagacattccttcataacacagcacatcgttcttgcccgtcatgtctgagaccaccactatgctgagccctcaagctactacagaggttaagcttcacagcattcgaaactctaagctcttagacttgagagaatgcatcgtcaaaggattgcaggagagccccaaaaacatcccctcgctcctactttgggatgatcagggtctgcagaactttgacgcttggactcaagcacctgcatattatcccaagcgctgcgagtgggagatcctgacgcaaaattgccaggacatcgccagtcagttccccactagatctgtactgatcgagctgggttgtggaaacctgagcaagacagcctggttgcttggtgccatggaaaatcagcgtcgtgaagtccactattgcgctcttgatgtatcggacgatgcactcaacaagaacctgggcgatctgaagaagcactttgctcagtctaagtacatcaacatttcagggctgagtggtacatatgatgactgtgcggagtggcttgccacatctgctcgtcttccgggctcatcggtcactttcctctggctaggaaacagcattgccaatcttacaaaagccgatgcaagcacactgatcggtcagtttcaccgggcctgccagaaaatgtcgttggactgcaatttcctagtctcggccgactcatgtagtgatgaagaacgcatcgcaaaagcatacgagcccaaggaaggcccatcgcgaacgttcctgttccacgggctgcatcacgccaactccttgctgggcagaaaagttttcagagaggatgaatgggacgcggttcctacatgggacaagtctgagaacgagcttcgatacagctatgctcccaagatggatatgacactagacctcggcgagatccaagtgaatgtcaaagctggagagccggtcaattactttatgtctgggaaatggactgaggcccagatggcttggattgcggagaatgcgggactcaaggttgaaaatacttggaaagacagccaaaaccagtaccgtttttacttgatgagcagcaaaggtggacgtgcgctgatataggcttggcaagatggaggatctggtatctagatatccaagtatgattacgatcaatgttgggatgttattgaatattgcaatgtacttgagcaaagctgtagatccaat

SEQ ID NO: 28632 - DNA, 582 bp, Muscodor strobelii
  misc_feature: SGI cDNA ID NO. 569822
  misc_feature: Reduced expression when VOC is produced
  misc_feature: Encodes the peptide sequence at SEQ ID NO 28633
atggcctcatcaacaacaccaaaaactggattactcctaatcgacatacaaaagggcttcgagcatccaacatattggggaaccgaacgttcaaccccagacttcgaatcaaacatcaccaaactcctcgctgccttccgcgccaagcaaaaccccatcatccacgtctgccaccactctctatcgccctcctctccactccacccgtcaaatcccagcgcagcattcacagactatgcactcccacaaggtgacgagccagtcatatcgaaatcggtgaactcaggcttcatcggcacagacctcgaagataggataaagagtctcggcatcgagagactggtcattgtcggactgacgacgggacactgtgttagcactactacgaggatggctgctaatctgaaggttgtcggtggggaggagaatgttgtcttggttagcgatgccacggcgatgtttaatcgggagtttgagggggtgatatatgatgctgagacgctgcataggatgaatcttgctactatcaatgaagagttttgcgttgtgaggaagacggaggaggttttgagggaattgtag

SEQ ID NO: 28633 - protein, 193 aa, Muscodor strobelii
  misc_feature: SGI Peptide ID NO. 569822
  misc_feature (7)..(191): Pfam Id: PF00857 Pfam Desc: Isochorismatase family
  misc_feature (9)..(190): NCBI GI: 119472566 Blast Desc: isochorismatase family hydrolase, [Neosartorya fischeri NRRL 181] gi|119406518|gb|EAW16469.1| isochorismatase family hydrolase, [Neosartorya fischeri NRRL 181]
  misc_feature (10)..(190): NCBI GI: 284166334 Blast Desc: isochorismatase hydrolase [Haloterrigena turkmenica DSM 5511] gi|284015989|gb|ADB61940.1| isochorismatase hydrolase [Haloterrigena turkmenica DSM 5511]
  misc_feature (6)..(193): NCBI GI: 212545014 Blast Desc: isochorismatase family hydrolase, [Penicillium marneffei ATCC 18224] gi|210065630|gb|EEA19724.1| isochorismatase family hydrolase, [Penicillium marneffei ATCC 18224]
  misc_feature (1)..(189): NCBI GI: 154303918 Blast Desc: BC1G_08843 [Botryotinia fuckeliana B05.10] gi|150854427|gb|EDN29619.1| BC1G_08843 [Botryotinia fuckeliana B05.10]
  misc_feature (9)..(193): NCBI GI: 169779928 Blast Desc: [Aspergillus oryzae RIB40] gi|83773168|dbj|BAE63295.1| protein product [Aspergillus oryzae]
  misc_feature (1)..(193): NCBI GI: 121700018 Blast Desc: isochorismatase family hydrolase, [Aspergillus clavatus NRRL 1] gi|119396416|gb|EAW06848.1| isochorismatase family hydrolase, [Aspergillus clavatus NRRL 1]
  misc_feature (10)..(193): NCBI GI: 124009245 Blast Desc: isochorismatase [Microscilla marina ATCC 23134] gi|123985127|gb|EAY25066.1| isochorismatase [Microscilla marina ATCC 23134]
  misc_feature (6)..(190): NCBI GI: 157693368 Blast Desc: amidohydrolase [Bacillus pumilus SAFR-032] gi|157682126|gb|ABV63270.1| amidohydrolase [Bacillus pumilus SAFR-032]
  misc_feature (6)..(193): NCBI GI: 194017811 Blast Desc: isochorismatase [Bacillus pumilus ATCC 7061] gi|194010463|gb|EDW20036.1| isochorismatase [Bacillus pumilus ATCC 7061]
  misc_feature (6)..(190): NCBI GI: 51507671 Blast Desc: isochorismatase [Bacillus licheniformis]
  misc_feature: Useful for introducing or modulating the production of volatile compounds
MASSTTPKTGLLLIDIQKGFEHPTYWGTERSTPDFESNITKLLAAFRAKQNPIIHVCHHSLSPSSPLHPSNPSAAFTDYALPQGDEPVISKSVNSGFIGTDLEDRIKSLGIERLVIVGLTTGHCVSTTTRMAANLKVVGGEENVVLVSDATAMFNREFEGVIYDAETLHRMNLATINEEFCVVRKTEEVLREL

SEQ ID NO: 28634 - DNA, 1005 bp, Muscodor strobelii
  misc_feature: SGI EST ID NO. CUFF.67443.0
  misc_feature: Variant of the nucleotide sequence at SEQ ID NO 28632
cgcgacaatcagccaagtgaaggcttagaaatatgaattgcttcagccacagatatgagattatataaagtctcaatcttattgatacttcatcgatatagctacaactgtgcaccaggttctacaacacaatacatcaccatggcctcatcaacaacaccaaaaactggattactcctaatcgacatacaaaagggcttcgagcatccaacatattggggaaccgaacgttcaaccccagacttcgaatcaaacatcaccaaactcctcgctgccttccgcgccaagcaaaaccccatcatccacgtctgccaccactctctatcgccctcctctccactccacccgtcaaatcccagcgcagcattcacagactatgcactcccacaaggtgacgagccagtcatatcgaaatcggtgaactcaggcttcatcggcacagacctcgaagataggataaagagtctcggcatcgagagactggtcattgtcggactgacgacgggacactgtgttagcactactacgaggatggctgctaatctgaaggttgtcggtggggaggagaatgttgtcttggttagcgatgccacggcgatgtttaatcgggagtttgagggggtgatatatgatgctgagacgctgcataggatgaatcttgctactatcaatgaagagttttgcgttgtgaggaagacggaggaggttttgagggaattgtagatgttacgtgatgggtgggctatgctagcgtgcatcgggacgaagatgtgagttttgaaagagatattcatattcgaggtttgggttatatgtcgagtctcactggcaggctcataatatgatctcgagtatgtattcaatggatattcatttgatcgcttgtttgataacctatcaaaaggatacagttgatgctttgtatcgagctgctactgagtgacatcagtctctaaacataatatccagttagctattgacccattaaagcaaattgcccttttt

SEQ ID NO: 28635 - DNA, 4542 bp, Muscodor strobelii
  misc_feature: SGI cDNA ID NO. 569823
  misc_feature: Reduced expression when VOC is produced
  misc_feature: Encodes the peptide sequence at SEQ ID NO 28636
atggatcaggtcgtgctcgttggcaccgattgggtctcagctcttggcgcccagagttaccccatcgtcaatcaatccgtttctcaccttgtgaatgtacacaagttagctaccttcgctagaacaggatatatccaaatcgcaatcgtcgccgtttcccttctctttgtgaccaaacatctcctcctaaggtcacataagatctcccgtccagagacaaacgcgtcaaacatttctataccgtttgaaatatgcagccagctattacgaggtgcttctctagcgttgattgtcgtttcatctgtgcgactgggaaatcagtggacaacagttattgcccttgcttatgcatttactcttggactcctgcgactattccatgatctcgattggaggcatgtcgctctgcataatctaaactttgtcctcactgccttattagtagttctggggctaggagagctactaccatatgtggacattaactacacacaagagctggattcagcgttggtaggtggcatagctacactagctgctgccgttgtcctagctgcaagcacaccgagagaatgggttcccccttcaattgaaccccgtattttcgaaagaattcctattctactcccgtctctagaagagacatgtagctgggtaggatactttctcacctacgagtggctcacccctctcctgcttagaggctttcgtggacaaatgccgatcgaagagctcccaagaattccttggtatgatgaaccacttgttctactcgctagagtcatgaccgctcggagcaagtccaaatcgagccttgtcaccgtgctgcgttatctacgatgggagatgataacaatgggtgtttgttctgtgttgacgtactccgtggaaatggtagctccttttgcgatgtatcagctacttggatacattgccaatcctgaaggtgctacagtccgcccttgggtctggctcattcttcttggtgtcggtccgctagtacggtcttggtcctttcaacagtatgtttttaccggaacacgtaccgtggtgcgcatcaagtctgctctcacgcaagaactttacttgaaagccatggactccatggaattgaacgacgagatcttctctgagatagcttctcatggtaatagtaaggaaaaattgaagctgggtaagaacacgactgcaacaggtcgtattgcgaatctcatgagcgctgatgtcgattcaatctggggcgctcgcgattttatcatcattttctttggcatctccgttggcactgtattggccctgacaggaacgtacaagctcctaggttggccagctctagttggtattgcagcgatggtcattctattcccaatgccactactcataagccatcgtatgttgggcatcaaccgagaaatgaaaaagattcaagactctcgtatttcagccgtgtcagaataccttgcatccattagagccatcaagtattttgcttgggaagacgcaatcgcggacaagattaacacaattcgaagcggcgaacagcagaagatatggaccttgaatgttttatctgtcatattggctcaactcacagaagtcatcccgattatctcacttctcatcatgttcagtctgtacgtcctcgttcgaaaacaaccattgacagcagacgttgcgttcacggcaatttctctagttagaatgatgaggcgcaatttgaatatggcttccacatctatcagatctattaccgcaggtcttgtttcccttagacgacttgatcggtttttctacaataccacaccactcacgcctcacccagagggcccgttgcgaatgaagaatgcgtccttccggcgtcacaagaacgctgctttcacgctcaatgatatctcgatcgattttgttgaaggcggtttgaatgcaatcactggccccagtggaagcggaaaatcaacactgcttttggcaattctaggggagaccctccttgaaggcggaaacatcacatgcccgagagacatcgcgtatgcttctcaaagtccatggctgcaaaatgatacgattcgcgaaaatatcttgtttaacagctcatttgaaaaagtacgatatgaccgagtcatcgaggcatgtggtttggcgattgatatgaatgaatttcccgaacgcgatgagacggaagttggtgagaacggcacatcactcagtgggggccagaaatcgcgggttgctctcgcacgtgcgctctattcgaaagcctcggtaatcctactagacgatgtattttctgcacttgatgcgaagacttctgcgtctctatggaaagaagctttctgtggtgacctactgaaaggcagaactgtcgtcctcgtcacgcaagtgccctggattggcccacaagcagacctcaatattatcatggagaatggctctattcaggatttggagcaaaatctcggtgtcattcgtcatgttgtaactaccgatgagcttctcgttgacgatggagacgttgatacgactgtagaggttgctgcagcccacgaatcagaaaccaatgggactctgttgaatagagtgacgtcggttggtcttagcaaagccgtagtcgccaagcgtcaagacgaggttacgcaggaagcgctaaagaccggaactatggcacgattacaattcttttcttacatgagtctctttcggaatcccgcgtacgccgttatcactatcttgatgactattctgagtcaagcttccctggttggcacaacgttatgggttgctgtttgggttgaagcatcaagcaaagatgctgcgtatgatgttgctttctatctcgggatatacgcattatttagtgttggtgaatgcatattcacgggcataacatatctggcgtatgagagtggaggttggtatgcagctaggactctccacaataccttcatcaaggcagtgatgagcgtgcctctgtcttggtataaaacaacaccagttggccgcattgtcaacagattctctgccgatatgaactctctcgataacaatatggtggcgatgctccgtatgacaataatcaacggactcctcatctgtttccaagcgggcgctgtgagcaccgttcttcctgtcttcctgatacccgttgcgatatgctgcgcgatgggcatcttggccggtgaaatttatacgagaacctccgtgtctatcaaacgcttggtttcttcggcacagtcgcctgtttttgctcaatttgctgatacccttgccggacttcctgttattcgcgcaagagcgggcatgcctcaagttttccacgaccagctcgctgctaaattgcgagcccttgcaagatcacaggaagcacagttttgttgtaatcgctgggtcggggtcaggatagatttcatgacaacattggtttcagtcgctgctggagcaatcgcggtgtcgaaagcgggaaccgttgcagctggtcttgtcgggttttcactatctaatgctactactttgaacacgctaatcatacattttgtacgggcgatgaaccaaactgaagtcgagcttcaaagctatcatcgtgtgaaagaatatgctaatatagaaccggaagagaagactgaggattacaaggaacaaggtgcttacactgatgacccaagtgtcgtcctgccaccaaactggccgacgaatggggaagttgaattccgaaatgtcactatcaaatacgatctagacggaccagagattttgaagaatatcaatctcaaattcgccgctggcgagcgagtggctgtcgttgggcggacgggttctgggaagagtacgctcgtcctgtctcttctccgcttcaccaacatcgtctcagggcagatttttttcaacggtatagatatcacgaagtttccacgacgcaagttacgcgaggcccttacgattataccgcaagaagccgtcttattcacaggagatgtgggctcaaaccttgatccgacagacagaatacccaaagaaagcatagaaaaggcactggattactgtcggggaatcgcgtcttttgaatttcaccaggatcagataccctcttcgaatatgctcatcaatggatttactgatgatgacactgacgcaaatgaaacgagcgcgcttggcatccacctctcaacgcctgtcaaagcgaagggggagaatttctcgcacggacagcgacaggtactctcgctttgccgagccttggtcagaaagagtaaactgttgctgcttgatgaagcgactgccagtatggactatgaaacagatcagggcattcaagaagttctaagaaaggagctcaatgagcatggccgggatagaacactagtcacgattgcccatcgacttaagactatcatcgattatgaccgtgtagttgttatgggggctggtgaggtcatagaagttggaagcccgaaggagctttatgagactaagggcgcattctatgacatgatgagacattcaggagagtttgatgatttggagggattcctagaaagcaaaagctaa

SEQ ID NO: 28636 - protein, 1513 aa, Muscodor strobelii
  misc_feature: SGI Peptide ID NO. 569823
  misc_feature (283)..(573): Pfam Id: PF00664 Pfam Desc: ABC transporter transmembrane region
  misc_feature (905)..(1174): Pfam Id: PF00664 Pfam Desc: ABC transporter transmembrane region
  misc_feature (1260)..(1474): Pfam Id: PF00005 Pfam Desc: ABC transporter
  misc_feature (638)..(810): Pfam Id: PF00005 Pfam Desc: ABC transporter
  misc_feature (67)..(1513): NCBI GI: 46136191 Blast Desc: FG09611.1 [Gibberella zeae PH-1]
  misc_feature (40)..(1510): NCBI GI: 164425126 Blast Desc: NCU06382 [Neurospora crassa OR74A] gi|157070800|gb|EAA32984.2| conserved [Neurospora crassa OR74A]
  misc_feature (107)..(1512): NCBI GI: 238483833 Blast Desc: ABC multidrug transporter, [Aspergillus flavus NRRL3357] gi|220701205|gb|EED57543.1| ABC multidrug transporter, [Aspergillus flavus NRRL3357]
  misc_feature (34)..(1505): NCBI GI: 119494345 Blast Desc: abc transporter [Neosartorya fischeri NRRL 181] gi|119412230|gb|EAW22171.1| abc transporter [Neosartorya fischeri NRRL 181]
  misc_feature (64)..(1512): NCBI GI: 121700635 Blast Desc: abc transporter [Aspergillus clavatus NRRL 1] gi|119396725|gb|EAW07156.1| abc transporter [Aspergillus clavatus NRRL 1]
  misc_feature (34)..(1505): NCBI GI: 70996602 Blast Desc: ABC multidrug transporter [Aspergillus fumigatus Af293] gi|66850691|gb|EAL91018.1| ABC multidrug transporter, [Aspergillus fumigatus Af293]
  misc_feature (34)..(1505): NCBI GI: 159131792 Blast Desc: ABC multidrug transporter, [Aspergillus fumigatus A1163]
  misc_feature (35)..(1512): NCBI GI: 145230221 Blast Desc: An01g10000 [Aspergillus niger] gi|134055536|emb|CAK37182.1| protein product [Aspergillus niger]
  misc_feature (37)..(1505): NCBI GI: 212527162 Blast Desc: ABC multidrug transporter, [Penicillium marneffei ATCC 18224] gi|210073136|gb|EEA27223.1| ABC multidrug transporter, [Penicillium marneffei ATCC 18224]
  misc_feature (34)..(1512): NCBI GI: 242782853 Blast Desc: ABC multidrug transporter, [Talaromyces stipitatus ATCC 10500] gi|218720229|gb|EED19648.1| ABC multidrug transporter, [Talaromyces stipitatus ATCC 10500]
  misc_feature (188)..(1500): SWISSPROT Homolog: EC 3.6.3.44 Xenobiotic-transporting ATPase
  misc_feature: Useful for introducing or modulating the production of volatile compounds
MDQVVLVGTDWVSALGAQSYPIVNQSVSHLVNVHKLATFARTGYIQIAIVAVSLLFVTKHLLLRSHKISRPETNASNISIPFEICSQLLRGASLALIVVSSVRLGNQWTTVIALAYAFTLGLLRLFHDLDWRHVALHNLNFVLTALLVVLGLGELLPYVDINYTQELDSALVGGIATLAAAVVLAASTPREWVPPSIEPRIFERIPILLPSLEETCSWVGYFLTYEWLTPLLLRGFRGQMPIEELPRIPWYDEPLVLLARVMTARSKSKSSLVTVLRYLRWEMITMGVCSVLTYSVEMVAPFAMYQLLGYIANPEGATVRPWVWLILLGVGPLVRSWSFQQYVFTGTRTVVRIKSALTQELYLKAMDSMELNDEIFSEIASHGNSKEKLKLGKNTTATGRIANLMSADVDSIWGARDFIIIFFGISVGTVLALTGTYKLLGWPALVGIAAMVILFPMPLLISHRMLGINREMKKIQDSRISAVSEYLASIRAIKYFAWEDAIADKINTIRSGEQQKIWTLNVLSVILAQLTEVIPIISLLIMFSLYVLVRKQPLTADVAFTAISLVRMMRRNLNMASTSIRSITAGLVSLRRLDRFFYNTTPLTPHPEGPLRMKNASFRRHKNAAFTLNDISIDFVEGGLNAITGPSGSGKSTLLLAILGETLLEGGNITCPRDIAYASQSPWLQNDTIRENILFNSSFEKVRYDRVIEACGLAIDMNEFPERDETEVGENGTSLSGGQKSRVALARALYSKASVILLDDVFSALDAKTSASLWKEAFCGDLLKGRTVVLVTQVPWIGPQADLNIIMENGSIQDLEQNLGVIRHVVTTDELLVDDGDVDTTVEVAAAHESETNGTLLNRVTSVGLSKAVVAKRQDEVTQEALKTGTMARLQFFSYMSLFRNPAYAVITILMTILSQASLVGTTLWVAVWVEASSKDAAYDVAFYLGIYALFSVGECIFTGITYLAYESGGWYAARTLHNTFIKAVMSVPLSWYKTTPVGRIVNRFSADMNSLDNNMVAMLRMTIINGLLICFQAGAVSTVLPVFLIPVAICCAMGILAGEIYTRTSVSIKRLVSSAQSPVFAQFADTLAGLPVIRARAGMPQVFHDQLAAKLRALARSQEAQFCCNRWVGVRIDFMTTLVSVAAGAIAVSKAGTVAAGLVGFSLSNATTLNTLIIHFVRAMNQTEVELQSYHRVKEYANIEPEEKTEDYKEQGAYTDDPSVVLPPNWPTNGEVEFRNVTIKYDLDGPEILKNINLKFAAGERVAVVGRTGSGKSTLVLSLLRFTNIVSGQIFFNGIDITKFPRRKLREALTIIPQEAVLFTGDVGSNLDPTDRIPKESIEKALDYCRGIASFEFHQDQIPSSNMLINGFTDDDTDANETSALGIHLSTPVKAKGENFSHGQRQVLSLCRALVRKSKLLLLDEATASMDYETDQGIQEVLRKELNEHGRDRTLVTIAHRLKTIIDYDRVVVMGAGEVIEVGSPKELYETKGAFYDMMRHSGEFDDLEGFLESKS

SEQ ID NO: 28637 - DNA, 5162 bp, Muscodor strobelii
  misc_feature: SGI EST ID NO. CUFF.67586.1
  misc_feature: Variant of the nucleotide sequence at SEQ ID NO 28635
cgaaaatgagttaagtttcacgatgcgactttatggtatattcgttgagatacatactatgaaagggtcatgcaaggcccgtaattgagcggtgctccgtcgatgacctttggatgtcattcaggtcgtgtcggaccagcataagggacgcctccttaggctgatttcatgtactctgcgtataagtatctaattcgtccgtgttgcggagcatcgaaaaatgaacccggaagcaattgcagaacagggatcatgagattgactgagagccgcatatttcaatcatattttatcaatagaacttctcttgcatgttcttcactcactgtttccaatcactgttgtgctatcctttagcacgacaagccacccgcccgtcatggatcaggtcgtgctcgttggcaccgattgggtctcagctcttggcgcccagagttaccccatcgtcaatcaatcgtgagttgtacaagcttaatcatcgacatcataaacttttatcccttagctttactgaattcgaactttagcgtttctcaccttgtgaatgtacacaagttagctaccttcgctagaacaggatatatccaaatcgcaatcgtcgccgtttcccttctctttgtgaccaaacatctcctcctaaggtcacataagatctcccgtccagagacaaacgcgtcaaacatttctataccgtttgaaatatgcagccagctattacgaggtgcttctctagcgttgattgtcgtttcatctgtgcgactgggaaatcagtggacaacagttattgcccttgcttatgcatttactcttggactcctgcgactattccatgatctcgattggaggcatgtcgctctgcataatctaaactttgtcctcactgccttattagtagttctggggctaggagagctactaccatatgtggacattaactacacacaagagctggattcagcgttggtaggtggcatagctacactagctgctgccgttgtcctagctgcaagcacaccgagagaatgggttcccccttcaattgaaccccgtattttcgaaagaattcctattctactcccgtctctagaagagacatgtagctgggtaggatactttctcacctacgagtggctcacccctctcctgcttagaggctttcgtggacaaatgccgatcgaagagctcccaagaattccttggtatgatgaaccacttgttctactcgctagagtcatgaccgctcggagcaagtccaaatcgagccttgtcaccgtgctgcgttatctacgatgggagatgataacaatgggtgtttgttctgtgttgacgtactccgtggaaatggtagctccttttgcgatgtatcagctacttggatacattgccaatcctgaaggtgctacagtccgcccttgggtctggctcattcttcttggtgtcggtccgctagtacggtcttggtcctttcaacagtatgtttttaccggaacacgtaccgtggtgcgcatcaagtctgctctcacgcaagaactttacttgaaagccatggactccatggaattgaacgacgagatcttctctgagatagcttctcatggtaatagtaaggaaaaattgaagctgggtaagaacacgactgcaacaggtcgtattgcgaatctcatgagcgctgatgtcgattcaatctggggcgctcgcgattttatcatcattttctttggcatctccgttggcactgtattggccctgacaggaacgtacaagctcctaggttggccagctctagttggtattgcagcgatggtcattctattcccaatgccactactcataagccatcgtatgttgggcatcaaccgagaaatgaaaaagattcaagactctcgtatttcagccgtgtcagaataccttgcatccattagagccatcaagtattttgcttgggaagacgcaatcgcggacaagattaacacaattcgaagcggcgaacagcagaagatatggaccttgaatgttttatctgtcatattggctcaactcacagaagtcatcccgattatctcacttctcatcatgttcagtctgtacgtcctcgttcgaaaacaaccattgacagcagacgttgcgttcacggcaatttctctagttagaatgatgaggcgcaatttgaatatggcttccacatctatcagatctattaccgcaggtcttgtttcccttagacgacttgatcggtttttctacaataccacaccactcacgcctcacccagagggcccgttgcgaatgaagaatgcgtccttccggcgtcacaagaacgctgctttcacgctcaatgatatctcgatcgattttgttgaaggcggtttgaatgcaatcactggccccagtggaagcggaaaatcaacactgcttttggcaattctaggggagaccctccttgaaggcggaaacatcacatgcccgagagacatcgcgtatgcttctcaaagtccatggctgcaaaatgatacgattcgcgaaaatatcttgtttaacagctcatttgaaaaagtacgatatgaccgagtcatcgaggcatgtggtttggcgattgatatgaatgaatttcccgaacgcgatgagacggaagttggtgagaacggcacatcactcagtgggggccagaaatcgcgggttgctctcgcacgtgcgctctattcgaaagcctcggtaatcctactagacgatgtattttctgcacttgatgcgaagacttctgcgtctctatggaaagaagctttctgtggtgacctactgaaaggcagaactgtcgtcctcgtcacgcaagtgccctggattggcccacaagcagacctcaatattatcatggagaatggctctattcaggatttggagcaaaatctcggtgtcattcgtcatgttgtaactaccgatgagcttctcgttgacgatggagacgttgatacgactgtagaggttgctgcagcccacgaatcagaaaccaatgggactctgttgaatagagtgacgtcggttggtcttagcaaagccgtagtcgccaagcgtcaagacgaggttacgcaggaagcgctaaagaccggaactatggcacgattacaattcttttcttacatgagtctctttcggaatcccgcgtacgccgttatcactatcttgatgactattctgagtcaagcttccctggttggcacaacgttatgggttgctgtttgggttgaagcatcaagcaaagatgctgcgtatgatgttgctttctatctcgggatatacgcattatttagtgttggtgaatgcatattcacgggcataacatatctggcgtatgagagtggaggttggtatgcagctaggactctccacaataccttcatcaaggcagtgatgagcgtgcctctgtcttggtataaaacaacaccagttggccgcattgtcaacagattctctgccgatatgaactctctcgataacaatatggtggcgatgctccgtatgacaataatcaacggactcctcatctgtttccaagcgggcgctgtgagcaccgttcttcctgtcttcctgatacccgttgcgatatgctgcgcgatgggcatcttggccggtgaaatttatacgagaacctccgtgtctatcaaacgcttggtttcttcggcacagtcgcctgtttttgctcaatttgctgatacccttgccggacttcctgttattcgcgcaagagcgggcatgcctcaagttttccacgaccagctcgctgctaaattgcgagcccttgcaagatcacaggaagcacagttttgttgtaatcgctgggtcggggtcaggatagatttcatgacaacattggtttcagtcgctgctggagcaatcgcggtgtcgaaagcgggaaccgttgcagctggtcttgtcgggttttcactatctaatgctactactttgaacacgctaatcatacattttgtacgggcgatgaaccaaactgaagtcgagcttcaaagctatcatcgtgtgaaagaatatgctaatatagaaccggaagagaagactgaggattacaaggaacaaggtgcttacactgatgacccaagtgtcgtcctgccaccaaactggccgacgaatggggaagttgaattccgaaatgtcactatcaaatacgatctagacggaccagagattttgaagaatatcaatctcaaattcgccgctggcgagcgagtggctgtcgttgggcggacgggttctgggaagagtacgctcgtcctgtctcttctccgcttcaccaacatcgtctcagggcagatttttttcaacggtatagatatcacgaagtttccacgacgcaagttacgcgaggcccttacgattataccgcaagaagccgtcttattcacaggagatgtgggctcaaaccttgatccgacagacagaatacccaaagaaagcatagaaaaggcactggattactgtcggggaatcgcgtcttttgaatttcaccaggatcagataccctcttcgaatatgctcatcaatggatttactgatgatgacactgacgcaaatgaaacgagcgcgcttggcatccacctctcaacgcctgtcaaagcgaagggggagaatttctcgcacggacagcgacaggtactctcgctttgccgagccttggtcagaaagagtaaactgttgctgcttgatgaagcgactgccagtatggactatgaaacagatcagggcattcaagaagttctaagaaaggagctcaatgagcatggccgggatagaacactagtcacgattgcccatcgacttaagactatcatcgattatgaccgtgtagttgttatgggggctggtgaggtcatagaagttggaagcccgaaggagctttatgagactaagggcgcattctatgacatgatgagacattcaggagagtttgatgatttggagggattcctagaaagcaaaagctaatagagcatcaaggagaagatgggctggagttgaggcactaattgtagcacttgagcgtatctcaaaatagtcgcgtagtacccacttcataagcgcctcattcaagattccagtaacgatgtatcaggcaagcagctgagtataatgttaagagatatactatcctacca

SEQ ID NO: 28638 - DNA, 1260 bp, Muscodor strobelii
  misc_feature: SGI cDNA ID NO. 569824
  misc_feature: Encodes the peptide sequence at SEQ ID NO 28639
atgcctatccccatcgactcctccattgagacccctccacgggcaccttcccccgtccacggcttcgggaccctcgcagttcacgccggagcccctcatgatccctccacgggcgctgtcatcgagcccatttctctgtccaccacatttgtccagaccggtgcgggcaagccacttggcgcatacgaatactcgcgaagcgcaaacccgaaccgagacagcttcgaacaggcggtcgccgccctggaacatgctaaatacgccgtcgcattcagcagtggcagcgccgccaccgctaccattctccagagtctcgcttccgggtcgcacgtcattagtgtgagcgacgtttatggtggcacgcaccgttatttcacccgcgttgccaaggcgcatggtgttacagtcacattcacgccgcaaatcgaagttgacattgctgagcacatccgcgatgacaccaaattggtgtggatcgagacacctagcaatcctacgctgaggctcgtcgacatacgcgccatagctactgcagcacatgcacgcggtgtcgccgttgtcgtcgacaacacatttctgagcccatatgtccagaacccgttggatcatggcgccgatgttgttgtacacagtgttaccaagtacataaatggccacagtgacgtggtcatgggagtagcagcggtcaattccgaagagttgcgtgataagctcgcattcttgctcaatgctggcggtgccgtgccatcggcgttcgactcatggctagctcacagaggtgtcaagacgctgcatcttcgtgtacgccagtcgagcaccaatgctttagcagttgccaaagcactagaggcaagcccttacgttgttgctgtcaattatccaggcctagactctcacccgcagcgtgcggttgctttgaagcagcaccgaaacggtatgggtggtggtatggtatcatttcgcattaagggcggtagggccgctgctgagcgattctgccaattgaccaaaatttacaccttggccgagagtctggggggaattgagagtttgtgcgagatccccagtgccatgacacatgctggaataccaagggaccagcgagaggctgtcggtgtgtttgacgatcttgtcaggataagcaatggtattgaggagcccgaggatctggttcacgatgtgcagcaagcgctggaaagggctgtccgagagacggagcatctggttcagaatggaaacggcgttaacgggcacaattga

SEQ ID NO: 28639 - protein, 419 aa, Muscodor strobelii
  misc_feature: SGI Peptide ID NO. 569824
  misc_feature (23)..(399): Pfam Id: PF01053 Pfam Desc: Cys/Met metabolism PLP-dependent enzyme
  misc_feature (6)..(417): NCBI GI: 85111165 Blast Desc: cystathionine gamma-lyase [Neurospora crassa OR74A] gi|15278113|gb|AAK94040.1|AF401238_1 cystathionine gamma-lyase [Neurospora crassa] gi|28925544|gb|EAA34571.1| cystathionine
  misc_feature (6)..(406): NCBI GI: 116180594 Blast Desc: CHGG_00925 [Chaetomium globosum CBS 148.51] gi|88185222|gb|EAQ92690.1| CHGG_00925 [Chaetomium globosum CBS 148.51]
  misc_feature (3)..(419): NCBI GI: 256735100 Blast Desc: [Nectria haematococca mpVI 77-13-4]
  misc_feature (1)..(402): NCBI GI: 156063172 Blast Desc: SS1G_01702 [Sclerotinia sclerotiorum 1980] gi|154697038|gb|EDN96776.1| SS1G_01702 [Sclerotinia sclerotiorum 1980]
  misc_feature (1)..(402): NCBI GI: 154308986 Blast Desc: BC1G_08021 [Botryotinia fuckeliana B05.10] gi|150852647|gb|EDN27839.1| BC1G_08021 [Botryotinia fuckeliana B05.10]
  misc_feature (4)..(401): NCBI GI: 46108590 Blast Desc: FG01177.1 [Gibberella zeae PH-1]
  misc_feature (8)..(405): NCBI GI: 171687605 Blast Desc: protein product [Podospora anserina] gi|170943764|emb|CAP69416.1| protein product [Podospora anserina]
  misc_feature (9)..(402): NCBI GI: 189203247 Blast Desc: cystathionine gamma-lyase [Pyrenophora tritici-repentis Pt-1C-BFP] gi|187985058|gb|EDU50546.1| cystathionine gamma-lyase [Pyrenophora tritici-repentis
  misc_feature (6)..(414): NCBI GI: 239607838 Blast Desc: cystathionine gamma-lyase [Ajellomyces dermatitidis ER-3]
  misc_feature (6)..(414): NCBI GI: 261197894 Blast Desc: cystathionine gamma-lyase [Ajellomyces dermatitidis SLH14081] gi|239595312|gb|EEQ77893.1| cystathionine gamma-lyase [Ajellomyces dermatitidis SLH14081]
  misc_feature (22)..(401): SWISSPROT Homolog: EC 4.4.1.1 Cystathionine gamma-lyase
MPIPIDSSIETPPRAPSPVHGFGTLAVHAGAPHDPSTGAVIEPISLSTTFVQTGAGKPLGAYEYSRSANPNRDSFEQAVAALEHAKYAVAFSSGSAATATILQSLASGSHVISVSDVYGGTHRYFTRVAKAHGVTVTFTPQIEVDIAEHIRDDTKLVWIETPSNPTLRLVDIRAIATAAHARGVAVVVDNTFLSPYVQNPLDHGADVVVHSVTKYINGHSDVVMGVAAVNSEELRDKLAFLLNAGGAVPSAFDSWLAHRGVKTLHLRVRQSSTNALAVAKALEASPYVVAVNYPGLDSHPQRAVALKQHRNGMGGGMVSFRIKGGRAAAERFCQLTKIYTLAESLGGIESLCEIPSAMTHAGIPRDQREAVGVFDDLVRISNGIEEPEDLVHDVQQALERAVRETEHLVQNGNGVNGHN

SEQ ID NO: 28640 - DNA, 1697 bp, Muscodor strobelii
  misc_feature: SGI EST ID NO. CUFF.67595.1
  misc_feature: Variant of the nucleotide sequence at SEQ ID NO 28638
aaattgtctccctagccaacattgagtctgttctgtaatcttcgttataaaaccagcgttgcttgcgcacgaggactgacaaaaagcgataatcaggtcttatctaaaaggcaattaataccttaaccatgcctatccccatcgactcctccattgagacccctccacgggcaccttcccccgtccacggcttcgggaccctcgcagttcacgccggagcccctcatgatccctccacgggcgctgtcatcgagcccatttctctgtccaccacatttgtccagaccggtgcgggcaagccacttggcgcatacgaatactcgcgaagcgcaaacccgaaccgagacagcttcgaacaggcggtcgccgccctggaacatgctaaatacgccgtcgcattcagcagtggcagcgccgccaccgctaccattctccagagtctcgcttccgggtcgcacgtcattagtgtgagcgacgtttatggtggcacgcaccgttatttcacccgcgttgccaaggcgcatggtgttacagtcacattcacgccgcaaatcgaagttgacattgctgagcacatccgcgatgacaccaaattggtgtggatcgagacacctagcaatcctacgctgaggctcgtcgacatacgcgccatagctactgcagcacatgcacgcggtgtcgccgttgtcgtcgacaacacatttctgagcccatatgtccagaacccgttggatcatggcgccgatgttgttgtacacagtgttaccaagtacataaatggccacagtgacgtggtcatgggagtagcagcggtcaattccgaagagttgcgtgataagctcgcattcttgctcaatgctggcggtgccgtgccatcggcgttcgactcatggctagctcacagaggtgtcaagacgctgcatcttcgtgtacgccagtcgagcaccaatgctttagcagttgccaaagcactagaggcaagcccttacgttgttgctgtcaattatccaggcctagactctcacccgcagcgtgcggttgctttgaagcagcaccgaaacggtatgggtggtggtatggtatcatttcgcattaagggcggtagggccgctgctgagcgattctgccaattgaccaaaatttacaccttggccgagagtctggggggaattgagagtttgtgcgagatccccagtgccatgacacatgctggaataccaagggaccagcgagaggctgtcggtgtgtttgacgatcttgtcaggataagcaatggtattgaggagcccgaggatctggttcacgatgtgcagcaagcgctggaaagggctgtccgagagacggagcatctggttcagaatggaaacggcgttaacgggcacaattgaatagagataccttgacgacacgagagatatgaaaagccatggtaaaatttctgcgcctgatagaggcagcgcatagcattgatataattagacagtttcgggtgtcaattattctcataatatgagaaagggttcagtacctgccttaggcatttagataccaagaggctagattgagccgcatgttaccaagtaaacgttagcgagtcacaagccgtatgtttaagcagatcataaaaagcaagttctgcatccaagctcatctgtatgaattcttcagtgtcctgataagacattcttaagaaggtc

SEQ ID NO: 28641 - DNA, 1095 bp, Muscodor strobelii
  misc_feature: SGI cDNA ID NO. 569825
  misc_feature: Encodes the peptide sequence at SEQ ID NO 28642
atgaaggtaacactacttactctcgcctctgcagctagctttgctggctctgctatggctcacacagtcctctcgaggttattcgtcaatggcgcctctcagggcgacggaacatgtgtacggatgccgagtgatcctggtaccgccacttatccagttgaagacatcacgagcgatgacatggcttgtggcgtcaacggggagaagcccgtgaaattcacctgtcctgtgtcagctggtggaaggttgactttcgagttccgcgcatggcccgatgcttcccagacgggttcgatagaggagggccacaaaggtccatgcgcagtctatgcaaagcaggtcgattcgatgtcgaaagactccgcagccggcccaggttgggtcaagctctgggaagaaggatacgatagcacgaagaagcagtggtgcatcgacaaatttagggagaataacggtctgttgaccatcgaaattcctgagggcttgccatctggctactggcttttccgccccgaactcctagcgcttcacgacgtgccgactactgggcctcaattctttacacaatgtgcgcaggtcttcgttgatggcaatagctcaacgccgcttagtgtgccggccgaacaattggtttctattcctggttatctgggaacaagtgacccgggtctcacgttcaatatctatgagcccaagtttccatacccgattcccggtcccaaggttttcgagattcccgtggcggcagccggtgctaaaattgacgatgcttcgccgccgcagcagacagaaggcgcaatacctccgaactacattgttaagaacggcaattgggttggctttgaagtctcgagctacacggacgagaaaggatgcgatgcggccttcaatgactgtgaaatacaggtggcagcttgctatgacaacgcgcagccaactggcaatgcaggatgcagagctatggagacaagatgcgacgtcgttcgggatacttgcggtgatgggaaatccacaggtccacctgatgggggcaaaaagctgcaggtcaaggagtcagctccgccgggcgagataccggatcccgtcaatatctga

SEQ ID NO: 28642 - protein, 364 aa, Muscodor strobelii
  misc_feature: SGI Peptide ID NO. 569825
  misc_feature (127)..(237): Pfam Id: PF03443 Pfam Desc: Glycosyl hydrolase family 61
  misc_feature (4)..(364): NCBI GI: 39976009 Blast Desc: MGG_06069 [Magnaporthe grisea 70-15] gi|145011646|gb|EDJ96302.1| MGG_06069 [Magnaporthe grisea 70-15]
  misc_feature (1)..(354): NCBI GI: 156049573 Blast Desc: SS1G_08493 [Sclerotinia sclerotiorum 1980] gi|154692892|gb|EDN92630.1| SS1G_08493 [Sclerotinia sclerotiorum 1980]
  misc_feature (8)..(363): NCBI GI: 256726867 Blast Desc: NECHADRAFT_90893 [Nectria haematococca mpVI 77-13-4]
  misc_feature (1)..(359): NCBI GI: 171688352 Blast Desc: protein product [Podospora anserina] gi|170944138|emb|CAP70248.1| protein product [Podospora anserina]
  misc_feature (8)..(359): NCBI GI: 46123661 Blast Desc: FG06208.1 [Gibberella zeae PH-1]
  misc_feature (1)..(346): NCBI GI: 85108848 Blast Desc: NCU07974 [Neurospora crassa OR74A] gi|28924255|gb|EAA33408.1| NCU07974 [Neurospora crassa OR74A]
  misc_feature (20)..(347): NCBI GI: 169772353 Blast Desc: [Aspergillus oryzae RIB40] gi|83768506|dbj|BAE58643.1| protein product [Aspergillus oryzae]
  misc_feature (1)..(353): NCBI GI: 169611244 Blast Desc: SNOG_08732 [Phaeosphaeria nodorum SN15] gi|111062780|gb|EAT83900.1| SNOG_08732 [Phaeosphaeria nodorum SN15]
  misc_feature (1)..(347): NCBI GI: 67523865 Blast Desc: AN2388.2 [Aspergillus nidulans FGSC A4] gi|40745343|gb|EAA64499.1| AN2388.2 [Aspergillus nidulans FGSC A4] gi|259487791|tpe|CBF86741.1| TPA: endoglucanase, [Aspergillus
  misc_feature (18)..(347): NCBI GI: 115383706 Blast Desc: conserved [Aspergillus terreus NIH2624] gi|114196092|gb|EAU37792.1| conserved [Aspergillus terreus NIH2624]
  misc_feature (54)..(244): SWISSPROT Homolog: EC 3.2.1.4 Cellulase
MKVTLLTLASAASFAGSAMAHTVLSRLFVNGASQGDGTCVRMPSDPGTATYPVEDITSDDMACGVNGEKPVKFTCPVSAGGRLTFEFRAWPDASQTGSIEEGHKGPCAVYAKQVDSMSKDSAAGPGWVKLWEEGYDSTKKQWCIDKFRENNGLLTIEIPEGLPSGYWLFRPELLALHDVPTTGPQFFTQCAQVFVDGNSSTPLSVPAEQLVSIPGYLGTSDPGLTFNIYEPKFPYPIPGPKVFEIPVAAAGAKIDDASPPQQTEGAIPPNYIVKNGNWVGFEVSSYTDEKGCDAAFNDCEIQVAACYDNAQPTGNAGCRAMETRCDVVRDTCGDGKSTGPPDGGKKLQVKESAPPGEIPDPVNI

SEQ ID NO: 28643 - DNA, 315 bp, Muscodor strobelii
  misc_feature: SGI cDNA ID NO. 569826
  misc_feature: Reduced expression when VOC is produced
  misc_feature: Encodes the peptide sequence at SEQ ID NO 28644
atggccacctccatccgctccatccgctctctcgtccctctgttggaccgcgtcctcgtccagcgcatcaaggccgagaccaagaccgctagcggcatcttcctgcccgagtccagcgttaaggagctcaacgaggctaaggtcctcgccgtcggccccggtgccgtgtccaaggatggcacccgtgtgcccatgggcgtcgcccagggtgaccgcgttctgattcctcagtacggcggttctcccgtaaaggttggcgaggaggaatttcacctcttccgcgatagcgagatcttggccaagatcaacgaatag

SEQ ID NO: 28644 - protein, 104 aa, Muscodor strobelii
  misc_feature: SGI Peptide ID NO. 569826
  misc_feature (10)..(102): Pfam Id: PF00166 Pfam Desc: Chaperonin 10 Kd subunit
  misc_feature (1)..(104): NCBI GI: 116196854 Blast Desc: conserved [Chaetomium globosum CBS 148.51] gi|88180938|gb|EAQ88406.1| conserved [Chaetomium globosum CBS 148.51]
  misc_feature (1)..(104): NCBI GI: 145603406 Blast Desc: conserved [Magnaporthe grisea 70-15] gi|145011645|gb|EDJ96301.1| conserved [Magnaporthe grisea 70-15]
  misc_feature (1)..(104): NCBI GI: 171688384 Blast Desc: protein product [Podospora anserina] gi|170944154|emb|CAP70264.1| protein product [Podospora anserina]
  misc_feature (1)..(104): NCBI GI: 85079266 Blast Desc: NCU04334 [Neurospora crassa OR74A] gi|28917374|gb|EAA27079.1| conserved [Neurospora crassa OR74A]
  misc_feature (1)..(104): NCBI GI: 256726866 Blast Desc: [Nectria haematococca mpVI 77-13-4]
  misc_feature (2)..(104): NCBI GI: 46123659 Blast Desc: FG06207.1 [Gibberella zeae PH-1]
  misc_feature (4)..(104): NCBI GI: 226278527 Blast Desc: 10 kDa heat shock protein, mitochondrial [Paracoccidioides brasiliensis Pb01]
  misc_feature (4)..(104): NCBI GI: 225684092 Blast Desc: heat shock protein [Paracoccidioides brasiliensis Pb03] gi|226293485|gb|EEH48905.1| 10 kDa heat shock protein, mitochondrial [Paracoccidioides brasiliensis Pb18]
  misc_feature (5)..(104): NCBI GI: 67523953 Blast Desc: AN2432.2 [Aspergillus nidulans FGSC A4] gi|40744982|gb|EAA64138.1| conserved [Aspergillus nidulans FGSC A4] gi|259487845|tpe|CBF86843.1| TPA: chaperonin, AFUA_6G10700)
  misc_feature (1)..(104): NCBI GI: 154303611 Blast Desc: 10 kDa heat shock protein, mitochondrial [Botryotinia fuckeliana B05.10] gi|150854484|gb|EDN29676.1| 10 kDa heat shock protein, mitochondrial [Botryotinia fuckeliana B05.10]
  misc_feature: Useful for introducing or modulating the production of volatile compounds
MATSIRSIRSLVPLLDRVLVQRIKAETKTASGIFLPESSVKELNEAKVLAVGPGAVSKDGTRVPMGVAQGDRVLIPQYGGSPVKVGEEEFHLFRDSEILAKINE

SEQ ID NO: 28645 - DNA, 941 bp, Muscodor strobelii
  misc_feature: SGI EST ID NO. CUFF.67489.0
  misc_feature: Variant of the nucleotide sequence at SEQ ID NO 28643
ctcggaaaaactcaggggactgaaaaaaagtttggatgctgcgacccgaatcttctaaagctttcctagccaatctacacctcgcgatagcttcacacgtcactttgtctcccattcctcatcccccatctcacacgactcgtcatcttccgccctcatcaccaacgcattctctccatccacaatccaaaatggccacctccatccgctccatccgctctctcgtccctctgttggaccgcgtcctcgtccagcgcatcaaggccgagaccaagaccgctagcggcatcttcctgcccgagtccagcgttaaggagctcaacgaggctaaggtcctcgccgtcggccccggtgccgtgtccaaggatggcacccgtgtgcccatgggcgtcgcccagggtgaccgcgttctgattcctcagtacggcggttctcccgtaaaggttggcgaggaggaatttcacctcttccgcgatagcgagatcttggccaagatcaacgaatagagatacccaccgatcgaaaccatgaatttacgaaatcgaccaccaacccttaaatgtactataaaaccgactgccaatgtacaacatgaaaaatctgtgtggtgaaaaatccgaaatcacatcaggcgcatgagaagatcaggcgctcttgtatagatatattctaatagcgaaccaagtgtaaggagtgcgccagtcggagggtgagaggaagggaatcactgtggacgaggaataggatgtctgtacagtctttgtgacgtggacggccgcgtccgagttcatagtgcaattcaatttatctccactctgactgaaatctgcatgtgcttatccctattgacaatctcagacatcggatacagcatgttcaaagctaccgcttgactctcatgatgggtaaactgcgtctttggaagttgagttgcataaaag

SEQ ID NO: 28646 - DNA, 1524 bp, Muscodor strobelii
  misc_feature: SGI cDNA ID NO. 569827
  misc_feature: Encodes the peptide sequence at SEQ ID NO 28647
atgtttggtcattcaactggccaatatgccgccccgagtctcaccgccactgttggcggtatttgcgccgtgctattcgtatatcggctagtcattgtcgtctaccgattatgctttcaccctcttgcccgtttcccagggccgaagctctacgcagccacctttctaccgtatatgatccaagacaagctcaggggccgtctagcaaagggtgttctcaagctccacgaggcatatgggcccattgtcaggatctcgcccaaccgtttgtccatcgacggatcgataggctggccggatgtcttcggcccacgtggtgatcgtcccgagtttgataagaccatcgccttttatggaagagacaagcgcgttggcttgttccctgcgctcaaggaagaccaccgccgacaacgccgcttggtcagccatgccttctctagcgctgcactgctagagcaggagggctacgtgaagcactacgtcgacatcttgatgcgccagctaaaagccaacatggagtccggcaatgtggtagatatgaccaagtggtacaactatactacctttgacatcatcggagagctcgcctttgccgagcccttccactcgctagtcaatagcaactatcatccttggatagctctgctattcagctctatcaagttcagcggcgttgccgcgttctgcagacactacactctattcaaacccttacttttcttcattttcggaaaagatctggcaagaaaacatgcggagtctaggaagcttggcaaagagaaggcggagaagaggattgagcttggtgatgatgacagccggaaggatttcatgacttacattcttcgacataactctgacggtaaggggatgtcccatgaagaagcggtcgtgaatgcacaaggccttattgttgctgggagtgagacgacggccactgcattagtgggattgacgttttaccttggtcagaatcctgaggtttacaagcgactctcaactgaaatccgttcggcattctcttcggaagatgaaatcacaatgacagccgtcgcgcacttgccatatctcaatgcatgtctcgaggaaatccttcgcgtttaccctcccgcggcagaggtgccgccacgtatttctcctggcgaaattgtgggcgaactattcgtgccaaaggggactctctgcaccatatatcaatgggctacgcaccactctccacgcaacttcactgaccccgataactttgtacccgaacgttggcttcctacgcagaatccgatgtataatccacgctacaagtcagacaacaagatggccttcaaaccttttgcttacgggccacgtgactgcattggtaagaaccttgcgtacgctgagatgcgattggtcatgtctcgaatgctgtggaatttcgatttcatgctcgaactaggacaatctgattgggttgataaacaacgaacgtttatcgtttatgagaagggtcctttgatggtccgattaagcccagctgtaagaccttga

SEQ ID NO: 28647 - protein, 507 aa, Muscodor strobelii
  misc_feature: SGI Peptide ID NO. 569827
  misc_feature (46)..(501): Pfam Id: PF00067 Pfam Desc: Cytochrome P450
  misc_feature (125)..(473): Pfam Id: PF00067 Pfam Desc: Cytochrome P450
  misc_feature (32)..(506): NCBI GI: 39975105 Blast Desc: MGG_00301 [Magnaporthe grisea 70-15] gi|145018819|gb|EDK03098.1| MGG_00301 [Magnaporthe grisea 70-15]
  misc_feature (24)..(506): NCBI GI: 189211941 Blast Desc: cytochrome P450 3A17 [Pyrenophora tritici-repentis Pt-1C-BFP] gi|187979497|gb|EDU46123.1| cytochrome P450 3A17 [Pyrenophora tritici-repentis Pt-1C-BFP]
  misc_feature (21)..(503): NCBI GI: 46109716 Blast Desc: FG01740.1 [Gibberella zeae PH-1]
  misc_feature (18)..(501): NCBI GI: 145614919 Blast Desc: conserved [Magnaporthe grisea 70-15] gi|149209141|ref|XP_001521945.1| MGCH7_ch7g63 [Magnaporthe grisea 70-15] gi|86196018|gb|EAQ70656.1| MGCH7_ch7g63 [Magnaporthe
  misc_feature (3)..(501): NCBI GI: 39968473 Blast Desc: MGG_02329 [Magnaporthe grisea 70-15] gi|145014094|gb|EDJ98735.1| MGG_02329 [Magnaporthe grisea 70-15]
  misc_feature (27)..(501): NCBI GI: 39943628 Blast Desc: MGG_03825 [Magnaporthe grisea 70-15] gi|145014513|gb|EDJ99081.1| MGG_03825 [Magnaporthe grisea 70-15]
  misc_feature (27)..(507): NCBI GI: 255936151 Blast Desc: Pc13g06690 [Penicillium chrysogenum Wisconsin 54-1255] gi|211583722|emb|CAP91738.1| Pc13g06690 [Penicillium chrysogenum Wisconsin 54-1255]
  misc_feature (26)..(505): NCBI GI: 169783630 Blast Desc: [Aspergillus oryzae RIB40] gi|83775021|dbj|BAE65144.1| protein product [Aspergillus oryzae]
  misc_feature (18)..(506): NCBI GI: 119481647 Blast Desc: benzoate 4-monooxygenase cytochrome P450 [Neosartorya fischeri NRRL 181] gi|119409006|gb|EAW18955.1| benzoate 4-monooxygenase cytochrome P450 [Neosartorya fischeri NRRL 181]
  misc_feature (34)..(503): NCBI GI: 121716300 Blast Desc: benzoate 4-monooxygenase cytochrome P450 [Aspergillus clavatus NRRL 1] gi|119403916|gb|EAW14333.1| benzoate 4-monooxygenase cytochrome P450 [Aspergillus clavatus NRRL 1]
  misc_feature (129)..(503): SWISSPROT Homolog: EC 1.14.14.1 Unspecific monooxygenase
MFGHSTGQYAAPSLTATVGGICAVLFVYRLVIVVYRLCFHPLARFPGPKLYAATFLPYMIQDKLRGRLAKGVLKLHEAYGPIVRISPNRLSIDGSIGWPDVFGPRGDRPEFDKTIAFYGRDKRVGLFPALKEDHRRQRRLVSHAFSSAALLEQEGYVKHYVDILMRQLKANMESGNVVDMTKWYNYTTFDIIGELAFAEPFHSLVNSNYHPWIALLFSSIKFSGVAAFCRHYTLFKPLLFFIFGKDLARKHAESRKLGKEKAEKRIELGDDDSRKDFMTYILRHNSDGKGMSHEEAVVNAQGLIVAGSETTATALVGLTFYLGQNPEVYKRLSTEIRSAFSSEDEITMTAVAHLPYLNACLEEILRVYPPAAEVPPRISPGEIVGELFVPKGTLCTIYQWATHHSPRNFTDPDNFVPERWLPTQNPMYNPRYKSDNKMAFKPFAYGPRDCIGKNLAYAEMRLVMSRMLWNFDFMLELGQSDWVDKQRTFIVYEKGPLMVRLSPAVRP

SEQ ID NO: 28648 - DNA, 2404 bp, Muscodor strobelii
  misc_feature: SGI EST ID NO. CUFF.67473.0
  misc_feature: Variant of the nucleotide sequence at SEQ ID NO 28646
cttccaataagagcctcatcatatgctaccattcaagagccatataaggtgatcaaatgctcactcccatggagttttcccccagttgtcccaactacgaatagtcctaacagaatcaggtaggtaggtaaaacgaccaataattacatgaggtaacgtacgtggtagaatctcgagctaatctttaggtccaaagtctacgaagttgcaaccatgatctaaacttttgctcaaagtcttgataattggtgtcaatggctgatgctggcgcataggattattcgaagcagagcttgcataagttattaatcccattcacagttatgcaactgaccgccggatcattgagcacaggtatgtactatactgcttctggtcttgcgcatctccaattgcgacgtcggatggtcggacgatcaatatggctgctgctttggtagcagcccctcatatcagatgctgtctgttattttatactcgacataattgtgttatacatacatatgccctgtcggtgcaaggataaactccatatcttatgctgtacgggggcggcactcccgggtcaagtcggtctctgagttatgatgaaaatgcttcggtactaaactccaagagacgtctctctagcattctgactcgactttctttcattctcttgatttcttaagctaagtcgttcaatatgtttggtcattcaactggccaatatgccgccccgagtctcaccgccactgttggcggtatttgcgccgtgctattcgtatatcggctagtcattgtcgtctaccgattatgctttcaccctcttgcccgtttcccagggccgaagctctacgcagccacctttctaccgtatatgatccaagacaagctcaggggccgtctagcaaagggtgttctcaagctccacgaggcatatgggcccattgtcaggatctcgcccaaccgtttgtccatcgacggatcgataggctggccggatgtcttcggcccacgtggtgatcgtcccgagtttgataagaccatcgccttttatggaagagacaagcgcgttggcttgttccctgcgctcaaggaagaccaccgccgacaacgccgcttggtcagccatgccttctctagcgctgcactgctagagcaggagggctacgtgaagcactacgtcgacatcttgatgcgccagctaaaagccaacatggagtccggcaatgtggtagatatgaccaagtggtacaactatactacctttgacatcatcggagagctcgcctttgccgagcccttccactcgctagtcaatagcaactatcatccttggatagctctgctattcagctctatcaagttcagcggcgttgccgcgttctgcagacactacactctattcaaacccttacttttcttcattttcggaaaagatctggcaagaaaacatgcggagtctaggaagcttggcaaagagaaggcggagaagaggattgagcttggtgatgatgacagccggaaggatttcatgacttacattcttcgacataactctgacggtaaggggatgtcccatgaagaagcggtcgtgaatgcacaaggccttattgttgctgggagtgagacgacggccactgcattagtgggattgacgttttaccttggtcagaatcctgaggtttacaagcgactctcaactgaaatccgttcggcattctcttcggaagatgaaatcacaatgacagccgtcgcgcacttgccatatctcaatgcatgtctcgaggaaatccttcgcgtttaccctcccgcggcagaggtgccgccacgtatttctcctggcgaaattgtgggcgaactattcgtgccaaaggggactctctgcaccatatatcaatgggctacgcaccactctccacgcaacttcactgaccccgataactttgtacccgaacgttggcttcctacgcagaatccgatgtataatccacgctacaagtcagacaacaagatggccttcaaaccttttgcttacgggccacgtgactgcattggtaagaaccttgcgtacgctgagatgcgattggtcatgtctcgaatgctgtggaatttcgatttcatgctcgaactaggacaatctgattgggttgataaacaacgaacgtttatcgtttatgagaagggtcctttgatggtccgattaagcccagctgtaagaccttgagcaaaacttgtcgagattgttctggcgccgtttgtcctactcattcacttgcttctgaaaattggaaggttatctatcctagggatgtttaagtgttttttttcttctttcggaagtctgccgtatgcatacgtagcatatttctcacccttaatttaatcatcgatctcagatcttgtaccagtaagggcagca

SEQ ID NO: 28649 - DNA, 1800 bp, Muscodor strobelii
  misc_feature: SGI cDNA ID NO. 569828
  misc_feature: Reduced expression when VOC is produced
  misc_feature: Encodes the peptide sequence at SEQ ID NO 28650
atggcgccacgatcacctcatctacgtcccaactccagaggtcccacgcctccattgacacctgcaggcaccgctgcagtagaccacgctgttggtggcagaagagagcagtccagcggctcagaaagccgcttcccctcgcaagacatcacaccccaggcttcctcgggccaggatcagccccgaattggtctgatccatcgtccggcttcctcagataatatttcccagaaaacaacggccgtggaggaaaaccatcgatcccaccgaaaaggcatgtttagcgttggtggccaatcgttgcccgtatctagagaatcgagtccatcgagaatcgctgcttcccaattctatacaagacctttcacgcctcagggagacgccaacgacccctacgcctcaaacaagcggcagccgcagaccaagagcaccaaggacatcgatccaagattcgttttctctaagaagaagaaacatgcatcgcccacctcttcaacgtccagtctacgtctcgacaagtccgacaagcgccattcgggtctcttcaaccaccgaaacaaatccggagaccttcacgcgacaggcacacactctagtggaaatcatagccagcagtcatccatgtcggatctcaggagatttttcaaagtgggcgccggccacaaatcaaagaagcagcagtcgggcaccgccacgccaacatctcaccaagtccctttcgccgacgaccacgggctatcctcgcggtacggcaagataggtcgggtgcttggatctggtgctggtggctccgtcaaactcatgaaacgaagcgaggacaatacagtgttcgctgtcaaagagttccggcctcgccattcttacgagacggagaaggagtacgtcaagaagctgaccgctgagttttgtgtcggctcagcgctccatcatgggaatatcattgagactttggacatcgtccaggagaaaggaaaatggtacgaggtcatggagtatgccccgttcgatctgttcgccatcgtcatgaccggcaagatgagcaaggccgaagtcaactgctgtttcctccaaattctgagcggtgtcacataccttcacagctccggcctcgcgcatcgcgatctgaaattggataatgttgtcgttagtgagcatggcattatgaaaatcatcgactttggtagcgcacatgtattcaaatacccctttgagagcgaaatagtcatggcgcatggtattgtcggctccgatccctatctcgctcctgaggtctatgacaatcgcctgtatgatccccaagcggtcgacatctggtctctcgccatcatttactgttgcatgtcgctgcgacgatttccctggaagttgccgcggatgacagataattcattcaagttgtttgcatcggacccaacccctggacatgacccgaagaagttgatattaccgtcgaggtctacgggtgacttagcagacacgccttcgcgagactttgtgccttccgagccaccaaaaagtccagccaagccgacgacgactgacggctccaaggaacctgagcgtaaggagatcattcgaggaccgtggcgtctgttacgtctgcttcctagagagactagacatgttattggacggatgctggtcatcgatccgaaacaccgcgctgccatgtcggagattctggacgacccttgggtatctgatacggtcatctgtaggcaagttggccctggacagatcgtcaaggccgatgatcatactcatatcctcgaaccaccggcaccggctgcatccaagtaa

SEQ ID NO: 28650 - protein, 599 aa, Muscodor strobelii
  misc_feature: SGI Peptide ID NO. 569828
  misc_feature (251)..(566): Pfam Id: PF00069 Pfam Desc: Protein kinase domain
  misc_feature (16)..(591): NCBI GI: 39976007 Blast Desc: MGG_06070 [Magnaporthe grisea 70-15] gi|145011644|gb|EDJ96300.1| MGG_06070 [Magnaporthe grisea 70-15]
  misc_feature (16)..(594): NCBI GI: 256726865 Blast Desc: NECHADRAFT_66275 [Nectria haematococca mpVI 77-13-4]
  misc_feature (4)..(594): NCBI GI: 46123657 Blast Desc: FG06206.1 [Gibberella zeae PH-1]
  misc_feature (5)..(599): NCBI GI: 171688386 Blast Desc: protein product [Podospora anserina] gi|170944155|emb|CAP70265.1| protein product [Podospora anserina]
  misc_feature (5)..(599): NCBI GI: 85079269 Blast Desc: NCU04335 [Neurospora crassa OR74A] gi|28917375|gb|EAA27080.1| conserved [Neurospora crassa OR74A]
  misc_feature (5)..(595): NCBI GI: 261352379 Blast Desc: nitrogen permease reactivator protein [Verticillium albo-atrum VaMs.102]
  misc_feature (16)..(598): NCBI GI: 116196856 Blast Desc: CHGG_05026 [Chaetomium globosum CBS 148.51] gi|88180939|gb|EAQ88407.1| CHGG_05026 [Chaetomium globosum CBS 148.51]
  misc_feature (5)..(598): NCBI GI: 156049575 Blast Desc: SS1G_08494 [Sclerotinia sclerotiorum 1980] gi|154692893|gb|EDN92631.1| SS1G_08494 [Sclerotinia sclerotiorum 1980]
  misc_feature (16)..(595): NCBI GI: 154303609 Blast Desc: BC1G_08689 [Botryotinia fuckeliana B05.10] gi|150854483|gb|EDN29675.1| BC1G_08689 [Botryotinia fuckeliana B05.10]
  misc_feature (16)..(598): NCBI GI: 189206003 Blast Desc: nitrogen permease reactivator protein [Pyrenophora tritici-repentis Pt-1C-BFP] gi|187975429|gb|EDU42055.1| nitrogen permease reactivator protein [Pyrenophora tritici-repentis
  misc_feature (126)..(597): SWISSPROT Homolog: EC 2.7.11.1 Non-specific serine/threonine protein kinase
  misc_feature: Useful for introducing or modulating the production of volatile compounds
MAPRSPHLRPNSRGPTPPLTPAGTAAVDHAVGGRREQSSGSESRFPSQDITPQASSGQDQPRIGLIHRPASSDNISQKTTAVEENHRSHRKGMFSVGGQSLPVSRESSPSRIAASQFYTRPFTPQGDANDPYASNKRQPQTKSTKDIDPRFVFSKKKKHASPTSSTSSLRLDKSDKRHSGLFNHRNKSGDLHATGTHSSGNHSQQSSMSDLRRFFKVGAGHKSKKQQSGTATPTSHQVPFADDHGLSSRYGKIGRVLGSGAGGSVKLMKRSEDNTVFAVKEFRPRHSYETEKEYVKKLTAEFCVGSALHHGNIIETLDIVQEKGKWYEVMEYAPFDLFAIVMTGKMSKAEVNCCFLQILSGVTYLHSSGLAHRDLKLDNVVVSEHGIMKIIDFGSAHVFKYPFESEIVMAHGIVGSDPYLAPEVYDNRLYDPQAVDIWSLAIIYCCMSLRRFPWKLPRMTDNSFKLFASDPTPGHDPKKLILPSRSTGDLADTPSRDFVPSEPPKSPAKPTTTDGSKEPERKEIIRGPWRLLRLLPRETRHVIGRMLVIDPKHRAAMSEILDDPWVSDTVICRQVGPGQIVKADDHTHILEPPAPAASK

SEQ ID NO: 28651 - DNA, 2327 bp, Muscodor strobelii
  misc_feature: SGI EST ID NO. CUFF.67841.1
  misc_feature: Variant of the nucleotide sequence at SEQ ID NO 28649
gctatctatgctctgtgtgcctcaggtctcgcgtgcgccttgaagtatcatggcgtgagttaatgggaaaccacattggcgctgacaaattttggttcttaggtcccctcaagcgacaccacgcccggcgcaactccccaacagagccatagtcccatggcgccacgatcacctcatctacgtcccaactccagaggtcccacgcctccattgacacctgcaggcaccgctgcagtagaccacgctgttggtggcagaagagagcagtccagcggctcagaaagccgcttcccctcgcaagacatcacaccccaggcttcctcgggccaggatcagccccgaattggtctgatccatcgtccggcttcctcagataatatttcccagaaaacaacggccgtggaggaaaaccatcgatcccaccgaaaaggcatgtttagcgttggtggccaatcgttgcccgtatctagagaatcgagtccatcgagaatcgctgcttcccaattctatacaagacctttcacgcctcagggagacgccaacgacccctacgcctcaaacaagcggcagccgcagaccaagagcaccaaggacatcgatccaagattcgttttctctaagaagaagaaacatgcatcgcccacctcttcaacgtccagtctacgtctcgacaagtccgacaagcgccattcgggtctcttcaaccaccgaaacaaatccggagaccttcacgcgacaggcacacactctagtggaaatcatagccagcagtcatccatgtcggatctcaggagatttttcaaagtgggcgccggccacaaatcaaagaagcagcagtcgggcaccgccacgccaacatctcaccaagtccctttcgccgacgaccacgggctatcctcgcggtacggcaagataggtcgggtgcttggatctggtgctggtggctccgtcaaactcatgaaacgaagcgaggacaatacagtgttcgctgtcaaagagttccggcctcgccattcttacgagacggagaaggagtacgtcaagaagctgaccgctgagttttgtgtcggctcagcgctccatcatgggaatatcattgagactttggacatcgtccaggagaaaggaaaatggtacgaggtcatggagtatgccccgttcgatctgttcgccatcgtcatgaccggcaagatgagcaaggccgaagtcaactgctgtttcctccaaattctgagcggtgtcacataccttcacagctccggcctcgcgcatcgcgatctgaaattggataatgttgtcgttagtgagcatggcattatgaaaatcatcgactttggtagcgcacatgtattcaaatacccctttgagagcgaaatagtcatggcgcatggtattgtcggctccgatccctatctcgctcctgaggtctatgacaatcgcctgtatgatccccaagcggtcgacatctggtctctcgccatcatttactgttgcatgtcgctgcgacgatttccctggaagttgccgcggatgacagataattcattcaagttgtttgcatcggacccaacccctggacatgacccgaagaagttgatattaccgtcgaggtctacgggtgacttagcagacacgccttcgcgagactttgtgccttccgagccaccaaaaagtccagccaagccgacgacgactgacggctccaaggaacctgagcgtaaggagatcattcgaggaccgtggcgtctgttacgtctgcttcctagagagactagacatgttattggacggatgctggtcatcgatccgaaacaccgcgctgccatgtcggagattctggacgacccttgggtatctgatacggtcatctgtaggcaagttggccctggacagatcgtcaaggccgatgatcatactcatatcctcgaaccaccggcaccggctgcatccaagtaaagaagactcttcgttcggatgccgtaccttctctaaattgcatttgcatcatgcacaccagcgattcgcttctacgacaaagttgtatcattattaaaggctttactatttttgcttctgcagcattttcgcgtatcagtcgtgttttggacacccacccggcgctttgtttgggttggtcagcgaggggatggtgattagggacaggtttaaggtcgtacaggtatagaccaatgaataatcattcggaatagatagacaaatagtcttctgagttgtcaataagattatatttatacattgtcctgtgcttcacattcaattcatggaacctgctggaatgagattatgatccatttcgctatagctgt

SEQ ID NO: 28652 - DNA, 5292 bp, Muscodor strobelii
  misc_feature: SGI cDNA ID NO. 569829
  misc_feature: Encodes the peptide sequence at SEQ ID NO 28653
atggacgacccatgggattggaacgaggacaaggttgtgctggaactttgtactcctggacgaccttggtactcgtctgagaatcctactaaacttccgccattcgagacgttgaaagtttcacttcgtgataatgaagtcgatggacaggttctcctcacttacgatgaagctgaactttgtgtcggcctgggcttaaagtccataaagcataaatcagtgttcaggaatgcgataagcgaacttcgtcgacgaagccttcgatacagagtttggcaaaaacggcaagcttcaggatttgaggacgatctcgatggtacacctgacggcataaggcacgaccctcaacatgatatatcctccaacctcccagagggaggctccgtacccgtgacccaagctcccgcactatcatcagaattggaggactctctgatggctgacacgcctccaccaaagagacgaagagttgtgcccacaatcatcacctcgcagatcgatccagacaggaaccgaactatcatcactgaagcagatgttataccgtctgggcggaaagcaacttacaccatgagcgagtcgtcacttgatggcacctcatcgtcgcttgcatatctaggagacgaatctgtagtgagatttgagttcttcgactccaatacggatatcttgtcagagcccctgactatagaggaaagacagatcaaccacatttccagtcactgcccactcccaggacgacttcatcaagcccatcgactagtcaagcgtcacctactccgtcgaaaccattacgcacgttcgtcgcgcaccaaaagggacatggttccaggaatgactcaccctgatcacgatgaggtgcttcctgcatatggtgattccgatgacgagctggagttcgactctgctacctgggccgaaatagaggcagagatgagagagcagactcagcaaaaggagaaattccttgcacgcaaagtccttaccatggaacagatcaatgaagtcgtgcagaaaaggattgctgagatggctgcagactggaggtcaaagaaactgccgaagcatgcccataaagctaatcggatctggaacgacgcacgtagatccgatttaaaggcggctctggatattgttcgtactgatattcaagagttcaatgtgcgcattgcgaagctcaaaagtcaataccaaaaaggtgaatggagcaatgcggcagagttggaatccaggttgagcaatctggaagctagtattcacgacaaggaacaccgttcttggctcctaggtatcctcaactctcctacagagccggccaagatcccgcgatctcggaaagctgtcaaaaggatcccgaagcctgcgcctgccattggcttagctgaagatgaagaaattctcacgagcgaatccgaagacgatttgcgagattttgtcattgatgacaccgataatgaaatcgataacatcgattcacgcatggacgtagaagacgaagatccggcacaacctgaggaggctcagcatccagaagtctcagacattgaaatgctgtcttctgatggtgacgctcagatacaggagtctaaggatgagtatgatatgccagacaaggctcatagctcctcagattccgctgcaactccaagtcggacacgtatcaaattcatctccaaggcctcgccaaagacgccgtcgcatcgcaaagtcaccgaaatcatcgatttgactactcccgagacgtcaacccacagattgagctgcacagaccgtcgtacaattagacttagcaaaaccccaagccccgacggtcaggagtctcacacaagccattccatacagactcctagcaagaaaaagcgaagccgttccaaatccactttggaggacatgttgataatgggcattgaagacttgactagcgctgagtacaaggttgttcaagctatatctaattatgatcaactgtacatcaacgccatgttctccattgtcagccaaacgtcaccggaagatgtttggtatgatttggtgtctgtcgcgcttggtcaaaacttcatcaaagggccctatgatacggatgataagaaaaacatgcttctcggttatgcattcatacgcttatttgagatatatcaacacgacgctcacgtcaagaataccaagttctacaatctttctcccgatgaaagacgagaacttcaaagcgtatactcgtcctattctactcaatggagctttttcatcgatcttcttgctcgcctaaaggatcgattcaagtgggaacgaagacaaatgcgaagcaagagagaccgtcaatctgcaacgtcaactccagatacgagcacgaagacgaacgctggccatgtgtccttgctctctgacgttgacaacagctccgatgagccaccgctttcttctgttaagagaaagaagaagcgcaggcaagtcaagcgtgaccaacaagcagccgagcaccgcgcccacgaccaagctgatgctgcagaacaagaaaaacggaggaaagtcctccgtgccaggatggatgccgggggcaacgaagcagtgggtagccagcaggaaatgattatcattaacgagacgaaggccgacgacgaagacttcgtgtatatccacccattcatcgcgggtagaatcaaagaacaccaaataacaggagttcggtttatgtgggatcaagttatcaattccaagactcgacaaggatgtctgcttgcccacacaatgggtcttggaaagaccatgcagatcattacactattggttgccatctatgaagctgcaaactcgcccgatcctacagtttcatcccagatccctgaagagctgcaagaatcaaagactttgatactttgcccgcctacgctcgtcaacaattggtacgatgaactgctcctctggtgtcctaacgaccaacaagaaaatatcggagcccttcggaaagtagacagtttgctgtctcaaacccaacgaatagccaaaatccgcgcttggaatgaaacgggtggcgttctcctaattgggtaccatctcttcaaaaaagccattgatgatatcgcagacatgcgagatatacttgtcaacggtcccaatatcgtggttgcagacgaggctcattatatgaagagtgttaaatctaaaatccacgaagctaccgccaacttcagaacattgactcgcttggctctcaccgggtctcctctggcgaacaatgtcgaagaatacttttcgatgatcaactgggttgcgccgaactatttgggcgatattaaagaattccgtgcccaatatgccactccgatcaaagaaggactgtcaatcgacagtgggccctgggagagacgcaaagcattaaaaatgttacgggtgctgaagtcagaagtgtcgccgaaagtaagccggatcacgatctcggtcctgaagaatgatatccccaacaagaaagaattcgttctttcagtccctctgactccacttcaaaaagagttgtatgagttgtacatcagatatcatcaaacagttggatcccacgttccggtcttcgcaacccatgaccttggcctcatctgtgcgcatcccctgatattcttgagcaaactacaagaagtgaaggaacaaagcaccggtgctagaaagaagaccgaggagctaatgaccctaccccaagtgctcgtcggtgaagcgatgagagtgatacatcaggccttgcgctcaactaaggcaaatgaagatgcaatgtcttggaagatacccctactgctggagatactagcccaatgcgagaagctccgagagaaagtactcatcttctcccattccaaaccaacgctcgactatcttgaaaagattttgcgccaacgcaagctttccattctacgtttagatggtgacacacccatgggggagcgccagaatctagtcaaaggcttcaataacgaagaaggaggaggggaagatgtattcatcatcagtacaaaagctggtggtctaggactcaatatcaccggcgcgaatagagttgtcatcttcgactcacagttcaatcctcagaatgaacaacaagcagtcggccgcgcatatcgaattggacaagacaaacccgttttcgtttaccgtttctgttgtggcggcacatttgagcaaaagatgctcacccaagccatttggaaaatgcagctggcctcacgagttgtggacaagaagcacccgattcctaaagcccaacgttttgatggggcacatacaatgcctgaggatcctccccaacaggacctgacacttcatattggcaaagatggtgttcttgactacctcttaagcaacgaagagtatcgggaaggtatcagatctctagagatgatggatacttttgaagaggaggcaatagaggaggcggaactgtccattgaagatcgtgatgaagcggacaggattatcaaagaaaatgaagcacgaagattgggaataccgatgcctccttcgcttgtcgcagcctccggattacctgtccctacacccgatccgagtcttgagcatcttggcattgccactttggcacagttcaacaatcttcgtccacctaatctaaattctttaccaggtccactcccctatcacccatcagctccctctattatgagacctagcaccacacctcgtcctgctgctgcggcctctgctccccagcctgtgacatccgtcccaccaagcatgacggctcagaattctggcccgtcacctcctaagaatgtgccttccatgccgtcaggtccccctgttcaacttcccggttcaccacagatgcaatatcgaaagaccacaaccgttccaattcgagacactagtcgtgcaagtagtcaatgggaaaaccttgcgtcattttatgcagagctcaaacggttatttattcagaaggcaccaaatttccaagacgagaaaacaagagttgatgtcgctcatggtctctcaaatgctatttggacctgcactaaccaaaggccagtagaggagcaaggcgccgtgaagtgggctgtcatagatgccgcgtccgagtcacgcttcgtcgaagctatctgcatgaagcttgtaaacatggaggaccttgcacgcatgtcgccagacgacattgttaagcagtgtgatgcttggctgcaaatagacgatgctgagtgggaagcaaggaaaggtgcttggagccaacgaaaggagacaggcgacccaaaaagtacaaacccctggtggatacgaggaatctttgcgcagcaacgctaa

SEQ ID NO: 28653 - protein, 1763 aa, Muscodor strobelii
  misc_feature: SGI Peptide ID NO. 569829
  misc_feature (1290)..(1370): Pfam Id: PF00271 Pfam Desc: Helicase conserved C-terminal domain
  misc_feature (889)..(1203): Pfam Id: PF00176 Pfam Desc: SNF2 family N-terminal domain
  misc_feature (889)..(1171): Pfam Id: PF00176 Pfam Desc: SNF2 family N-terminal domain
  misc_feature (2)..(1560): NCBI GI: 225557866 Blast Desc: conserved [Ajellomyces capsulatus G186AR]
  misc_feature (254)..(1493): NCBI GI: 156052062 Blast Desc: SS1G_07439 [Sclerotinia sclerotiorum 1980] gi|154705216|gb|EDO04955.1| SS1G_07439 [Sclerotinia sclerotiorum 1980]
  misc_feature (283)..(1493): NCBI GI: 154309786 Blast Desc: BC1G_07363 [Botryotinia fuckeliana B05.10] gi|150851824|gb|EDN27017.1| BC1G_07363 [Botryotinia fuckeliana B05.10]
  misc_feature (3)..(1600): NCBI GI: 258572168 Blast Desc: [Uncinocarpus reesii 1704] gi|237905116|gb|EEP79517.1| [Uncinocarpus reesii 1704]
  misc_feature (2)..(1467): NCBI GI: 240274020 Blast Desc: SNF2 family helicase/ATPase [Ajellomyces capsulatus H143]
  misc_feature (820)..(1484): NCBI GI: 171685718 Blast Desc: protein product [Podospora anserina] gi|170942820|emb|CAP68473.1| protein product [Podospora anserina]
  misc_feature (809)..(1492): NCBI GI: 46125779 Blast Desc: FG07267.1 [Gibberella zeae PH-1]
  misc_feature (813)..(1608): NCBI GI: 39977089 Blast Desc: MGG_06447 [Magnaporthe grisea 70-15] gi|145016135|gb|EDK00625.1| MGG_06447 [Magnaporthe grisea 70-15]
  misc_feature (811)..(1580): NCBI GI: 261198491 Blast Desc: SNF2 family helicase/ATPase [Ajellomyces dermatitidis SLH14081] gi|239594799|gb|EEQ77380.1| SNF2 family helicase/ATPase [Ajellomyces dermatitidis SLH14081] gi|239610080|gb|EEQ87067.1|
  misc_feature (835)..(1532): NCBI GI: 261360143 Blast Desc: 5-aminolevulinate synthase [Verticillium albo-atrum VaMs.102]
MDDPWDWNEDKVVLELCTPGRPWYSSENPTKLPPFETLKVSLRDNEVDGQVLLTYDEAELCVGLGLKSIKHKSVFRNAISELRRRSLRYRVWQKRQASGFEDDLDGTPDGIRHDPQHDISSNLPEGGSVPVTQAPALSSELEDSLMADTPPPKRRRVVPTIITSQIDPDRNRTIITEADVIPSGRKATYTMSESSLDGTSSSLAYLGDESVVRFEFFDSNTDILSEPLTIEERQINHISSHCPLPGRLHQAHRLVKRHLLRRNHYARSSRTKRDMVPGMTHPDHDEVLPAYGDSDDELEFDSATWAEIEAEMREQTQQKEKFLARKVLTMEQINEVVQKRIAEMAADWRSKKLPKHAHKANRIWNDARRSDLKAALDIVRTDIQEFNVRIAKLKSQYQKGEWSNAAELESRLSNLEASIHDKEHRSWLLGILNSPTEPAKIPRSRKAVKRIPKPAPAIGLAEDEEILTSESEDDLRDFVIDDTDNEIDNIDSRMDVEDEDPAQPEEAQHPEVSDIEMLSSDGDAQIQESKDEYDMPDKAHSSSDSAATPSRTRIKFISKASPKTPSHRKVTEIIDLTTPETSTHRLSCTDRRTIRLSKTPSPDGQESHTSHSIQTPSKKKRSRSKSTLEDMLIMGIEDLTSAEYKVVQAISNYDQLYINAMFSIVSQTSPEDVWYDLVSVALGQNFIKGPYDTDDKKNMLLGYAFIRLFEIYQHDAHVKNTKFYNLSPDERRELQSVYSSYSTQWSFFIDLLARLKDRFKWERRQMRSKRDRQSATSTPDTSTKTNAGHVSLLSDVDNSSDEPPLSSVKRKKKRRQVKRDQQAAEHRAHDQADAAEQEKRRKVLRARMDAGGNEAVGSQQEMIIINETKADDEDFVYIHPFIAGRIKEHQITGVRFMWDQVINSKTRQGCLLAHTMGLGKTMQIITLLVAIYEAANSPDPTVSSQIPEELQESKTLILCPPTLVNNWYDELLLWCPNDQQENIGALRKVDSLLSQTQRIAKIRAWNETGGVLLIGYHLFKKAIDDIADMRDILVNGPNIVVADEAHYMKSVKSKIHEATANFRTLTRLALTGSPLANNVEEYFSMINWVAPNYLGDIKEFRAQYATPIKEGLSIDSGPWERRKALKMLRVLKSEVSPKVSRITISVLKNDIPNKKEFVLSVPLTPLQKELYELYIRYHQTVGSHVPVFATHDLGLICAHPLIFLSKLQEVKEQSTGARKKTEELMTLPQVLVGEAMRVIHQALRSTKANEDAMSWKIPLLLEILAQCEKLREKVLIFSHSKPTLDYLEKILRQRKLSILRLDGDTPMGERQNLVKGFNNEEGGGEDVFIISTKAGGLGLNITGANRVVIFDSQFNPQNEQQAVGRAYRIGQDKPVFVYRFCCGGTFEQKMLTQAIWKMQLASRVVDKKHPIPKAQRFDGAHTMPEDPPQQDLTLHIGKDGVLDYLLSNEEYREGIRSLEMMDTFEEEAIEEAELSIEDRDEADRIIKENEARRLGIPMPPSLVAASGLPVPTPDPSLEHLGIATLAQFNNLRPPNLNSLPGPLPYHPSAPSIMRPSTTPRPAAAASAPQPVTSVPPSMTAQNSGPSPPKNVPSMPSGPPVQLPGSPQMQYRKTTTVPIRDTSRASSQWENLASFYAELKRLFIQKAPNFQDEKTRVDVAHGLSNAIWTCTNQRPVEEQGAVKWAVIDAASESRFVEAICMKLVNMEDLARMSPDDIVKQCDAWLQIDDAEWEARKGAWSQRKETGDPKSTNPWWIRGIFAQQR

SEQ ID NO: 28654 - DNA, 6962 bp, Muscodor strobelii
  misc_feature: SGI EST ID NO. CUFF.67504.0
  misc_feature: Variant of the nucleotide sequence at SEQ ID NO 28652
gttcggtcccgcctacgatctcgagactggataccttttgatatcacagagcttttctatagcagtattgcgaaattgctcacggcgcggtgggctgaatataagccaacagcaaatttcgccccggccagagtaagaatccggtgcaatagaggctataaaaaaaacctcgttaccacgacgttcaggctttatttctatatcacgaaggccaactatatattacctcatgtcacctgcatactgagggattagccgccagcaaacttgtgagtttcctgtttcagattctgtcattctcacttacggaccctaaaatcatctcctaccaaatttgcggatgatttccaccatttcatggtgtttcgcatccatgtcaatatcctgaggttttcatgatgacttgagatagcagatgcaattgcatttcgctgctcttatattcttggttcatgttatcttgcaacctgccgcgccctacttctccaaattccaatgaacctacgcactcctgaagatgtatctacactagttactcactcaaggaatgccgctaaatagttttattgctggcccctactacctataaatattggaactactgaatttgtgctgcctttcactcgacctagatactccttctgttaagttacatcactgacgcagcatagacgaccgagtccaggattcgtaatgtgctttgcccacagcatactcctcctttcatgatggacgacccatgggattggaacgaggacaaggttgtgctggaactttgtactcctggacgaccttggtactcgtctgagaatcctactaaacttccgccattcgagacgttgaaagtttcacttcgtgataatgaagtcgatggacaggttctcctcacttacgatgaagctgaactttgtgtcggcctgggcttaaagtccataaagcataaatcagtgttcaggaatgcgataagcgaacttcgtcgacgaagccttcgatacagagtttggcaaaaacggcaagcttcaggatttgaggacgatctcgatggtacacctgacggcataaggcacgaccctcaacatgatatatcctccaacctcccagagggaggctccgtacccgtgacccaagctcccgcactatcatcagaattggaggactctctgatggctgacacgcctccaccaaagagacgaagagttgtgcccacaatcatcacctcgcagatcgatccagacaggaaccgaactatcatcactgaagcagatgttataccgtctgggcggaaagcaacttacaccatgagcgagtcgtcacttgatggcacctcatcgtcgcttgcatatctaggagacgaatctgtagtgagatttgagttcttcgactccaatacggatatcttgtcagagcccctgactatagaggaaagacagatcaaccacatttccagtcactgcccactcccaggacgacttcatcaagcccatcgactagtcaagcgtcacctactccgtcgaaaccattacgcacgttcgtcgcgcaccaaaagggacatggttccaggaatgactcaccctgatcacgatgaggtgcttcctgcatatggtgattccgatgacgagctggagttcgactctgctacctgggccgaaatagaggcagagatgagagagcagactcagcaaaaggagaaattccttgcacgcaaagtccttaccatggaacagatcaatgaagtcgtgcagaaaaggattgctgagatggctgcagactggaggtcaaagaaactgccgaagcatgcccataaagctaatcggatctggaacgacgcacgtagatccgatttaaaggcggctctggatattgttcgtactgatattcaagagttcaatgtgcgcattgcgaagctcaaaagtcaataccaaaaaggtgaatggagcaatgcggcagagttggaatccaggttgagcaatctggaagctagtattcacgacaaggaacaccgttcttggctcctaggtatcctcaactctcctacagagccggccaagatcccgcgatctcggaaagctgtcaaaaggatcccgaagcctgcgcctgccattggcttagctgaagatgaagaaattctcacgagcgaatccgaagacgatttgcgagattttgtcattgatgacaccgataatgaaatcgataacatcgattcacgcatggacgtagaagacgaagatccggcacaacctgaggaggctcagcatccagaagtctcagacattgaaatgctgtcttctgatggtgacgctcagatacaggagtctaaggatgagtatgatatgccagacaaggctcatagctcctcagattccgctgcaactccaagtcggacacgtatcaaattcatctccaaggcctcgccaaagacgccgtcgcatcgcaaagtcaccgaaatcatcgatttgactactcccgagacgtcaacccacagattgagctgcacagaccgtcgtacaattagacttagcaaaaccccaagccccgacggtcaggagtctcacacaagccattccatacagactcctagcaagaaaaagcgaagccgttccaaatccactttggaggacatgttgataatgggcattgaagacttgactagcgctgagtacaaggttgttcaagctatatctaattatgatcaactgtacatcaacgccatgttctccattgtcagccaaacgtcaccggaagatgtttggtatgatttggtgtctgtcgcgcttggtcaaaacttcatcaaagggccctatgatacggatgataagaaaaacatgcttctcggttatgcattcatacgcttatttgagatatatcaacacgacgctcacgtcaagaataccaagttctacaatctttctcccgatgaaagacgagaacttcaaagcgtatactcgtcctattctactcaatggagctttttcatcgatcttcttgctcgcctaaaggatcgattcaagtgggaacgaagacaaatgcgaagcaagagagaccgtcaatctgcaacgtcaactccagatacgagcacgaagacgaacgctggccatgtgtccttgctctctgacgttgacaacagctccgatgagccaccgctttcttctgttaagagaaagaagaagcgcaggcaagtcaagcgtgaccaacaagcagccgagcaccgcgcccacgaccaagctgatgctgcagaacaagaaaaacggaggaaagtcctccgtgccaggatggatgccgggggcaacgaagcagtgggtagccagcaggaaatgattatcattaacgagacgaaggccgacgacgaagacttcgtgtatatccacccattcatcgcgggtagaatcaaagaacaccaaataacaggagttcggtttatgtgggatcaagttatcaattccaagactcgacaaggatgtctgcttgcccacacaatgggtcttggaaagaccatgcagatcattacactattggttgccatctatgaagctgcaaactcgcccgatcctacagtttcatcccagatccctgaagagctgcaagaatcaaagactttgatactttgcccgcctacgctcgtcaacaattggtacgatgaactgctcctctggtgtcctaacgaccaacaagaaaatatcggagcccttcggaaagtagacagtttgctgtctcaaacccaacgaatagccaaaatccgcgcttggaatgaaacgggtggcgttctcctaattgggtaccatctcttcaaaaaagccattgatgatatcgcagacatgcgagatatacttgtcaacggtcccaatatcgtggttgcagacgaggctcattatatgaagagtgttaaatctaaaatccacgaagctaccgccaacttcagaacattgactcgcttggctctcaccgggtctcctctggcgaacaatgtcgaagaatacttttcgatgatcaactgggttgcgccgaactatttgggcgatattaaagaattccgtgcccaatatgccactccgatcaaagaaggactgtcaatcgacagtgggccctgggagagacgcaaagcattaaaaatgttacgggtgctgaagtcagaagtgtcgccgaaagtaagccggatcacgatctcggtcctgaagaatgatatccccaacaagaaagaattcgttctttcagtccctctgactccacttcaaaaagagttgtatgagttgtacatcagatatcatcaaacagttggatcccacgttccggtcttcgcaacccatgaccttggcctcatctgtgcgcatcccctgatattcttgagcaaactacaagaagtgaaggaacaaagcaccggtgctagaaagaagaccgaggagctaatgaccctaccccaagtgctcgtcggtgaagcgatgagagtgatacatcaggccttgcgctcaactaaggcaaatgaagatgcaatgtcttggaagatacccctactgctggagatactagcccaatgcgagaagctccgagagaaagtactcatcttctcccattccaaaccaacgctcgactatcttgaaaagattttgcgccaacgcaagctttccattctacgtttagatggtgacacacccatgggggagcgccagaatctagtcaaaggcttcaataacgaagaaggaggaggggaagatgtattcatcatcagtacaaaagctggtggtctaggactcaatatcaccggcgcgaatagagttgtcatcttcgactcacagttcaatcctcagaatgaacaacaagcagtcggccgcgcatatcgaattggacaagacaaacccgttttcgtttaccgtttctgttgtggcggcacatttgagcaaaagatgctcacccaagccatttggaaaatgcagctggcctcacgagttgtggacaagaagcacccgattcctaaagcccaacgttttgatggggcacatacaatgcctgaggatcctccccaacaggacctgacacttcatattggcaaagatggtgttcttgactacctcttaagcaacgaagagtatcgggaaggtatcagatctctagagatgatggatacttttgaagaggaggcaatagaggaggcggaactgtccattgaagatcgtgatgaagcggacaggattatcaaagaaaatgaagcacgaagattgggaataccgatgcctccttcgcttgtcgcagcctccggattacctgtccctacacccgatccgagtcttgagcatcttggcattgccactttggcacagttcaacaatcttcgtccacctaatctaaattctttaccaggtccactcccctatcacccatcagctccctctattatgagacctagcaccacacctcgtcctgctgctgcggcctctgctccccagcctgtgacatccgtcccaccaagcatgacggctcagaattctggcccgtcacctcctaagaatgtgccttccatgccgtcaggtccccctgttcaacttcccggttcaccacagatgcaatatcgaaagaccacaaccgttccaattcgagacactagtcgtgcaagtagtcaatgggaaaaccttgcgtcattttatgcagagctcaaacggttatttattcagaaggcaccaaatttccaagacgagaaaacaagagttgatgtcgctcatggtctctcaaatgctatttggacctgcactaaccaaaggccagtagaggagcaaggcgccgtgaagtgggctgtcatagatgccgcgtccgagtcacgcttcgtcgaagctatctgcatgaagcttgtaaacatggaggaccttgcacgcatgtcgccagacgacattgttaagcagtgtgatgcttggctgcaaatagacgatgctgagtgggaagcaaggaaaggtgcttggagccaacgaaaggagacaggcgacccaaaaagtacaaacccctggtggatacgaggaatctttgcgcagcaacgctaatcgtagtatttcagcatctccaacaagcaatacagagaatgatatcagtgccgagtagagttgcatctggtcagagcaaatctggctcacatcggctcggcgatcaggaggccctcaaagcagtccaagaggctaggacatcgagaactaagagcatcggcgaccaaggagcattacaagcaatgatgggcaggaaaacaaagaaacttccagactgggccaagaacgcggttttggcaaaatctccaaccccctcatcctcagcaccaccccctaaaacgtcaaagtccactgatacaggaacaacagcacgagcaccacaaccgaggaccccttttaagtgaagtgtcggctcactaccatactaatcagtctttctcctacatttataacgagaaatcacggtgctgcccctttgacttttcctgttcacgggtttctttctagtcggaattcattgtgggaaagggatcaaccacttcgatattctcacactctggcgtctggacatggtgaatatcctctggcgttacgtgatttcagataccccagaacgtttacagagctctttcgatctcctttctctttcgggatggtctaacttatccgtggtgcaaggattgggttgggaacgggaaaagatctaatcatggtgccttacccatgacggtatgggaaacttaagaaccacacgcttccaattgacgcaagacttgttgcggagctatactcataaaataggtgcctagttaaatttcttctcgtctcctctcatgcggcgtcatttgatgcgccgtcattgtgggttatataggagcactaaatactatatgcacttttcaaccaattggtgattgtcaagctgttcaatgtactaaattagtaccagcgacttgaagctgttgtgatcttgtgagttcaggcaaaatctgcctatgtgac

SEQ ID NO: 28655 - DNA, 1377 bp, Muscodor strobelii
  misc_feature: SGI cDNA ID NO. 569830
  misc_feature: Encodes the peptide sequence at SEQ ID NO 28656
atggcggactaccctcctgagatcacagctgctgaaggggccaggttggcagaaactatcaaagactggtcgctagctcatggtctgacggtgaggccacctccgggtttaatctccgtcgagacagatccccagcaaattctggccactgcggttccggtcactttattccctagcccttttcccaaggtctgcttcgagcaaggtgttgctgttcagagagcctataatgagttatatgcctcaatcagccaggatgaaaagttcctggctcgcacggtaaaagacataggtgatagcgatgacttcatcacggaactatggaaagtgcatctgcgtgtcaaggaggaaggttatgtccagcacaaaagcctggggctttttagatctgattatatggtacacaacgatgccgactcttcggagcaacaaataaaacaagtagaattcaacaccattgcatcatcgtttggcggtctctcatctcaaacttcgcaactccacaaatgcgtaatatttttagtacaggatggagaacggaacatctttgaccagaagcacctagaatacgcacttcaagagtccgaagaccccttaatccccatcttccggctacctttctcggagattaagaagcacacccgtcttgccgaagggccaggcagggaacttctctacacgccccctcagctcccaaaccacgtatttgaggtcgcagtgatatatatgcgatctggctacggtcctggagactacccagatgcctcagcgtgggatgcacgataccacctcgaacgatcggctgcgatcaagtgcccctcggtgctgacgcaggttgcgggaacgaagaaagtgcagcaagtcctcgcgacgcctgagacaccgtcgaacccttcggttttggggttttatatatctgataacttgaaagcgaatctggcgagtacgttcactaatatctacccattggataccagcgaagccggtcagagggcgcgcaagatcgccacagaccccgaactatgcaaagggtacgtgctcaagccacaacgcgagggcggcggcaataatgtgtatcgttctgcgatccccgagttcctaaagtctgtacctgaggcgcactggccttcgtatatcctcatggagctgatcactccgccgccggtgaataacacgattcttcggaatggaaagctagagcaaggtggcgtgatctgcgagcttgggatatatggtacttgcatttgggaccaggaggctaagaagacactgcacaatgagcaggttgggtacttgttgagaaccaagggggaccagagtgaggagggtggtgtagcggctgggtttggctgcatggatagtgttgctttagtctga

SEQ ID NO: 28656 - protein, 458 aa, Muscodor strobelii
  misc_feature: SGI Peptide ID NO. 569830
  misc_feature (1)..(458): Pfam Id: PF03917 Pfam Desc: Eukaryotic glutathione synthase, ATP binding domain
  misc_feature (171)..(280): Pfam Id: PF03199 Pfam Desc: Eukaryotic glutathione synthase
  misc_feature (281)..(458): Pfam Id: PF03917 Pfam Desc: Eukaryotic glutathione synthase, ATP binding domain
  misc_feature (1)..(172): Pfam Id: PF03917 Pfam Desc: Eukaryotic glutathione synthase, ATP binding domain
  misc_feature (237)..(280): Pfam Id: PF03199 Pfam Desc: Eukaryotic glutathione synthase
  misc_feature (171)..(194): Pfam Id: PF03199 Pfam Desc: Eukaryotic glutathione synthase
  misc_feature (2)..(458): NCBI GI: 156052066 Blast Desc: SS1G_07441 [Sclerotinia sclerotiorum 1980] gi|154705218|gb|EDO04957.1| SS1G_07441 [Sclerotinia sclerotiorum 1980]
  misc_feature (2)..(458): NCBI GI: 154309788 Blast Desc: BC1G_07364 [Botryotinia fuckeliana B05.10] gi|150851825|gb|EDN27018.1| BC1G_07364 [Botryotinia fuckeliana B05.10]
  misc_feature (6)..(458): NCBI GI: 145608682 Blast Desc: MGG_06454 [Magnaporthe grisea 70-15] gi|145016128|gb|EDK00618.1| MGG_06454 [Magnaporthe grisea 70-15]
  misc_feature (2)..(458): NCBI GI: 85109614 Blast Desc: NCU06191 [Neurospora crassa OR74A] gi|28924650|gb|EAA33767.1| conserved [Neurospora crassa OR74A]
  misc_feature (4)..(458): NCBI GI: 256733228 Blast Desc: NECHADRAFT_68613 [Nectria haematococca mpVI 77-13-4]
  misc_feature (2)..(450): NCBI GI: 46125781 Blast Desc: FG07268.1 [Gibberella zeae PH-1]
  misc_feature (2)..(458): NCBI GI: 189190236 Blast Desc: glutathione synthetase large chain [Pyrenophora tritici-repentis Pt-1C-BFP] gi|187973063|gb|EDU40562.1| glutathione synthetase large chain [Pyrenophora tritici-repentis
  misc_feature (2)..(458): NCBI GI: 171685720 Blast Desc: protein product [Podospora anserina] gi|170942821|emb|CAP68474.1| protein product [Podospora anserina]
  misc_feature (3)..(458): NCBI GI: 169612463 Blast Desc: SNOG_09354 [Phaeosphaeria nodorum SN15] gi|160702516|gb|EAT83546.2| SNOG_09354 [Phaeosphaeria nodorum SN15]
  misc_feature (2)..(458): NCBI GI: 225678360 Blast Desc: glutathione synthetase [Paracoccidioides brasiliensis Pb03]
  misc_feature (1)..(457): SWISSPROT Homolog: EC 6.3.2.3 Glutathione synthase
MADYPPEITAAEGARLAETIKDWSLAHGLTVRPPPGLISVETDPQQILATAVPVTLFPSPFPKVCFEQGVAVQRAYNELYASISQDEKFLARTVKDIGDSDDFITELWKVHLRVKEEGYVQHKSLGLFRSDYMVHNDADSSEQQIKQVEFNTIASSFGGLSSQTSQLHKCVIFLVQDGERNIFDQKHLEYALQESEDPLIPIFRLPFSEIKKHTRLAEGPGRELLYTPPQLPNHVFEVAVIYMRSGYGPGDYPDASAWDARYHLERSAAIKCPSVLTQVAGTKKVQQVLATPETPSNPSVLGFYISDNLKANLASTFTNIYPLDTSEAGQRARKIATDPELCKGYVLKPQREGGGNNVYRSAIPEFLKSVPEAHWPSYILMELITPPPVNNTILRNGKLEQGGVICELGIYGTCIWDQEAKKTLHNEQVGYLLRTKGDQSEEGGVAAGFGCMDSVALV

SEQ ID NO: 28657 - DNA, 2936 bp, Muscodor strobelii
  misc_feature: SGI EST ID NO. CUFF.67608.0
  misc_feature: Variant of the nucleotide sequence at SEQ ID NO 28655
atcccgcagtgtccgttcaggcaatgcacagaattaataatcaaatcgcaactcgtctctataaccttctttagatgctatcttatcatactaaattaaaacagcatttagattggatctcgatgtgagtggccggttagacgtaattataaacagattatcctgtcccaacaccaacgagcttttgcctgtaccacagaacagacagcgaagcgccgtgcataaatttgcaatctcaagtttaactgactggctatggcggactaccctcctgagatcacagctgctgaaggggccaggttggcagaaactatcaaagactggtcgctagctcatggtctgacggtgaggccacctccgggtttaatctccgtcgagacagatccccagcaaattctggccactgcggttccggtcactttattccctagcccttttcccaaggtctgcttcgagcaaggtgttgctgttcagagagcctataatgagttatatgcctcaatcagccaggatgaaaagttcctggctcgcacggtaaaagacataggtgatagcgatgacttcatcacggaactatggaaagtgcatctgcgtgtcaaggaggaaggttatgtccagcacaaaagcctggggctttttagatctgattatatggtacacaacgatgccgactcttcggagcaacaaataaaacaagtagaattcaacaccattgcatcatcgtttggcggtctctcatctcaaacttcgcaactccacaaatatcttgcatcaaccgactactctcttctctcaaattccatctcaagaggaaccctcgccctcccggcgaatgagagcgccaaaggcctcgcatccggaatccgggaagccttcatcgcatatggtgcatctaaaactgggaaaagtagatgcgtaatatttttagtacaggatggagaacggaacatctttgaccagaagcacctagaatacgcacttcaagagtccgaagaccccttaatccccatcttccggctacctttctcggagattaagaagcacacccgtcttgccgaagggccaggcagggaacttctctacacgccccctcagctcccaaaccacgtatttgaggtcgcagtgatatatatgcgatctggctacggtcctggagactacccagatgcctcagcgtgggatgcacgataccacctcgaacgatcggctgcgatcaagtgcccctcggtgctgacgcaggttgcgggaacgaagaaagtgcagcaagtcctcgcgacgcctgagacaccgtcgaacccttcggttttggggttttatatatctgataacttgaaagcgaatctggcgagtacgttcactaatatctacccattggataccagcgaagccggtcagagggcgcgcaagatcgccacagaccccgaactatgcaaagggtacgtgctcaagccacaacgcgagggcggcggcaataatgtgtatcgttctgcgatccccgagttcctaaagtctgtacctgaggcgcactggccttcgtatatcctcatggagctgatcactccgccgccggtgaataacacgattcttcggaatggaaagctagagcaaggtggcgtgatctgcgagcttgggatatatggtacttgcatttgggaccaggaggctaagaagacactgcacaatgagcaggttgggtacttgttgagaaccaagggggaccagagtgaggagggtggtgtagcggctgggtttggctgcatggatagtgttgctttagtctgaatggcggtagatgcactacttcacggccgtccatcaatgtgaagacagttaattgattacatatcacttctcaggttcctcgtgcgatatcgaagtgatgaaaatacagttgttggtatcaagatatgtagtcctacacaaggatcgtataatacaagggtcatcctgctttcctccggattcattattagagcacattgctctccaatcgcagatcatgagacgctgtggacataggagagaacacagagagtggagtacagatagagctatagccatcccattgggcgagctctcaatcatctcatgattatctcgagtttagtgacagaatagcgatcgtttactcggatggagttccgcggcggaggacctcgagattctctgtgcaattatcagcagcctgcctcgcacatctatcgggcatcgagtgggaatcaggtcttactctggtagatgctcaaggcagatctcgtcttgccctcggcgtctgtgtaggtgttcatgacggcgtcgccctcgacgaaaacggtagagctgcgagaaaataccagttagctgattgacccaactactgacccctttcttcgtatccaatagaccaaaggccatacaagcgtcaacgcgcagctgttcaaggcaccgtccggggtttgcacagcctagctctgcttatctcgtcttctgcgtccccttccactcggttggagagtatgcgactcaccctttaggcaagctggtcaggtagtcccgacgggggccctcgtcagcgaaggtcgcgaccttgaaccagggaagtgcggcggttctcgcgaggtccgtcgctgcttgcgatagcatattcgatgatatcgcggccggtgctggtggccttgacctcgggggttgcagccaagttaccgacgagggtgatcttggcgatgtcgcgacgagctgaggcgctgaatgcgcggctcaggctcggggtagcggtggtgaggcggcgggtgaggaaagacatggcttctggtatgcgactggcgatggagttgtcaagggctgaggggaaagattgctgttttggctgttcggttggtctgtgaagtcgaactgatatgatgtcgctatcgctcgttgtcgcgattctctgcccctagcgtctttgcagcttgccc

SEQ ID NO: 28658 - DNA, 330 bp, Muscodor strobelii
  misc_feature: SGI cDNA ID NO. 569831
  misc_feature: Encodes the peptide sequence at SEQ ID NO 28659
atgtctttcctcacccgccgcctcaccaccgctaccccgagcctgagccgcgcattcagcgcctcagctcgtcgcgacatcgccaagatcaccctcgtcgcgacggacctcgcgagaaccgccgcacttccctggttcaaggtcgcgaccttcgctgacgagggcccccgtcgggactacctgaccagcttgcctaaaggctctaccgttttcgtcgagggcgacgccgtcatgaacacctacacagacgccgagggcaagacgagatctgccttgagcatctaccagaagaatctcgaggtcctccgccgcggaactccatccgagtaa

SEQ ID NO: 28659 - protein, 109 aa, Muscodor strobelii
  misc_feature: SGI Peptide ID NO. 569831
  misc_feature (66)..(102): Pfam Id: PF00436 Pfam Desc: Single-strand binding protein family
  misc_feature (16)..(109): NCBI GI: 261360140 Blast Desc: conserved [Verticillium albo-atrum VaMs.102]
  misc_feature (2)..(106): NCBI GI: 39977101 Blast Desc: MGG_06453 [Magnaporthe grisea 70-15] gi|145016129|gb|EDK00619.1| MGG_06453 [Magnaporthe grisea 70-15]
  misc_feature (1)..(104): NCBI GI: 46125783 Blast Desc: FG07269.1 [Gibberella zeae PH-1]
  misc_feature (1)..(104): NCBI GI: 256732783 Blast Desc: NECHADRAFT_102580 [Nectria haematococca mpVI 77-13-4]
  misc_feature (10)..(104): NCBI GI: 116192205 Blast Desc: CHGG_05820 [Chaetomium globosum CBS 148.51] gi|88181733|gb|EAQ89201.1| CHGG_05820 [Chaetomium globosum CBS 148.51]
  misc_feature (14)..(109): NCBI GI: 156052070 Blast Desc: SS1G_07443 [Sclerotinia sclerotiorum 1980] gi|154705220|gb|EDO04959.1| SS1G_07443 [Sclerotinia sclerotiorum 1980]
  misc_feature (45)..(104): NCBI GI: 115433642 Blast Desc: [Aspergillus terreus NIH2624] gi|114189810|gb|EAU31510.1| [Aspergillus terreus NIH2624]
  misc_feature (45)..(104): NCBI GI: 242817723 Blast Desc: ssDNA binding protein, [Talaromyces stipitatus ATCC 10500] gi|218713475|gb|EED12899.1| ssDNA binding protein, [Talaromyces stipitatus ATCC 10500]
  misc_feature (45)..(104): NCBI GI: 119479733 Blast Desc: ssDNA binding protein, [Neosartorya fischeri NRRL 181] gi|119408049|gb|EAW17998.1| ssDNA binding protein, [Neosartorya fischeri NRRL 181]
  misc_feature (3)..(104): NCBI GI: 146324107 Blast Desc: ssDNA binding protein [Aspergillus fumigatus Af293] gi|129558065|gb|EAL91809.2| ssDNA binding protein, [Aspergillus fumigatus Af293] gi|159126416|gb|EDP51532.1| ssDNA binding A1163]
MSFLTRRLTTATPSLSRAFSASARRDIAKITLVATDLARTAALPWFKVATFADEGPRRDYLTSLPKGSTVFVEGDAVMNTYTDAEGKTRSALSIYQKNLEVLRRGTPSE

SEQ ID NO: 28660 - DNA, 1959 bp, Muscodor strobelii
  misc_feature: SGI EST ID NO. CUFF.67609.1
  misc_feature: Variant of the nucleotide sequence at SEQ ID NO 28658
gggcaagctgcaaagacgctaggggcagagaatcgcgacaacgagcgatagcgacatcatatcagttcgacttcacagaccaaccgaacagccaaaacagcaatctttcccctcagcccttgacaactccatcgccagtcgcataccagaagccatgtctttcctcacccgccgcctcaccaccgctaccccgagcctgagccgcgcattcagcgcctcagctcgtcgcgacatcgccaagatcaccctcgtcggtaacttggctgcaacccccgaggtcaaggccaccagcaccggccgcgatatcatcgaatatgctatcgcaagcagcgacggacctcgcgagaaccgccgcacttccctggttcaaggtcgcgaccttcgctgacgagggcccccgtcgggactacctgaccagcttgcctaaaggctctaccgttttcgtcgagggcgacgccgtcatgaacacctacacagacgccgagggcaagacgagatctgccttgagcatctaccagaagaatctcgaggtcctccgccgcggaactccatccgagtaaacgatcgctattctgtcactaaactcgagataatcatgagatgattgagagctcgcccaatgggatggctatagctctatctgtactccactctctgtgttctctcctatgtccacagcgtctcatgatctgcgattggagagcaatgtgctctaataatgaatccggaggaaagcaggatgacccttgtattatacgatccttgtgtaggactacatatcttgataccaacaactgtattttcatcacttcgatatcgcacgaggaacctgagaagtgatatgtaatcaattaactgtcttcacattgatggacggccgtgaagtagtgcatctaccgccattcagactaaagcaacactatccatgcagccaaacccagccgctacaccaccctcctcactctggtcccccttggttctcaacaagtacccaacctgctcattgtgcagtgtcttcttagcctcctggtcccaaatgcaagtaccatatatcccaagctcgcagatcacgccaccttgctctagctttccattccgaagaatcgtgttattcaccggcggcggagtgatcagctccatgaggatatacgaaggccagtgcgcctcaggtacagactttaggaactcggggatcgcagaacgatacacattattgccgccgccctcgcgttgtggcttgagcacgtaccctttgcatagttcggggtctgtggcgatcttgcgcgccctctgaccggcttcgctggtatccaatgggtagatattagtgaacgtactcgccagattcgctttcaagttatcagatatataaaaccccaaaaccgaagggttcgacggtgtctcaggcgtcgcgaggacttgctgcactttcttcgttcccgcaacctgcgtcagcaccgaggggcacttgatcgcagccgatcgttcgaggtggtatcgtgcatcccacgctgaggcatctgggtagtctccaggaccgtagccagatcgcatatatatcactgcgacctcaaatacgtggtttgggagctgagggggcgtgtagagaagttccctgcctggcccttcggcaagacgggtgtgcttcttaatctccgagaaaggtagccggaagatggggattaaggggtcttcggactcttgaagtgcgtattctaggtgcttctggtcaaagatgttccgttctccatcctgtactaaaaatattacgcatctacttttcccagttttagatgcaccatatgcgatgaaggcttcccggattccggatgcgaggcctttggcgctctcattcgccgggagggcgagggttcctcttgagatggaatttgagagaagagagtagtcggttgatgcaagatatctttatgtcgtcagcttcggccgttggaaagggta

SEQ ID NO: 28661 - DNA, 987 bp, Muscodor strobelii
  misc_feature: SGI cDNA ID NO. 569832
  misc_feature: Encodes the peptide sequence at SEQ ID NO 28662
atggctctcgagccggtcatggatgaggactatgcctctgaagaggactctgacttcttgcccgatgcagccccagctgacgccgcctccgagtccgaatcagagccagacgatagcctgccatcaaccgtgcctcgagcatcagcgaaaagagcaaacgaaggagaagccgcgcaggacgacttcgaaaactcgggagatgaagcaatcattcaaaagggcaaaattcgccaaaagaagtccaagcgtctcgatggcgatggcgatgctggtggggaaggtggactcatcaagacgcgaagtcaacgagcgcaagagaaagcggaacggaaatcatacgccactacgggacctgtcactgttaacgtcgatgagctctgggctcagatgaacgccgcaccgattctccacccgaaaccaaacaccgacgaaaccaacgagattgagaaacctggagacaaggacatcaaaatgtctgcagacacgaatgttgtggacaaggcaaatgcagaccaatcggaactgattaagataaaacggacatacaacttcgctggcaaggttcatactgaagagaagcttgttcctcgcgattcggctgaagcaaaactatatcttgcatcacaagatctaaagcttgcagaaccggaaaacaatgatgaacaggccaagcctaagcctcgaaaagcattccgttcgatcttcgagccggtcatcgagggcggtgcacagcgcgatgacctgaaattggggctcagtcttcggttacaactacgtgaacagcaagccaaagccaagaaactcaacgttgtggagaagagtcgcatggactgggccggcttcgtcgataaggaaggcatcaaagacgagcttgaactggcgggaaagtcaaaagagtcatacgcaaatcgccaagactttttgtcgcgcgtggaagctaagaaggaagatgaagctagaaaggctaggatggcagctcgcggctga

SEQ ID NO: 28662 - protein, 328 aa, Muscodor strobelii
  misc_feature: SGI Peptide ID NO. 569832
  misc_feature (244)..(327): Pfam Id: PF07572 Pfam Desc: Bucentaur or craniofacial development
  misc_feature (1)..(327): NCBI GI: 256733210 Blast Desc: NECHADRAFT_79279 [Nectria haematococca mpVI 77-13-4]
  misc_feature (7)..(327): NCBI GI: 171686776 Blast Desc: protein product [Podospora anserina] gi|170943349|emb|CAP69002.1| protein product [Podospora anserina]
  misc_feature (6)..(308): NCBI GI: 85083501 Blast Desc: SWR1-complex protein 5 [Neurospora crassa OR74A] gi|74614097|sp|Q7RYI3.1|SWC5_NEUCR RecName: Full=SWR1-complex protein 5 gi|28918217|gb|EAA27895.1| SWR1-complex protein 5
  misc_feature (1)..(327): NCBI GI: 116192035 Blast Desc: CHGG_05735 [Chaetomium globosum CBS 148.51] gi|88181648|gb|EAQ89116.1| CHGG_05735 [Chaetomium globosum CBS 148.51]
  misc_feature (4)..(328): NCBI GI: 39976965 Blast Desc: MGG_06385 [Magnaporthe grisea 70-15] gi|145016207|gb|EDK00697.1| MGG_06385 [Magnaporthe grisea 70-15]
  misc_feature (1)..(327): NCBI GI: 46125861 Blast Desc: FG07308.1 [Gibberella zeae PH-1] gi|84029505|sp|Q4I650.1|SWC5_GIBZE RecName: Full=SWR1-complex protein 5
  misc_feature (8)..(323): NCBI GI: 156037862 Blast Desc: SS1G_12645 [Sclerotinia sclerotiorum 1980] gi|154698053|gb|EDN97791.1| SS1G_12645 [Sclerotinia sclerotiorum 1980]
  misc_feature (8)..(323): NCBI GI: 154315250 Blast Desc: BC1G_04664 [Botryotinia fuckeliana B05.10] gi|150847627|gb|EDN22820.1| BC1G_04664 [Botryotinia fuckeliana B05.10]
  misc_feature (8)..(324): NCBI GI: 169767108 Blast Desc: [Aspergillus oryzae RIB40] gi|83765880|dbj|BAE56023.1| protein product [Aspergillus oryzae]
  misc_feature (8)..(324): NCBI GI: 238483933 Blast Desc: Swr1p complex component (Swc5), [Aspergillus flavus NRRL3357] gi|220701255|gb|EED57593.1| Swr1p complex component (Swc5), [Aspergillus flavus NRRL3357]
MALEPVMDEDYASEEDSDFLPDAAPADAASESESEPDDSLPSTVPRASAKRANEGEAAQDDFENSGDEAIIQKGKIRQKKSKRLDGDGDAGGEGGLIKTRSQRAQEKAERKSYATTGPVTVNVDELWAQMNAAPILHPKPNTDETNEIEKPGDKDIKMSADTNVVDKANADQSELIKIKRTYNFAGKVHTEEKLVPRDSAEAKLYLASQDLKLAEPENNDEQAKPKPRKAFRSIFEPVIEGGAQRDDLKLGLSLRLQLREQQAKAKKLNVVEKSRMDWAGFVDKEGIKDELELAGKSKESYANRQDFLSRVEAKKEDEARKARMAARG

SEQ ID NO: 28663 - DNA, 1824 bp, Muscodor strobelii
  misc_feature: SGI EST ID NO. CUFF.67708.0
  misc_feature: Variant of the nucleotide sequence at SEQ ID NO 28661
ggggacggccttttcctgcccgagaagaaaataattcgtcctatcctctgtagctcaagcctagcagccagcgcaagtgctcacgatggctctcgagccggtcatggatgaggactatgcctctgaagaggactctgacttcttgcccgatgcagccccagctgacgccgcctccgagtccgaatcagagccagacgatagcctgccatcaaccgtgcctcgagcatcagcgaaaagagcaaacgaaggagaagccgcgcaggacgacttcgaaaactcgggagatgaagcaatcattcaaaagggcaaaattcgccaaaagaagtccaagcgtctcgatggcgatggcgatgctggtggggaaggtggactcatcaagacgcgaagtcaacgagcgcaagagaaagcggaacggaaatcatacgccactacgggacctgtcactgttaacgtcgatgagctctgggctcagatgaacgccgcaccgattctccacccgaaaccaaacaccgacgaaaccaacgagattgagaaacctggagacaaggacatcaaaatgtctgcagacacgaatgttgtggacaaggcaaatgcagaccaatcggaactgattaagataaaacggacatacaacttcgctggcaaggttcatactgaagagaagcttgttcctcgcgattcggctgaagcaaaactatatcttgcatcacaagatctaaagcttgcagaaccggaaaacaatgatgaacaggccaagcctaagcctcgaaaagcattccgttcgatcttcgagccggtcatcgagggcggtgcacagcgcgatgacctgaaattggggctcagtcttcggttacaactacgtgaacagcaagccaaagccaagaaactcaacgttgtggagaagagtcgcatggactgggccggcttcgtcgataaggaaggcatcaaagacgagcttgaactggcgggaaagtcaaaagagtcatacgcaaatcgccaagactttttgtcgcgcgtggaagctaagaaggaagatgaagctagaaaggctaggatggcagctcgcggctgagagacacatcggatcagttccccacaaccgacaatacgcagccgaaaagcttctatatcctatgaggcattatctgcggcttatgtcaaagactgctgacgattatctcatcactcgttacccattctgctcttgggctctatagagaagaaaagaccatgcacggaactacagtgtgagtatcttggaactccaatgtgctaaaaaccggtgacagatatagccaagttctaaactgcaagtgatccgggtaactctgagtagcacgcaacccaggattataccaagctaggtggaatcgccgcctgcagtttgatatcgattcttgagacaaccgaattcattgcgacttagtggcttacaacgaaactttcctttagaatattgagccactagaaaaatgtgtcaaggcatgcatccgatgccagtggtccaattattctgcacggaaccaagcggcatggtttcgagcccaccgctttgggagctcatggaatccgtatggcgaataaggaggcaaaggcgggctaaaaattattagtttgcggtgtcaaacttgctctccatgctacaaggacataacaataacacgcggatttttgtattgttcagtggagtacttagatcctctaaataccgagacaacgaggacaagttttagatttatacctaagacaaatactcaaaaagacgttacaatacctaggtaactacgtcaaatagaccatatagtaaaaacagcaagaaagaag

SEQ ID NO: 28664 - DNA, 1314 bp, Muscodor strobelii
  misc_feature: SGI cDNA ID NO. 569833
  misc_feature: Encodes the peptide sequence at SEQ ID NO 28665
atgcctgcacaacacacgatcaaagatattgtcatcacgccagtggcgtttcacgatatgccattgctgaacagtgtcggtgtacatgagccgttcgcactccgcagcatcatcgaagtcatcaccgaagacaaagatgagagtggtaaggctgtatatggcctcggcgaatcatatggtgattccacgcaccttgaccgtctcaagaaggcagcggctaaattgaagggcatttctgtctacaacaccaaccagattctcctaacttgcgctgaaaccgtggccaacgataccagcacgggaggtgatggtatggcgggcatggtgacaactgcgtctgtggccgacaaggtattctcgcctttcgaggtggcttgccttgatatacagggcaagctaactggtctgcccgtaagcgagctactaggaggtcgtgtgcgcgataaggtcgactattcggcgtatttgttctatgcaataccttctgcctatcagaaatgggcaggacaccctgggcagccagacgacgaatatggagcagcgctcgaccccgagggtctcgtacgtcaagcacgtaagatcgtggacgaatatgggttcaaggccataaagctcaagggcggtgtgttcacgccagctgaagaggtggccgggatccgagctttgcgagctgcattcccagacgcaccgttgaggctcgaccctaatgccgcatggaccgttgaaacttcggcatgggtcgcacgggagctggccggtgtggttgaatacctggaagatccagccggcgaaatcgagggcatggccgccgtggcgaaacaggcaaccatgccattagcaaccaacatggccgtggttgctttctctcacctgccactttccatcaaacaggatgccgtacaggtcatactttccgatcaccacttttggggcggccttcgccgttcacaaacgctaggatccatttgcggcatctgggggatgcgtttatcgatgcactctaacagtcatttgggcatctccctcgcagctatgacgcatctagcagctgcaacgcccaatctggactacgcttgcgacacacactggccatggaagagacgcgacgaagacgttgtgctcgatggcgagctgcagtggtcagatggtggtctattggtgccaactgcacccggtctaggggttaagttagatagggagaagttggctctccttcatcagcagtatcttgactgtggcttgcggaagcgcgacgacacaacgtacatgcaaaaattccagcctgagttttctgccaagataccgaagtggtaa

SEQ ID NO: 28665 - protein, 437 aa, Muscodor strobelii
  misc_feature: SGI Peptide ID NO. 569833
  misc_feature (184)..(278): Pfam Id: PF01188 Pfam Desc: Mandelate racemase / muconate lactonizing enzyme, C-terminal domain
  misc_feature (123)..(143): Pfam Id: PF02746 Pfam Desc: Mandelate racemase / muconate lactonizing enzyme, N-terminal domain
  misc_feature (1)..(437): NCBI GI: 261353318 Blast Desc: glucarate dehydratase [Verticillium albo-atrum VaMs.102]
  misc_feature (1)..(437): NCBI GI: 256721774 Blast Desc: [Nectria haematococca mpVI 77-13-4]
  misc_feature (1)..(437): NCBI GI: 46115606 Blast Desc: FG03645.1 [Gibberella zeae PH-1]
  misc_feature (7)..(437): NCBI GI: 67516663 Blast Desc: AN0613.2 [Aspergillus nidulans FGSC A4] gi|40747556|gb|EAA66712.1| AN0613.2 [Aspergillus nidulans FGSC A4] gi|259489120|tpe|CBF89129.1| TPA: conserved [Aspergillus FGSC
  misc_feature (7)..(437): NCBI GI: 115436852 Blast Desc: ATEG_09038 [Aspergillus terreus NIH2624] gi|114188475|gb|EAU30175.1| ATEG_09038 [Aspergillus terreus NIH2624]
  misc_feature (1)..(437): NCBI GI: 134101370 Blast Desc: mandelate racemase/muconate lactonizing enzyme [Saccharopolyspora erythraea NRRL 2338] gi|133913993|emb|CAM04106.1| mandelate racemase/muconate enzyme
  misc_feature (7)..(437): NCBI GI: 256818552 Blast Desc: Mandelate racemase/muconate lactonizing protein [Streptomyces griseoflavus Tu4000]
  misc_feature (3)..(437): NCBI GI: 220910818 Blast Desc: Mandelate racemase/muconate lactonizing protein [Arthrobacter chlorophenolicus A6] gi|219857696|gb|ACL38038.1| Mandelate racemase/muconate lactonizing protein [Arthrobacter A6]
  misc_feature (7)..(437): NCBI GI: 262204039 Blast Desc: Mandelate racemase/muconate lactonizing protein [Gordonia bronchialis DSM 43247] gi|262087386|gb|ACY23354.1| Mandelate racemase/muconate lactonizing protein [Gordonia DSM
  misc_feature (12)..(437): NCBI GI: 111020778 Blast Desc: glucarate dehydratase [Rhodococcus jostii RHA1] gi|110820308|gb|ABG95592.1| glucarate dehydratase [Rhodococcus jostii RHA1]
  misc_feature (6)..(437): SWISSPROT Homolog: EC 4.2.1.40 Glucarate dehydratase
MPAQHTIKDIVITPVAFHDMPLLNSVGVHEPFALRSIIEVITEDKDESGKAVYGLGESYGDSTHLDRLKKAAAKLKGISVYNTNQILLTCAETVANDTSTGGDGMAGMVTTASVADKVFSPFEVACLDIQGKLTGLPVSELLGGRVRDKVDYSAYLFYAIPSAYQKWAGHPGQPDDEYGAALDPEGLVRQARKIVDEYGFKAIKLKGGVFTPAEEVAGIRALRAAFPDAPLRLDPNAAWTVETSAWVARELAGVVEYLEDPAGEIEGMAAVAKQATMPLATNMAVVAFSHLPLSIKQDAVQVILSDHHFWGGLRRSQTLGSICGIWGMRLSMHSNSHLGISLAAMTHLAAATPNLDYACDTHWPWKRRDEDVVLDGELQWSDGGLLVPTAPGLGVKLDREKLALLHQQYLDCGLRKRDDTTYMQKFQPEFSAKIPKW

SEQ ID NO: 28666 - DNA, 204 bp, Muscodor strobelii
  misc_feature: SGI EST ID NO. CUFF.67523.0
  misc_feature: Variant of the nucleotide sequence at SEQ ID NO 28664
accaacatggccgtggttgctttctctcacctgccactttccatcaaacaggatgccgtacaggtcatactttccgatcaccacttttggggcggccttcgccgttcacaaacgctaggatccatttgcggcatctgggggatgcgtttatcgatgcactctaacagtcatttgggcatctccctcgcagctatgacgcatcta

SEQ ID NO: 28667 - DNA, 948 bp, Muscodor strobelii
  misc_feature: SGI cDNA ID NO. 569834
  misc_feature: Encodes the peptide sequence at SEQ ID NO 28668
atgatcactgagttcaaggtgcctcctagcggcgtttgggttcctgcgtgtactttatttcatcatgatacggaatgtatagaccaagaatcacaagcggcatactatgcatatctttcaaaatgcggcgtcgccggactggtcatccttggtacaaactccgagacattcttgttgacgcgggaggagcgcaaagcattagtccagatagcacgaaaagcttgtggtccgtcgtatcccatcatggctggtgttggtggtcactcgacgaagcaggtcttggaatttattgaggacgctaccgatgcgggcgctgattacatcttgcttcttcccccagcttacttcggcaagcagaccactccagccgtaatcgacagctttttccacgatattcaggccaaatgctcgctcccgatcatcatatacaactttcctgctgtatgcaatggtatcgacttggattctgcaaccattgctagatatgcgaaggcgtacaataaaatcgttggcgtcaagttaacttgcggcagcgttgcgaagataacgcgcctgaccgcagagtttccaccagagcgattcgctgtttacgcgggacaggccgacttcatgattggtgggatggtgtccggatctgctggagcaatttctggctttgcaaacgtattccccaagacaattgtccgagtctatgagctgtataaggcagggaagctcgttgaggccatggagctccatcggacagccgcactggcagaacaaccgtgtaaggcgggtgttgcggctgtcaaatacgccgctgctctgaattcggcccgcattgctggtatcgagaatgcactcgataagcttaagcctcggcggccgtatctagaaccttcagatgccgagaagcgaaacatagagacgatgatcgcgcctttagtagatattgaagccagtctgtag

SEQ ID NO: 28668 - protein, 315 aa, Muscodor strobelii
  misc_feature: SGI Peptide ID NO. 569834
  misc_feature (8)..(309): Pfam Id: PF00701 Pfam Desc: Dihydrodipicolinate synthetase family
  misc_feature (43)..(246): Pfam Id: PF00701 Pfam Desc: Dihydrodipicolinate synthetase family
  misc_feature (6)..(315): NCBI GI: 46115610 Blast Desc: FG03647.1 [Gibberella zeae PH-1]
  misc_feature (8)..(315): NCBI GI: 261353316 Blast Desc: dihydrodipicolinate synthase [Verticillium albo-atrum VaMs.102]
  misc_feature (6)..(315): NCBI GI: 154273891 Blast Desc: conserved [Ajellomyces capsulatus NAm1] gi|150415405|gb|EDN10758.1| conserved [Ajellomyces capsulatus NAm1]
  misc_feature (6)..(312): NCBI GI: 239614173 Blast Desc: dihydrodipicolinate synthetase [Ajellomyces dermatitidis ER-3]
  misc_feature (6)..(315): NCBI GI: 240282175 Blast Desc: dihydrodipicolinate synthetase [Ajellomyces capsulatus H143]
  misc_feature (6)..(312): NCBI GI: 261204579 Blast Desc: dihydrodipicolinate synthetase [Ajellomyces dermatitidis SLH14081] gi|239587288|gb|EEQ69931.1| dihydrodipicolinate synthetase [Ajellomyces dermatitidis
  misc_feature (11)..(315): NCBI GI: 67516671 Blast Desc: AN0617.2 [Aspergillus nidulans FGSC A4] gi|40747560|gb|EAA66716.1| AN0617.2 [Aspergillus nidulans FGSC A4] gi|259489116|tpe|CBF89122.1| TPA: conserved [Aspergillus FGSC
  misc_feature (6)..(315): NCBI GI: 225559242 Blast Desc: dihydrodipicolinate synthetase [Ajellomyces capsulatus G186AR]
  misc_feature (6)..(315): NCBI GI: 225679991 Blast Desc: dihydrodipicolinate synthase [Paracoccidioides brasiliensis Pb03]
  misc_feature (6)..(315): NCBI GI: 226291770 Blast Desc: dihydrodipicolinate synthase [Paracoccidioides brasiliensis Pb18]
  misc_feature (11)..(246): SWISSPROT Homolog: EC 4.2.1.52 Dihydrodipicolinate synthase
MITEFKVPPSGVWVPACTLFHHDTECIDQESQAAYYAYLSKCGVAGLVILGTNSETFLLTREERKALVQIARKACGPSYPIMAGVGGHSTKQVLEFIEDATDAGADYILLLPPAYFGKQTTPAVIDSFFHDIQAKCSLPIIIYNFPAVCNGIDLDSATIARYAKAYNKIVGVKLTCGSVAKITRLTAEFPPERFAVYAGQADFMIGGMVSGSAGAISGFANVFPKTIVRVYELYKAGKLVEAMELHRTAALAEQPCKAGVAAVKYAAALNSARIAGIENALDKLKPRRPYLEPSDAEKRNIETMIAPLVDIEASL

SEQ ID NO: 28669 - DNA, 819 bp, Muscodor strobelii
  misc_feature: SGI cDNA ID NO. 569835
  misc_feature: Elevated expression when VOC is produced
  misc_feature: Encodes the peptide sequence at SEQ ID NO 28670
atgtcatcagctatggcaaagcgcctcgaaggcaaaacagttctcataactggcgcatcctctggcattggacgtgcgactgcttttgaatttgctcgcaccgccccaaacgatctcaagttgatattgactgcccgtcgcatagacagtctcaaacagatcgctgcagacatcaataaggagatcggaaacggcgtcaaagtgctaccagtccagttagatgtgagcaaatctgccgaggtgcgcgctttcgtggaccagctaccggctgggttcagccaaatcgacgtcctcgtaaacaatgccggcttagtcaagggtgtagcaagagcccctgagattgccgaagacgacatgaacatcatgtttgaaaccaacgttacaggtttaatcaacatgacacaagctatactgcctgttatgctaaagcgcagcaacggcgagggggctggtgacattatcaacattggttcgattgctggccgcgagccttacgttggcggtagtatctactgtgccaccaaggctgccgttcggtctttcactgagagcttacggaaggagttaattgcaaagagagttcgtgttataggcatcgatccaggacaagttgagactgaattctctgtcgtccggttttacggtgacaagagtaaggctgacgcggtctatgcgggctgtgaaccgttaacaccagaggatattgcggagtcggttgtctttgctgctggccgtagagaaaacgtggtgatcgcagataccctgatattccctaatcatcaggctgctgcaactatcatgcataaaaaatcagtttaa

SEQ ID NO: 28670 - protein, 272 aa, Muscodor strobelii
  misc_feature: SGI Peptide ID NO. 569835
  misc_feature (12)..(190): Pfam Id: PF00106 Pfam Desc: short chain dehydrogenase
  misc_feature (13)..(207): Pfam Id: PF08659 Pfam Desc: KR domain
  misc_feature (1)..(271): NCBI GI: 46115612 Blast Desc: FG03648.1 [Gibberella zeae PH-1]
  misc_feature (1)..(271): NCBI GI: 261353315 Blast Desc: NADP-dependent L-serine/L-allo-threonine dehydrogenase ydfG [Verticillium albo-atrum VaMs.102]
  misc_feature (1)..(272): NCBI GI: 115436862 Blast Desc: ATEG_09041 [Aspergillus terreus NIH2624] gi|114188478|gb|EAU30178.1| ATEG_09041 [Aspergillus terreus NIH2624]
  misc_feature (1)..(271): NCBI GI: 171690706 Blast Desc: protein product [Podospora anserina] gi|170945301|emb|CAP71413.1| protein product [Podospora anserina]
  misc_feature (1)..(270): NCBI GI: 46116836 Blast Desc: FG04260.1 [Gibberella zeae PH-1]
  misc_feature (1)..(271): NCBI GI: 121713612 Blast Desc: oxidoreductase [Aspergillus clavatus NRRL 1] gi|119402570|gb|EAW12991.1| oxidoreductase [Aspergillus clavatus NRRL 1]
  misc_feature (1)..(270): NCBI GI: 256725962 Blast Desc: [Nectria haematococca mpVI 77-13-4]
  misc_feature (1)..(271): NCBI GI: 255953765 Blast Desc: Pc21g05900 [Penicillium chrysogenum Wisconsin 54-1255] gi|211589346|emb|CAP95487.1| Pc21g05900 [Penicillium chrysogenum Wisconsin 54-1255]
  misc_feature (1)..(271): NCBI GI: 115401486 Blast Desc: ATEG_07710 [Aspergillus terreus NIH2624] gi|114190272|gb|EAU31972.1| ATEG_07710 [Aspergillus terreus NIH2624]
  misc_feature (6)..(271): NCBI GI: 67516673 Blast Desc: AN0618.2 [Aspergillus nidulans FGSC A4] gi|40747561|gb|EAA66717.1| AN0618.2 [Aspergillus nidulans FGSC A4] gi|259489115|tpe|CBF89120.1| TPA: conserved [Aspergillus FGSC
  misc_feature (13)..(264): SWISSPROT Homolog: EC 1.1.1.276 Serine 3-dehydrogenase
  misc_feature: Useful for introducing or modulating the production of volatile compounds
MSSAMAKRLEGKTVLITGASSGIGRATAFEFARTAPNDLKLILTARRIDSLKQIAADINKEIGNGVKVLPVQLDVSKSAEVRAFVDQLPAGFSQIDVLVNNAGLVKGVARAPEIAEDDMNIMFETNVTGLINMTQAILPVMLKRSNGEGAGDIINIGSIAGREPYVGGSIYCATKAAVRSFTESLRKELIAKRVRVIGIDPGQVETEFSVVRFYGDKSKADAVYAGCEPLTPEDIAESVVFAAGRRENVVIADTLIFPNHQAAATIMHKKSV

SEQ ID NO: 28671 - DNA, 1334 bp, Muscodor strobelii
  misc_feature: SGI EST ID NO. CUFF.67547.0
  misc_feature: Variant of the nucleotide sequence at SEQ ID NO 28669
gtaaggagactgtggggttaggtagggtttggtccgtggatgagtccgtatcgtgaagctctggacgactgtcgagactatattggcgaagatctgatattgttatcaaggtacatcagacaaaccctgtcgtatgaaaaaccggagcaaccgagaacatcaagctttcatttctactaaaatcattctaaaatcatcctaaaggctactacatacgaacagatatttcgtctacgatcttgatagaacctttgttggccgtacctttctttgacaggagagaagttctcgcagctccgagttgagcttctaatctcacggaacccgagttttggtactatcaaaatctacacactcttccgctctctacacttgcgcgatgtcatcagctatggcaaagcgcctcgaaggcaaaacagttctcataactggcgcatcctctggcattggacgtgcgactgcttttgaatttgctcgcaccgccccaaacgatctcaagttgatattgactgcccgtcgcatagacagtctcaaacagatcgctgcagacatcaataaggagatcggaaacggcgtcaaagtgctaccagtccagttagatgtgagcaaatctgccgaggtgcgcgctttcgtggaccagctaccggctgggttcagccaaatcgacgtcctcgtaaacaatgccggcttagtcaagggtgtagcaagagcccctgagattgccgaagacgacatgaacatcatgtttgaaaccaacgttacaggtttaatcaacatgacacaagctatactgcctgttatgctaaagcgcagcaacggcgagggggctggtgacattatcaacattggttcgattgctggccgcgagccttacgttggcggtagtatctactgtgccaccaaggctgccgttcggtctttcactgagagcttacggaaggagttaattgcaaagagagttcgtgttataggcatcgatccaggacaagttgagactgaattctctgtcgtccggttttacggtgacaagagtaaggctgacgcggtctatgcgggctgtgaaccgttaacaccagaggatattgcggagtcggttgtctttgctgctggccgtagagaaaacgtggtgatcgcagataccctgatattccctaatcatcaggctgctgcaactatcatgcataaaaaatcagtttaaaatggccctgaatgtattgtaaggattgaggggcggcgcatacagtgagactagtgcagatatcatgggaagtagtctcccataggtggaagtaagaatctgtatatctaatagaataaatagagtttatggcaca

SEQ ID NO: 28672 - DNA, 1524 bp, Muscodor strobelii
  misc_feature: SGI cDNA ID NO. 569836
  misc_feature: Encodes the peptide sequence at SEQ ID NO 28673
atgacgagcagagttgctggacatcgtggcaactcggcgagatctatcctcgtcggattgtcaatcagtctagctgggtttttgtacggtctcgacactggtatcattgcttcgactatcgcccaaaaaagtttcaaactttacatgtacggacccagtctctcgaattctgcaatacaaggtggcatcgtatcgggatattacgctggttacactcttggcagcggttctgctgcctacactatggacaaaatctcacgccgatggactctgcttctcggctgcattatttctatcataggcgcagttttacaagctgctgcacaaaatcctgccatgatgattgtcggacgagcattttctggaacgtcaacgggcttgatttacccaactgcgccagtatacctcgcagagcttgctgcccccgagaatcgcggatttctagtcgggctgaaagggctattgaacacccttggcttttttgtcgcgggattcatcggttacgctggagcgtttgcttccggcgacattcagtggcgtgttccacttgccactcaagcgccacctgcattattcctggccatactcactgtatttttgccgtactctccccgttggctggctcagagagaacactacgatgatgccaagaaagtcatggactcattgcacggtcaccggggcgctgaggttgtcgaaaccgaatttgcagagatgtgcgaacagattcggcgcgaatcaggaaacaacaagctagaaaacttcaagaagctgtttacccggcagtatattcgacgaacgctgcttgcatgtttgatcgccaatatgcagaaactttcagggtcgaatatcattcaaaactatcagtctatcctatatgtctctcttggttataaaggcaaaacggtgttattcatcggtgcaatctacggctttgctgctatcatcggccaggtcatcaacatcttcttgattgccgaccattggactcgtcgaaagaccatgatttctggatcctattcgctggcaattattcttgccatattaacggcgctttccaaattttttgcggacggtacgaatcaagatggctcgcgcgcagctattgccttcatattcttattcgcattcgcatactctctattcttcaacagcattgcgtgggttttgatggccgaaatcttccctctcccattgcgtggtgtcggtgttggattttcggtctttacacaggctgtcacagcgatctggctatcatacgcagcttctgtcgccttcgacaacatctcgtggaaattttacttcgtattcattgctctgaacctgtttgcgggtactgtctatctattcttcctacccgagacgcgatttctgtcacttgaagaggttgcggttgcgttcggtgatgatgtcgttacacgcgaggatgccaaagtcaaatgggccgaggacggccccgcaaggattcaacaagaggacaagaaggaagccacatcagatcatgtcgaggcatcagcaaagtga

SEQ ID NO: 28673 - protein, 507 aa, Muscodor strobelii
  misc_feature: SGI Peptide ID NO. 569836
  misc_feature (22)..(419): Pfam Id: PF07690 Pfam Desc: Major Facilitator Superfamily
  misc_feature (18)..(467): Pfam Id: PF00083 Pfam Desc: Sugar (and other) transporter
  misc_feature (16)..(503): NCBI GI: 212543849 Blast Desc: hexose carrier protein, [Penicillium marneffei ATCC 18224] gi|210066986|gb|EEA21079.1| hexose carrier protein, [Penicillium marneffei ATCC 18224]
  misc_feature (17)..(495): NCBI GI: 256730149 Blast Desc: NECHADRAFT_45500 [Nectria haematococca mpVI 77-13-4]
  misc_feature (6)..(503): NCBI GI: 115397513 Blast Desc: [Aspergillus terreus NIH2624] gi|114192539|gb|EAU34239.1| [Aspergillus terreus NIH2624]
  misc_feature (27)..(506): NCBI GI: 115391685 Blast Desc: conserved [Aspergillus terreus NIH2624] gi|114194271|gb|EAU35971.1| conserved [Aspergillus terreus NIH2624]
  misc_feature (19)..(486): NCBI GI: 169770909 Blast Desc: [Aspergillus oryzae RIB40] gi|83767783|dbj|BAE57922.1| protein product [Aspergillus oryzae]
  misc_feature (18)..(476): NCBI GI: 121698183 Blast Desc: MFS monosaccharide transporter (Hxt8), [Aspergillus clavatus NRRL 1] gi|119395883|gb|EAW06315.1| MFS monosaccharide transporter (Hxt8), [Aspergillus clavatus NRRL 1]
  misc_feature (10)..(469): NCBI GI: 212536350 Blast Desc: MFS monosaccharide transporter (Hxt8), [Penicillium marneffei ATCC 18224] gi|210070730|gb|EEA24820.1| MFS monosaccharide transporter (Hxt8), [Penicillium marneffei ATCC
  misc_feature (10)..(469): NCBI GI: 242795440 Blast Desc: MFS monosaccharide transporter (Hxt8), [Talaromyces stipitatus ATCC 10500] gi|218719178|gb|EED18598.1| MFS monosaccharide transporter (Hxt8), [Talaromyces stipitatus ATCC
  misc_feature (27)..(468): NCBI GI: 145233165 Blast Desc: An02g08230 [Aspergillus niger] gi|134056881|emb|CAK37785.1| protein product [Aspergillus niger]
  misc_feature (22)..(485): NCBI GI: 119488376 Blast Desc: sugar transporter [Neosartorya fischeri NRRL 181] gi|119410849|gb|EAW20794.1| sugar transporter [Neosartorya fischeri NRRL 181]
MTSRVAGHRGNSARSILVGLSISLAGFLYGLDTGIIASTIAQKSFKLYMYGPSLSNSAIQGGIVSGYYAGYTLGSGSAAYTMDKISRRWTLLLGCIISIIGAVLQAAAQNPAMMIVGRAFSGTSTGLIYPTAPVYLAELAAPENRGFLVGLKGLLNTLGFFVAGFIGYAGAFASGDIQWRVPLATQAPPALFLAILTVFLPYSPRWLAQREHYDDAKKVMDSLHGHRGAEVVETEFAEMCEQIRRESGNNKLENFKKLFTRQYIRRTLLACLIANMQKLSGSNIIQNYQSILYVSLGYKGKTVLFIGAIYGFAAIIGQVINIFLIADHWTRRKTMISGSYSLAIILAILTALSKFFADGTNQDGSRAAIAFIFLFAFAYSLFFNSIAWVLMAEIFPLPLRGVGVGFSVFTQAVTAIWLSYAASVAFDNISWKFYFVFIALNLFAGTVYLFFLPETRFLSLEEVAVAFGDDVVTREDAKVKWAEDGPARIQQEDKKEATSDHVEASAK

SEQ ID NO: 28674 - DNA, 1326 bp, Muscodor strobelii
  misc_feature: SGI cDNA ID NO. 569837
  misc_feature: Encodes the peptide sequence at SEQ ID NO 28675
atggcttctcaccaggcttctcaccaggcttctcaccaggcttctcaccaggcttctcaccaggcttctcaccaggcttctcaccaggcttctccactatgccataacatgccaacgattggcatgatatatgccgctggtggcacccgcgtcacgcataccttagtatgcgacgaggcaatcatcaagttcttcaaagacacaggtattgtcatgaaccaacaagtaatccaaggtcttgtgacacagatgtttgaggtggctggtccaatcattgcgcttggcgaccacacggaggcaaatatctgtcgccgcctcgtagatgtcaagacggcattgccatggagcaatgaaattgacagctctcccgccgctgagagtcaccttgataactctcccgccactacgactcgacttgacgagtctcctgcctccgagcttcccgtttccgggtcttctgccggtggatgttacaacaaggaagctcagcctaacgatcctgagcctggcgatattcagcctaacgatcctgagcctggcgatactcagcccaacgatcctcagcctggcgatgctcaacttgccgcgaagtctcgtactgaggcttattccgacgacagtcatcttcatgaagctttcgctaaggactctcctaccgccgagccttctactgccgagtcgcctgccgccaagtcgcctaacaccgagtctcctgatgccaagtgttcttccgccgagtctgatgatgaaaaggctcattctacaactgcacgccccgagagctctctcaccgacgtgtctgacggcgatcattcgctcagcgaaatggtgaaggcaatcgtcaaatttcgcaaagatgtccaggatgagaacaaggcatcttggatcgctgcgcagtttgaagaccacctacgacgcaagcgaatggaagccgcagcaggccttcgacctgttccgagggcgggtacgaaacgggagcagattgcggccgcagccgagcccttgacgaaggccaagaagacgaagatcgatggatctccctcatacaacccccctccgccgaagcagcacatcccggccaattacgtttgcatccattgcaaaaaacatatccagcaagtcgctgacacaaccccgaagatggattgtatggaacacaccggccagtatggtccgtatggaagatacgaaacgctcgcgtggagctgctgcggcgagccgaacgagttcatccgcacagaacgctgcatgagacaccacgagccgagcgaaggcgccgccaagcgtcatcttgcccgccgcatgtgggagaaagacaacgagtaa

SEQ ID NO: 28675 - protein, 441 aa, Muscodor strobelii
  misc_feature: SGI Peptide ID NO. 569837
MASHQASHQASHQASHQASHQASHQASHQASPLCHNMPTIGMIYAAGGTRVTHTLVCDEAIIKFFKDTGIVMNQQVIQGLVTQMFEVAGPIIALGDHTEANICRRLVDVKTALPWSNEIDSSPAAESHLDNSPATTTRLDESPASELPVSGSSAGGCYNKEAQPNDPEPGDIQPNDPEPGDTQPNDPQPGDAQLAAKSRTEAYSDDSHLHEAFAKDSPTAEPSTAESPAAKSPNTESPDAKCSSAESDDEKAHSTTARPESSLTDVSDGDHSLSEMVKAIVKFRKDVQDENKASWIAAQFEDHLRRKRMEAAAGLRPVPRAGTKREQIAAAAEPLTKAKKTKIDGSPSYNPPPPKQHIPANYVCIHCKKHIQQVADTTPKMDCMEHTGQYGPYGRYETLAWSCCGEPNEFIRTERCMRHHEPSEGAAKRHLARRMWEKDNE

SEQ ID NO: 28676 - DNA, 422 bp, Muscodor strobelii
  misc_feature: SGI EST ID NO. CUFF.67579.0
  misc_feature: Variant of the nucleotide sequence at SEQ ID NO 28674
caccgacgtgtctgacggcgatcattcgctcagcgaaatggtgaaggcaatcgtcaaatttcgcaaagatgtccaggatgagaacaaggcatcttggatcgctgcgcagtttgaagaccacctacgacgcaagcgaatggaagccgcagcaggccttcgacctgttccgagggcgggtacgaaacgggagcagattgcggccgcagccgagcccttgacgaaggccaagaagacgaagatcgatggatctccctcatacaacccccctccgccgaagcagcacatcccggccaattacgtttgcatccattgcaaaaaacatatccagcaagtcgctgacacaaccccgaagatggattgtatggaacacaccggccagtatggtccgtatggaagatacgaaacgctcgcgtggagctgct

SEQ ID NO: 28677 - DNA, 1854 bp, Muscodor strobelii
  misc_feature: SGI cDNA ID NO. 569838
  misc_feature: Reduced expression when VOC is produced
  misc_feature: Encodes the peptide sequence at SEQ ID NO 28678
atgatgcgcaatataccctcaaaaacggccatttgcccgtcgtgtctcttcaccgtcgccactcgcgctctactgcagagagacgctccgtcgtccgtcgcaaaacgattcttcaatgcacgagcaaagcccagcccatcgcgcatggttctctcggaccgtgtcgcacgtggcccgagacgcgatggcagcgaccgcgacaaccaaaagccaaggaggccagctggtcccttcggcggaatgaaccagaccgttgcccccgtcccacgagaccggccccgatactctcccacagcccctcgccgcaacgacagagatcgcagagatggaagagacaaagacaagaaggacgataggcggacgaaagcgatgaagatggcaaatgcattgtcgtccatatcgtacggccacagaaccaggatgaaggccagcatcagcgagctcgactctttcgaccaattcgacctcatgccgtccatacgttcagccatctcggacgaggtgctgaagggaatgacggacatcaagcctacgcctgtccagcgccttgccattccagccctgttgggccaggacaccggccgcttaagatcgagaaccgctgcatccaaggctgggagacgagagttcctcctcgcagccgaaaccggatctggcaagacactggcctatctgctccccgctgtacatgcgatgaagagtgccgagatagtagaccctgagatcactgcctaccgcgagtctttcgacaagcagatggctgccatggaggaagagggatacgacggcccccgagaattcgaaccacaccccaccgccgcgcgacctcgagtcgtcgttcttgtccccactgccgagctcgtcgaccaagttggggctgtggcaaaatcccttggccacgctgtcaagttcaagactggcttgttctcagctaatgtgtcagccaaggtgatccaggccgtcatgtactcgcccagaggcatcgacctcatcgtggctacaccccatctgctcaagtccatggctgacacggatccctacatcctgtctcgggtgagccatctcgtggtcgacgaggccgactcacttttcgatcgcagcttctcgcccgagacgacaggcattctggaccgcactctcccatccttgaaacagctcgttttgtgctcagctaccattcctaagcggctggacaacttcatcgggactcagtttcctgccatgacgagaatcacgacaccgaacctgcatgcgatcccacgacgtgtgcaactcggcgtcattgatgtctccaaggacatctaccacaacaacaagagccttgcctgtgcagatgccatctggtccatcggcaaggatgcggcggcccacgaagggtctgtgccaggggagatcgacatcaagcggatcatggtgttcgtgaacgagagggaaaagacacaagaggtggctgattacctcgtctcgaagggaatcgatgccgtggctctccaccgtgataccgaagagtcgcgtcagtcggagatgttggcgtcgttcacttctaacgatcctttgaggatggctaaacccgagccatctaagtcgagtggcactcctagtaggagatcgctcccgaacactaaggttctggttgcaacagacattgcttctcgaggcattgatacattggctgttcgacacgtcatcctctatgatgtgccccatacgacgatcgacttcatccatcgcctaggccgtgccggacgcatgggtcggcgtggacgaggtatcgtcttggtggggaagaacgaccgacgagatatcgtcgcagaggtcagggaaagcatgtacatgggccaggcgctcatctaa

SEQ ID NO: 28678 - protein, 617 aa, Muscodor strobelii
  misc_feature: SGI Peptide ID NO. 569838
  misc_feature (178)..(400): Pfam Id: PF00270 Pfam Desc: DEAD/DEAH box helicase
  misc_feature (486)..(585): Pfam Id: PF00271 Pfam Desc: Helicase conserved C-terminal domain
  misc_feature (34)..(617): NCBI GI: 164425218 Blast Desc: NCU06246 [Neurospora crassa OR74A] gi|157070837|gb|EAA33861.2| conserved [Neurospora crassa OR74A]
  misc_feature (41)..(617): NCBI GI: 39940256 Blast Desc: MGG_05112 [Magnaporthe grisea 70-15] gi|152032603|sp|A4QTC6.1|MRH4_MAGGR RecName: Full=ATP-dependent RNA helicase MRH4, mitochondrial; Flags: Precursor MGG_05112
  misc_feature (7)..(617): NCBI GI: 171686624 Blast Desc: protein product [Podospora anserina] gi|170943273|emb|CAP68926.1| protein product [Podospora anserina]
  misc_feature (9)..(617): NCBI GI: 256733168 Blast Desc: NECHADRAFT_92810 [Nectria haematococca mpVI 77-13-4]
  misc_feature (9)..(613): NCBI GI: 46125173 Blast Desc: FG06964.1 [Gibberella zeae PH-1]
  misc_feature (12)..(617): NCBI GI: 261360296 Blast Desc: ATP-dependent RNA helicase mrh-4 [Verticillium albo-atrum VaMs.102]
  misc_feature (8)..(617): NCBI GI: 156044993 Blast Desc: SS1G_09685 [Sclerotinia sclerotiorum 1980] gi|160409994|sp|A7EWH6.1|MRH4_SCLS1 RecName: Full=ATP-dependent RNA helicase mrh4, mitochondrial; Flags: Precursor SS1G_09685
  misc_feature (13)..(617): NCBI GI: 143354858 Blast Desc: SS1G_09685 [Sclerotinia sclerotiorum 1980] gi|160409994|sp|A7EWH6.1|MRH4_SCLS1 RecName: Full=ATP-dependent RNA helicase mrh4, mitochondrial; Flags: Precursor SS1G_09685
  misc_feature (39)..(617): NCBI GI: 121698293 Blast Desc: ATP-dependent RNA helicase Mrh4, [Aspergillus clavatus NRRL 1] gi|119395916|gb|EAW06348.1| ATP-dependent RNA helicase Mrh4, [Aspergillus clavatus NRRL 1]
  misc_feature (4)..(617): NCBI GI: 143354874 Blast Desc: ATP-dependent RNA helicase Mrh4, [Aspergillus clavatus NRRL 1] gi|119395916|gb|EAW06348.1| ATP-dependent RNA helicase Mrh4, [Aspergillus clavatus NRRL 1]
  misc_feature: Useful for introducing or modulating the production of volatile compounds
MMRNIPSKTAICPSCLFTVATRALLQRDAPSSVAKRFFNARAKPSPSRMVLSDRVARGPRRDGSDRDNQKPRRPAGPFGGMNQTVAPVPRDRPRYSPTAPRRNDRDRRDGRDKDKKDDRRTKAMKMANALSSISYGHRTRMKASISELDSFDQFDLMPSIRSAISDEVLKGMTDIKPTPVQRLAIPALLGQDTGRLRSRTAASKAGRREFLLAAETGSGKTLAYLLPAVHAMKSAEIVDPEITAYRESFDKQMAAMEEEGYDGPREFEPHPTAARPRVVVLVPTAELVDQVGAVAKSLGHAVKFKTGLFSANVSAKVIQAVMYSPRGIDLIVATPHLLKSMADTDPYILSRVSHLVVDEADSLFDRSFSPETTGILDRTLPSLKQLVLCSATIPKRLDNFIGTQFPAMTRITTPNLHAIPRRVQLGVIDVSKDIYHNNKSLACADAIWSIGKDAAAHEGSVPGEIDIKRIMVFVNEREKTQEVADYLVSKGIDAVALHRDTEESRQSEMLASFTSNDPLRMAKPEPSKSSGTPSRRSLPNTKVLVATDIASRGIDTLAVRHVILYDVPHTTIDFIHRLGRAGRMGRRGRGIVLVGKNDRRDIVAEVRESMYMGQALI

SEQ ID NO: 28679 - DNA, 1800 bp, Muscodor strobelii
  misc_feature: SGI cDNA ID NO. 569839
  misc_feature: Encodes the peptide sequence at SEQ ID NO 28680
atgccgagaccacccagaggccgggccgcacaagcgcgcctagccaaagccgcaaagacaaacgcagcacccgcgcccgcactcgagccgccagctggtaatgccagctccgacatctacgatgtgagcgaccgcgagaaagagcgcaccgccgcgagacgcgcgtcgctgcaagaggcagcctcacgaacgacctccgccgagacggtgcagcagaagcgaagcgtcagtaaaggcttgaaggaccgcgatgccgccatggacagactgcaaaatatgacatctacgagcggctcggaggatagcgaggatgtgaatgagaaatcgcaccacactgtcgactcgccacagcttggcgaggcggccaccccgcgacgaagaacaaatgccgacctgtcgggcttcgacctcgatgacgacgagttcaataatctcaacactactattgatactgtggcgcacgagacggctcagccctccgctgagacatcgacctggtccgccagccacttcagacggcgacctcgcgcaggaagctttctcagtcgcgacgatgggcccatccgtcctcccagccgcggtgtccccaacactcctctctttagctcaaccttgaacctaggagtgttcaagagaagagcgcgagaaccaagcattctgagcaccgcccagaaaccgagaccgcagcgccccgagcctgagggagactccgaaaatgatgacgacaatgacctcgaggacgacatggataacggtggtgaagaaaatgcatccgatcctgaagacgaatcgacccctctccgacgttctaccagacgctctaaggcagcggacctggtcgaagtcgaatctagtgcgaattcacgcaaacgaaaatccacaggaacccacgagcgacgcgcccgatcatctcccttcgaaggaggagaagaaggagaagaggagataatccgcaactccatcgaggaaccagatgcgagcgattcctcccagctctcccttcccgacctaccaccctcaacacctgtaagggcctcgatggacccagcattgatggcaccacccatgagcagcgactcgtcagataacgaagacgagatctggccgccaatcacctccatgcccaagacacgagcgcgtcaaacgccgcatgtggacgaaaatgtttccgacatgtcctctccgccctcactaacccattcaccgaactacgccgaatcgtcctccccgccacctgcacgggctaccagagcggccaccaagaaaaagaccgctgcacctaaaccgatgccgaaactcacgacggcgcaacttacaggtctattgccgcgtcggaggaagagaagcgggaatgacgatcccttcaatattaatgaagatgattcagagcacgaggtcgacgtctcgggcttgggcgccgatgatgacgagctggagatgaacgtccgaccgagtcgtcgaccggcctcacgagcaggcacgagacaacaaactacagcgaaatcatcacggatgaatacgcgtaaagagactacagttgcttctggaaagaataaaacagtctcgaggacgtatagtcgactgtcagacaaggagaatgagaaccaggacgaggagaacgagaatgaggagagagaagatgcagctgcagaaaacgaaataggggaggaagatagccagatgctcgttgagaggatgggcgtcgagcttaagaatgcggtgaggaagtttcaggaggtggataagtgggagctttcgtatgaggagggcgtcaggagtagctctcccctagatgcttga

SEQ ID NO: 28680 - protein, 599 aa, Muscodor strobelii
  misc_feature: SGI Peptide ID NO. 569839
  misc_feature (35)..(596): NCBI GI: 261360295 Blast Desc: conserved [Verticillium albo-atrum VaMs.102]
  misc_feature (1)..(596): NCBI GI: 39974753 Blast Desc: MGG_00477 [Magnaporthe grisea 70-15] gi|145018626|gb|EDK02905.1| MGG_00477 [Magnaporthe grisea 70-15]
  misc_feature (1)..(597): NCBI GI: 85084011 Blast Desc: NCU00110 [Neurospora crassa OR74A] gi|28918322|gb|EAA27998.1| [Neurospora crassa OR74A]
  misc_feature (83)..(597): NCBI GI: 46125173 Blast Desc: FG06964.1 [Gibberella zeae PH-1]
  misc_feature (1)..(597): NCBI GI: 171686536 Blast Desc: protein product [Podospora anserina] gi|170943229|emb|CAP68882.1| protein product [Podospora anserina]
  misc_feature (1)..(230): NCBI GI: 116208162 Blast Desc: CHGG_03374 [Chaetomium globosum CBS 148.51] gi|88183971|gb|EAQ91439.1| CHGG_03374 [Chaetomium globosum CBS 148.51]
  misc_feature (178)..(597): NCBI GI: 154302865 Blast Desc: BC1G_09176 [Botryotinia fuckeliana B05.10] gi|150855100|gb|EDN30292.1| BC1G_09176 [Botryotinia fuckeliana B05.10]
  misc_feature (398)..(597): NCBI GI: 156048264 Blast Desc: SS1G_08863 [Sclerotinia sclerotiorum 1980] gi|154693260|gb|EDN92998.1| SS1G_08863 [Sclerotinia sclerotiorum 1980]
  misc_feature (83)..(229): NCBI GI: 256733168 Blast Desc: NECHADRAFT_92810 [Nectria haematococca mpVI 77-13-4]
  misc_feature (441)..(596): NCBI GI: 116208162 Blast Desc: CHGG_03374 [Chaetomium globosum CBS 148.51] gi|88183971|gb|EAQ91439.1| CHGG_03374 [Chaetomium globosum CBS 148.51]
MPRPPRGRAAQARLAKAAKTNAAPAPALEPPAGNASSDIYDVSDREKERTAARRASLQEAASRTTSAETVQQKRSVSKGLKDRDAAMDRLQNMTSTSGSEDSEDVNEKSHHTVDSPQLGEAATPRRRTNADLSGFDLDDDEFNNLNTTIDTVAHETAQPSAETSTWSASHFRRRPRAGSFLSRDDGPIRPPSRGVPNTPLFSSTLNLGVFKRRAREPSILSTAQKPRPQRPEPEGDSENDDDNDLEDDMDNGGEENASDPEDESTPLRRSTRRSKAADLVEVESSANSRKRKSTGTHERRARSSPFEGGEEGEEEIIRNSIEEPDASDSSQLSLPDLPPSTPVRASMDPALMAPPMSSDSSDNEDEIWPPITSMPKTRARQTPHVDENVSDMSSPPSLTHSPNYAESSSPPPARATRAATKKKTAAPKPMPKLTTAQLTGLLPRRRKRSGNDDPFNINEDDSEHEVDVSGLGADDDELEMNVRPSRRPASRAGTRQQTTAKSSRMNTRKETTVASGKNKTVSRTYSRLSDKENENQDEENENEEREDAAAENEIGEEDSQMLVERMGVELKNAVRKFQEVDKWELSYEEGVRSSSPLDA

SEQ ID NO: 28681 - DNA, 996 bp, Muscodor strobelii
  misc_feature: SGI cDNA ID NO. 569840
  misc_feature: Encodes the peptide sequence at SEQ ID NO 28682
atgacgacagccccgcgcaccgtgatcccctcccaccagagctccatcgacgagccctggcccagcccaagcaagctcgcagcagcgacgacaacgcaccgacaaggccgcttcgagatctcgagtcgcaaactgcctatctccaaagctggtccgatccaagacatggagacgcggctccgcatccccgtgccggagatgatcttcggcgataatctggtctcgatccgccacgtgccgtcgaattggcgcatagagttcaacgcctgcgatgcgctggatgaggtggataagacgggcgataatatgctgcaggttgcttacgcgggggagtggagcgcgagtagagagcagacttcggcgggcattcgtgaggttgttaggccgtttgattggagttatagtacgacttataaagggactgttttatctcccaccactaccaccaacggcactactacttccgacaccacatcatcgagcaaatctctcgttttgcagccctcgaatgaaccgatccctatcgaactgctcaagcgcagagacccaatcttattcttcgacgatgtgatgctgtacgagagtgagctggacgataatgggatctcggtgtatagcgtcaaggtcagggttcatgagaagaggatgttgttgctgtgtcggttgtatatgagacttgacaacgtcgtttgtcgggttagggatacgagggtatatgttgattttgagacggagatggttacgagggagtattgtgttaaggaggcggggtgggagagcgttaagcaggttagtattttcgacctcatttcgtcttcctggttttttcttcctgattggggagagatatacgttttgctgaccactgcgcagaaactgtttatgacaggattgcgccccgatggcatcacggtcgctttgcgagatgcaaatcagattgctgagatcttgcctattgttgggcagacgctggaaagcgtatcactcggatcgtaa

SEQ ID NO: 28682 - protein, 331 aa, Muscodor strobelii
  misc_feature: SGI Peptide ID NO. 569840
  misc_feature (67)..(263): Pfam Id: PF04176 Pfam Desc: TIP41-like family
  misc_feature (14)..(326): NCBI GI: 261360294 Blast Desc: type 2A phosphatase activator TIP41 [Verticillium albo-atrum VaMs.102]
  misc_feature (11)..(330): NCBI GI: 164428847 Blast Desc: NCU00109 [Neurospora crassa OR74A] gi|157072306|gb|EAA27997.2| NCU00109 [Neurospora crassa OR74A]
  misc_feature (11)..(331): NCBI GI: 256732718 Blast Desc: NECHADRAFT_79194 [Nectria haematococca mpVI 77-13-4]
  misc_feature (11)..(331): NCBI GI: 46125171 Blast Desc: FG06963.1 [Gibberella zeae PH-1]
  misc_feature (12)..(329): NCBI GI: 39974751 Blast Desc: MGG_00478 [Magnaporthe grisea 70-15] gi|145018625|gb|EDK02904.1| MGG_00478 [Magnaporthe grisea 70-15]
  misc_feature (16)..(329): NCBI GI: 154290085 Blast Desc: BC1G_15822 [Botryotinia fuckeliana B05.10] gi|150848456|gb|EDN23649.1| BC1G_15822 [Botryotinia fuckeliana B05.10]
  misc_feature (16)..(329): NCBI GI: 156047848 Blast Desc: SS1G_08654 [Sclerotinia sclerotiorum 1980] gi|154693052|gb|EDN92790.1| SS1G_08654 [Sclerotinia sclerotiorum 1980]
  misc_feature (21)..(330): NCBI GI: 116208164 Blast Desc: CHGG_03375 [Chaetomium globosum CBS 148.51] gi|88183972|gb|EAQ91440.1| CHGG_03375 [Chaetomium globosum CBS 148.51]
  misc_feature (20)..(329): NCBI GI: 238837707 Blast Desc: type 2A phosphatase activator TIP41 [Microsporum canis CBS 113480]
  misc_feature (11)..(331): NCBI GI: 240272950 Blast Desc: TipA protein [Ajellomyces capsulatus H143]
MTTAPRTVIPSHQSSIDEPWPSPSKLAAATTTHRQGRFEISSRKLPISKAGPIQDMETRLRIPVPEMIFGDNLVSIRHVPSNWRIEFNACDALDEVDKTGDNMLQVAYAGEWSASREQTSAGIREVVRPFDWSYSTTYKGTVLSPTTTTNGTTTSDTTSSSKSLVLQPSNEPIPIELLKRRDPILFFDDVMLYESELDDNGISVYSVKVRVHEKRMLLLCRLYMRLDNVVCRVRDTRVYVDFETEMVTREYCVKEAGWESVKQVSIFDLISSSWFFLPDWGEIYVLLTTAQKLFMTGLRPDGITVALRDANQIAEILPIVGQTLESVSLGS

SEQ ID NO: 28683 - DNA, 3486 bp, Muscodor strobelii
  misc_feature: SGI EST ID NO. CUFF.67613.1
  misc_feature: Variant of the nucleotide sequence at SEQ ID NO 28681
caaatcctcttcaagaaatcaaagtctttttcagaccgcgtaattcaagacttgatatattcaaaacattattgtccaactacccaggctcacgaatactccgcgtctcactcgcagctcgctcgagcaacaaggcacaatgacgacagccccgcgcaccgtgatcccctcccaccagagctccatcgacgagccctggcccagcccaagcaagctcgcagcagcgacgacaacgcaccgacaaggccgcttcgagatctcgagtcgcaaactgcctatctccaaagctggtccgatccaagacatggagacgcggctccgcatccccgtgccggagatgatcttcggcgataatctggtctcgatccgccacgtgccgtcgaattggcgcatagagttcaacgcctgcgatgcgctggatgaggtggataagacgggcgataatatgctgcaggttgcttacgcgggggagtggagcgcgagtagagagcagacttcggcgggcattcgtgaggttgttaggccgtttgattggagttatagtacgacttataaagggactgttttatctcccaccactaccaccaacggcactactacttccgacaccacatcatcgagcaaatctctcgttttgcagccctcgaatgaaccgatccctatcgaactgctcaagcgcagagacccaatcttattcttcgacgatgtgatgctgtacgagagtgagctggacgataatgggatctcggtgtatagcgtcaaggtcagggttcatgagaagaggatgttgttgctgtgtcggttgtatatgagacttgacaacgtcgtttgtcgggttagggatacgagggtatatgttgattttgagacggagatggttacgagggagtattgtgttaaggaggcggggtgggagagcgttaagcagaaactgtttatgacaggattgcgccccgatggcatcacggtcgctttgcgagatgcaaatcagattgctgagatcttgcctattgttgggcagacgctggaaagcgtatcactcggatcgtaatagacgatcgaaattttcagatcgcacagatgaaatacccgggctagatgagcataaatccaggtcgagggataagaaaaacggaaaactctactcagccagactgaagtattggaggaatagcaagtccatggagtcaacggacggagaagtgcagtgtcactgctgcagcacaatatgtacagaaagaaggcaggatcagggggtcatatatgtggtattggagcgtaaagcagacaaacaagctacaaacgctctagatcaagtaaccataaggtatgcagtcttccccttctcataatccacagccctagactttagctaacaagctagacaaaagccaaataaaagatcatctcatgcatcatgaccacacaacaacgccacagtttttctttctcatgtcttctgtcacactcaaagcccaagccgtgaccagacaccaaacccaaacacactcctaagaaatcaagcatctaggggagagctactcctgacgccctcctcatacgaaagctcccacttatccacctcctgaaacttcctcaccgcattcttaagctcgacgcccatcctctcaacgagcatctggctatcttcctcccctatttcgttttctgcagctgcatcttctctctcctcattctcgttctcctcgtcctggttctcattctccttgtctgacagtcgactatacgtcctcgagactgttttattctttccagaagcaactgtagtctctttacgcgtattcatccgtgatgatttcgctgtagtttgttgtctcgtgcctgctcgtgaggccggtcgacgactcggtcggacgttcatctccagctcgtcatcatcggcgcccaagcccgagacgtcgacctcgtgctctgaatcatcttcattaatattgaagggatcgtcattcccgcttctcttcctccgacgcggcaatagacctgtaagttgcgccgtcgtgagtttcggcatcggtttaggtgcagcggtctttttcttggtggccgctctggtagcccgtgcaggtggcggggaggacgattcggcgtagttcggtgaatgggttagtgagggcggagaggacatgtcggaaacattttcgtccacatgcggcgtttgacgcgctcgtgtcttgggcatggaggtgattggcggccagatctcgtcttcgttatctgacgagtcgctgctcatgggtggtgccatcaatgctgggtccatcgaggcccttacaggtgttgagggtggtaggtcgggaagggagagctgggaggaatcgctcgcatctggttcctcgatggagttgcggattatctcctcttctccttcttctcctccttcgaagggagatgatcgggcgcgtcgctcgtgggttcctgtggattttcgtttgcgtgaattcgcactagattcgacttcgaccaggtccgctgccttagagcgtctggtagaacgtcggagaggggtcgattcgtcttcaggatcggatgcattttcttcaccaccgttatccatgtcgtcctcgaggtcattgtcgtcatcattttcggagtctccctcaggctcggggcgctgcggtctcggtttctgggcggtgctcagaatgcttggttctcgcgctcttctcttgaacactcctaggttcaaggttgagctaaagagaggagtgttggggacaccgcggctgggaggacggatgggcccatcgtcgcgactgagaaagcttcctgcgcgaggtcgccgtctgaagtggctggcggaccaggtcgatgtctcagcggagggctgagccgtctcgtgcgccacagtatcaatagtagtgttgagattattgaactcgtcgtcatcgaggtcgaagcccgacaggtcggcatttgttcttcgtcgcggggtggccgcctcgccaagctgtggcgagtcgacagtgtggtgcgatttctcattcacatcctcgctatcctccgagccgctcgtagatgtcatattttgcagtctgtccatggcggcatcgcggtccttcaagcctttactgacgcttcgcttctgctgcaccgtctcggcggaggtcgttcgtgaggctgcctcttgcagcgacgcgcgtctcgcggcggtgcgctctttctcgcggtcgctcacatcgtagatgtcggagctggcattaccagctggcggctcgagtgcgggcgcgggtgctgcgtttgtctttgcggctttggctaggcgcgcttgtgcggcccggcctctgggtggtctcggcatagcgggcggtggttgcagtcgaagcttcagagagatgtgttgtctaatacaaaagataggttcaaccggagtcgcggatcggcaattgggggtgttcagaacgtgtgtcgttgttgtgataagtatgtggtacaggagttgagggtcgaaaacaatgccaatggtgg

SEQ ID NO: 28684 - DNA, 1674 bp, Muscodor strobelii
  misc_feature: SGI cDNA ID NO. 569841
  misc_feature: Encodes the peptide sequence at SEQ ID NO 28685
atggcatatgaccaacacgaccaacaagaggccgatgttcgaatcgaggctcttttgcagcagcgccacttattgaccgcagaactactagagcgtccctacgatttggtgctgtaccttaaacgtgctattgtttattccgacttgggctaccctgacttggcttctggcgatgcgtaccgggctttactcctaaccgacgaggttcgaaatgatggctttgagtaccatgatgtagcatccactgtcatgtcaacttatacgcaaggtgcacttttacaagcgcttgatcatgggaatttgtctggagcccaacttcgtttggctgaatcggacgctggtaaagatcccgcggctcttgcttcactggtctcgattcgatgcttccagattttagctctgagcctgctgctatgcggttgtctcaagagtgcttatagctttggggagcgaggtctcgccttggctccggataaccgggaactccagaatgcaatgcactatattcgcaccgtcgccgaacgaagggtacggggcgaaataaacagcgtcaatgacctacctgactggggaatggttcgacgagaggtctatccctggaacgattttgagccaaatcgattctcggaggaatctctagagtttctcaacggtgagttggcgagtatggcacccaagtgttgtgtccaagtcgcccagcttcctattcttctaggaggtgcaagcgaaacagatggatatgatattattccgacttgcaaccagctgggtgtttttgcaaaggaggacatcggccctggagaagacgttcttgtcgagtactccttagtaactgcaaacaatcgtctcaaagactcggtttgtgatgcttgtggaggtgaacttcctcccctcggggctgactctcccgctgttaattgtccagagtgtttcgacactgttttctgcgatcagtactgtttcgaaaaggcgcaggaactatatcacccggctgtatgtgataaagacgtcgactcgatcgccaaggatcccgaagcaaaagaggcggacgagaccctccatctgctgctccttgctcgtgtgttagcgatggcggcacaccaggacattcatcctttagacgtgaaccaaataaaatacatttggggtgattttgttgattcccagtccaacgaaattgacctgtcaccgaacgccggtccacctcctgaatggactttgcccttctcattcaaatacaacatcgagacaccgctacacattctcgagaaaatggacatcgacatttatgctacccttggacgccacgatatatgggtcttgaacactctttacagcaaatttcgtggtaccgcatcggcccgcaagaatcccagagacggtcggccggatgtggcagctgtgcacccattttggtgtctggccaaccacgactgcaacccgaatgtgacctgggagtggggcgggagaatggtgctgaaagcaagagagcggcgcgtggtgaacaatgcgcctggaggcatcagggaaggcgaagagattctcaaccactattgcgatgtcgaccttccagtccaacaacggcgggaatgggccataggcagtctcggcggctggtgtatgtgccagcgttgtcgggatgaatcagcatcaaatggtcagccaaatgggtga

SEQ ID NO: 28685 - protein, 557 aa, Muscodor strobelii
  misc_feature: SGI Peptide ID NO. 569841
  misc_feature (16)..(554): NCBI GI: 46125309 Blast Desc: FG07032.1 [Gibberella zeae PH-1]
  misc_feature (18)..(548): NCBI GI: 116192159 Blast Desc: CHGG_05797 [Chaetomium globosum CBS 148.51] gi|88181710|gb|EAQ89178.1| CHGG_05797 [Chaetomium globosum CBS 148.51]
  misc_feature (10)..(539): NCBI GI: 164428828 Blast Desc: NCU00089 [Neurospora crassa OR74A] gi|157072298|gb|EAA27977.2| conserved [Neurospora crassa OR74A]
  misc_feature (73)..(553): NCBI GI: 261360316 Blast Desc: conserved [Verticillium albo-atrum VaMs.102]
  misc_feature (15)..(551): NCBI GI: 39969083 Blast Desc: MGG_10152 [Magnaporthe grisea 70-15] gi|145021292|gb|EDK05421.1| MGG_10152 [Magnaporthe grisea 70-15]
  misc_feature (10)..(545): NCBI GI: 171686684 Blast Desc: protein product [Podospora anserina] gi|170943303|emb|CAP68956.1| protein product [Podospora anserina]
  misc_feature (4)..(557): NCBI GI: 156051566 Blast Desc: SS1G_07190 [Sclerotinia sclerotiorum 1980] gi|154704968|gb|EDO04707.1| SS1G_07190 [Sclerotinia sclerotiorum 1980]
  misc_feature (33)..(550): NCBI GI: 238843502 Blast Desc: wd and tetratricopeptide repeat protein [Microsporum canis CBS 113480]
  misc_feature (15)..(550): NCBI GI: 238483445 Blast Desc: MYND domain protein, [Aspergillus flavus NRRL3357] gi|220701011|gb|EED57349.1| MYND domain protein, [Aspergillus flavus NRRL3357]
  misc_feature (12)..(551): NCBI GI: 70990402 Blast Desc: MYND domain protein [Aspergillus fumigatus Af293] gi|66847682|gb|EAL88012.1| MYND domain protein, [Aspergillus fumigatus Af293]
MAYDQHDQQEADVRIEALLQQRHLLTAELLERPYDLVLYLKRAIVYSDLGYPDLASGDAYRALLLTDEVRNDGFEYHDVASTVMSTYTQGALLQALDHGNLSGAQLRLAESDAGKDPAALASLVSIRCFQILALSLLLCGCLKSAYSFGERGLALAPDNRELQNAMHYIRTVAERRVRGEINSVNDLPDWGMVRREVYPWNDFEPNRFSEESLEFLNGELASMAPKCCVQVAQLPILLGGASETDGYDIIPTCNQLGVFAKEDIGPGEDVLVEYSLVTANNRLKDSVCDACGGELPPLGADSPAVNCPECFDTVFCDQYCFEKAQELYHPAVCDKDVDSIAKDPEAKEADETLHLLLLARVLAMAAHQDIHPLDVNQIKYIWGDFVDSQSNEIDLSPNAGPPPEWTLPFSFKYNIETPLHILEKMDIDIYATLGRHDIWVLNTLYSKFRGTASARKNPRDGRPDVAAVHPFWCLANHDCNPNVTWEWGGRMVLKARERRVVNNAPGGIREGEEILNHYCDVDLPVQQRREWAIGSLGGWCMCQRCRDESASNGQPNG

SEQ ID NO: 28686 - DNA, 3181 bp, Muscodor strobelii
  misc_feature: SGI EST ID NO. CUFF.67640.2
  misc_feature: Variant of the nucleotide sequence at SEQ ID NO 28684
gctcgaggccgatccttaacacagctaggatcaagactcggggcaattgttatttttttggtatcggtagagatgcctagttgaatgtcattctttcaatctgattacatcattatcggtctcatttggatagacagttacgctattagagtcgggtgcgcaagtcccaactcccatgggtgcacaggcgaccatccatcctcaaaaaagtcgaaattaagggtcctgctcaaacggaggaggggttcgaggggcacagaagagacgcgccatacctctgacttccgatcccacctcgcgccattatctcacggccaacccagacaccacttcccgccaggaagctggatgacgagcccttgacagggatcactgcgccttctctgccttctctgccttctctcgctagactgggtccacccctgcgtgccttttctttttccctcaattcgatgataatgaccacacggtgaacaaacatcaatccgccaacctccatatcttcaaaaatactggagcctttttggtgcgcgccacagctagccggcaagtgatcgtactccgcgccggccatggcatatgaccaacacgaccaacaagaggccgatgttcgaatcgaggctcttttgcagcagcgccacttattgaccgcagaactactagagcgtccctacgatttggtgctgtaccttaaacgtgctattgtttattccgacttgggctaccctgacttggcttctggcgatgcgtaccgggctttactcctaaccgacgaggttcgaaatgatggctttgagtaccatgatgtagcatccactgtcatgtcaacttatacgcaaggtgcacttttacaagcgcttgatcatgggaatttgtctggagcccaacttcgtttggctgaatcggacgctggtaaagatcccgcggctcttgcttcactggtctcgattcgatgcttccagattttagctctgagcctgctgctatgcggttgtctcaagagtgcttatagctttggggagcgaggtctcgccttggctccggataaccgggaactccagaatgcaatgcactatattcgcaccgtcgccgaacgaagggtacggggcgaaataaacagcgtcaatgacctacctgactggggaatggttcgacgagaggtctatccctggaacgattttgagccaaatcgattctcggaggaatctctagagtttctcaacggtgagttggcgagtatggcacccaagtgttgtgtccaagtcgcccagcttcctattcttctaggaggtgcaagcgaaacagatggatatgatattattccgacttgcaaccagctgggtgtttttgcaaaggaggacatcggccctggagaagacgttcttgtcgagtactccttagtaactgcaaacaatcgtctcaaagactcggtttgtgatgcttgtggaggtgaacttcctcccctcggggctgactctcccgctgttaattgtccagagtgtttcgacactgttttctgcgatcagtactgtttcgaaaaggcgcaggaactatatcacccggctgtatgtgataaagacgtcgactcgatcgccaaggatcccgaagcaaaagaggcggacgagaccctccatctgctgctccttgctcgtgtgttagcgatggcggcacaccaggacattcatcctttagacgtgaaccaaataaaatacatttggggtgattttgttgattcccagtccaacgaaattgacctgtcaccgaacgccggtccacctcctgaatggactttgcccttctcattcaaatacaacatcgagacaccgctacacattctcgagaaaatggacatcgacatttatgctacccttggacgccacgatatatgggtcttgaacactctttacagcaaatttcgtggtaccgcatcggcccgcaagaatcccagagacggtcggccggatgtggcagctgtgcacccattttggtgtctggccaaccacgactgcaacccgaatgtgacctgggagtggggcgggagaatggtgctgaaagcaagagagcggcgcgtggtgaacaatgcgcctggaggcatcagggaaggcgaagagattctcaaccactattgcgatgtcgaccttccagtccaacaacggcgggaatgggccataggcagtctcggcggctggtgtatgtgccagcgttgtcgggatgaatcagcatcaaatggtcagccaaatgggtgatgctgggcgtagctcacgttttaatcaagctgtgatattatcttcaccttgaagcaagagggcgagccgggaagacgtgattatatacgtgtcaacgtcaccggactcaggggtgtgattcctctagcatttacagatctgacttcgatggcgtgcaggagagagccgggctgtatgtcaagcttgacaagtggaaccagacgacccgcttgcaggcgcaagcaaagctacctcgcgtatggcaaccggcaacgataatgcacgacgagtctatgtctccttcagcacacgaacacttccatttatatgcttgttgccagtacccgagaggccgtatacgaagatctatatataagttaaaaggaagaaggtggaggaaaaaaacgataagtcattttgtcttaccagagatgaaccaagcgataaaaaatacaaaaatcgttgaacatcatgtgggaatagatacggcgttccatttggatgacatgcttgtgcccttagatcttgatgagaggctgctgaagtccccgttgatactgtaagaatctacctacaaataggtagtcacatcctatattcagtctttagctctgtcgctgcaatgatctctacccactgtctaggtactttcaccctgttgtccaggagaggtatgctcatggactcgagacagcaatgcatcgttgcattattagaaggcaacaccgttgtcgctggttcgactcactgatcgactcatccatatacccgtcctggagagatctaagtgaggtacacttgacatacaaggcgacttctagaagataacgagatactaggacgtagtcgcaaataatttcaagcacatgaggaatatcaatattatgaatccatcaacgcactttaatatattgagatcgacacatcgcacgtttcggtgacttgggtacaattag

SEQ ID NO: 28687 - DNA, 1179 bp, Muscodor strobelii
  misc_feature: SGI cDNA ID NO. 569842
  misc_feature: Encodes the peptide sequence at SEQ ID NO 28688
atgcactatattcgcaccgtcgccgaacgaagggtacggggcgaaataaacagcgtcaatgacctacctgactggggaatggttcgacgagaggtctatccctggaacgattttgagccaaatcgattctcggaggaatctctagagtttctcaacggtgagttggcgagtatggcacccaagtgttgtgtccaagtcgcccagcttcctattcttctaggaggtgcaagcgaaacagatggatatgatattattccgacttgcaaccagctgggtgtttttgcaaaggaggacatcggccctggagaagacgttcttgtcgagtactccttagtaactgcaaacaatcgtctcaaagactcggtttgtgatgcttgtggaggtgaacttcctcccctcggggctgactctcccgctgttaattgtccagagtgtttcgacactgttttctgcgatcagtactgtttcgaaaaggcgcaggaactatatcacccggctgtatgtgataaagacgtcgactcgatcgccaaggatcccgaagcaaaagaggcggacgagaccctccatctgctgctccttgctcgtgtgttagcgatggcggcacaccaggacattcatcctttagacgtgaaccaaataaaatacatttggggtgattttgttgattcccagtccaacgaaattgacctgtcaccgaacgccggtccacctcctgaatggactttgcccttctcattcaaatacaacatcgagacaccgctacacattctcgagaaaatggacatcgacatttatgctacccttggacgccacgatatatgggtcttgaacactctttacagcaaatttcgtggtaccgcatcggcccgcaagaatcccagagacggtcggccggatgtggcagctgtgcacccattttggtgtctggccaaccacgactgcaacccgaatgtgacctgggagtggggcgggagaatggtgctgaaagcaagagagcggcgcgtggtgaacaatgcgcctggaggcatcagggaaggcgaagagattctcaaccactattgcgatgtcgaccttccagtccaacaacggcgggaatgggccataggcagtctcggcggctggtgtatgtgccagcgttgtcgggatgaatcagcatcaaatggtcagccaaatgggtga

SEQ ID NO: 28688 - protein, 392 aa, Muscodor strobelii
  misc_feature: SGI Peptide ID NO. 569842
  misc_feature (3)..(387): NCBI GI: 261360316 Blast Desc: conserved [Verticillium albo-atrum VaMs.102]
  misc_feature (21)..(389): NCBI GI: 46125309 Blast Desc: FG07032.1 [Gibberella zeae PH-1]
  misc_feature (21)..(387): NCBI GI: 256732728 Blast Desc: [Nectria haematococca mpVI 77-13-4]
  misc_feature (3)..(383): NCBI GI: 116192159 Blast Desc: CHGG_05797 [Chaetomium globosum CBS 148.51] gi|88181710|gb|EAQ89178.1| CHGG_05797 [Chaetomium globosum CBS 148.51]
  misc_feature (3)..(374): NCBI GI: 164428828 Blast Desc: NCU00089 [Neurospora crassa OR74A] gi|157072298|gb|EAA27977.2| conserved [Neurospora crassa OR74A]
  misc_feature (1)..(386): NCBI GI: 39969083 Blast Desc: MGG_10152 [Magnaporthe grisea 70-15] gi|145021292|gb|EDK05421.1| MGG_10152 [Magnaporthe grisea 70-15]
  misc_feature (3)..(380): NCBI GI: 171686684 Blast Desc: protein product [Podospora anserina] gi|170943303|emb|CAP68956.1| protein product [Podospora anserina]
  misc_feature (3)..(392): NCBI GI: 156051566 Blast Desc: SS1G_07190 [Sclerotinia sclerotiorum 1980] gi|154704968|gb|EDO04707.1| SS1G_07190 [Sclerotinia sclerotiorum 1980]
  misc_feature (22)..(385): NCBI GI: 238843502 Blast Desc: wd and tetratricopeptide repeat protein [Microsporum canis CBS 113480]
  misc_feature (26)..(386): NCBI GI: 70990402 Blast Desc: MYND domain protein [Aspergillus fumigatus Af293] gi|66847682|gb|EAL88012.1| MYND domain protein, [Aspergillus fumigatus Af293]
MHYIRTVAERRVRGEINSVNDLPDWGMVRREVYPWNDFEPNRFSEESLEFLNGELASMAPKCCVQVAQLPILLGGASETDGYDIIPTCNQLGVFAKEDIGPGEDVLVEYSLVTANNRLKDSVCDACGGELPPLGADSPAVNCPECFDTVFCDQYCFEKAQELYHPAVCDKDVDSIAKDPEAKEADETLHLLLLARVLAMAAHQDIHPLDVNQIKYIWGDFVDSQSNEIDLSPNAGPPPEWTLPFSFKYNIETPLHILEKMDIDIYATLGRHDIWVLNTLYSKFRGTASARKNPRDGRPDVAAVHPFWCLANHDCNPNVTWEWGGRMVLKARERRVVNNAPGGIREGEEILNHYCDVDLPVQQRREWAIGSLGGWCMCQRCRDESASNGQPNG

SEQ ID NO: 28689 - DNA, 3181 bp, Muscodor strobelii; identical to SEQ ID NO: 28686
  misc_feature: SGI EST ID NO. CUFF.67640.2
  misc_feature: Variant of the nucleotide sequence at SEQ ID NO 28687

SEQ ID NO: 28690 - DNA, 288 bp, Muscodor strobelii
  misc_feature: SGI cDNA ID NO. 569843
  misc_feature: Encodes the peptide sequence at SEQ ID NO 28691
atgtcttcagccgataacaaacagccgtctcttgttggaggtcacgctgagtatgtcaagggtgctgcttcggcggccgttggcgatattaccggatcacaagcttgtaagtactggaaagcctctggggagcaggctaaagcgcatgctatcgacacaatgaaagcggcgggcgaacagcgagatgcttctcagcaggggtttggcaaggttgaacagaaactcggcgaggctaccggttgtgagggaatggctagcgaaggcgctgccagtaagaagaatgagtag

SEQ ID NO: 28691 - protein, 95 aa, Muscodor strobelii
  misc_feature: SGI Peptide ID NO. 569843
  misc_feature (2)..(95): NCBI GI: 39959416 Blast Desc: MGG_09436 [Magnaporthe grisea 70-15] gi|145014408|gb|EDJ98976.1| MGG_09436 [Magnaporthe grisea 70-15]
  misc_feature (6)..(95): NCBI GI: 261359056 Blast Desc: conserved [Verticillium albo-atrum VaMs.102]
  misc_feature (1)..(93): NCBI GI: 169623744 Blast Desc: SNOG_15116 [Phaeosphaeria nodorum SN15] gi|111056539|gb|EAT77659.1| SNOG_15116 [Phaeosphaeria nodorum SN15]
  misc_feature (1)..(93): NCBI GI: 189210784 Blast Desc: conserved [Pyrenophora tritici-repentis Pt-1C-BFP] gi|187977816|gb|EDU44442.1| conserved [Pyrenophora tritici-repentis Pt-1C-BFP]
  misc_feature (8)..(95): NCBI GI: 85107750 Blast Desc: NCU07921 [Neurospora crassa OR74A] gi|28924043|gb|EAA33201.1| conserved [Neurospora crassa OR74A]
  misc_feature (7)..(91): NCBI GI: 171676892 Blast Desc: protein product [Podospora anserina] gi|170936513|emb|CAP61173.1| protein product [Podospora anserina]
  misc_feature (1)..(91): NCBI GI: 46116316 Blast Desc: FG04000.1 [Gibberella zeae PH-1]
  misc_feature (11)..(91): NCBI GI: 256723050 Blast Desc: NECHADRAFT_61577 [Nectria haematococca mpVI 77-13-4]
MSSADNKQPSLVGGHAEYVKGAASAAVGDITGSQACKYWKASGEQAKAHAIDTMKAAGEQRDASQQGFGKVEQKLGEATGCEGMASEGAASKKNE

SEQ ID NO: 28692 - DNA, 781 bp, Muscodor strobelii
  misc_feature: SGI EST ID NO. CUFF.67677.2
  misc_feature: Variant of the nucleotide sequence at SEQ ID NO 28690
cctagacgtcttcgcgaagaatcagattccaatattgatcattcagacaccaatagcccacctatccaatcgccatcatgtcttcagccgataacaaacagccgtctcttgttggaggtcacgctgagtatgtcaagggtgctgcttcggcggccgttggcgatattaccggatcacaagcttgtaagtactgtacctccctaacgtcggccgcttcgcgaaatctggaaccctattttgaaaatcgtcaaaatacctgacgcgtgacgtctgttgctatagggaaagcctctggggagcaggctaaagcgcatgctatcgacacaatgaaagcggcgggcgaacagcgagatgcttctcagcaggggtttggcaaggttgaacagaaactcggcgaggctaccggttgtgagggaatggctagcgaaggcgctgccagtaagaagaatgagtagtattttggaatttacggcgatacaagttatataccatacaagcgacatatttaccacgacattttggattgcctttggaacatgtacaaaaaatacaaatcgtgctagtgcgccttcaatcctatgcgctttggtggtcgtcaagcttcgcgtgcttcttacggttgcttggtatatatatgtattttccttgtatttatgtccatctgccttactccacgtgtatgtgaaatacatgggccttcgtcatattgatgatgataattctgtttgaggagagcaagtagaggcttgaatgcacgtcatccacggaactggcaacggaa

SEQ ID NO: 28693 - DNA, 462 bp, Muscodor strobelii
  misc_feature: SGI cDNA ID NO. 569844
  misc_feature: Elevated expression when VOC is produced
  misc_feature: Encodes the peptide sequence at SEQ ID NO 28694
atgtctgctaccaacgtcgggctctcgacagcacctctcctgcccgtcaccggtggctttgctttgccattcacagcctattttacatatctgagctttcgtgtagtggcatatcgcataacagaaaagcagtatcttggcgagcactcttcaaaagaaggcacggaggaggctcgtctccagaataagatgtatcttgcgtcgcgctgtcacctgaattttaccgagaatgttcccttcgcgttcgttctggcagcattggcagaactcaacggttgtgatcgcacggttttgacgcggctcatgagtgcgctcttcgtctttcgcgtcctacatgctgacgtgggcttaaacaagggtctagggcttggaagaccaatcggatactggggaagcatgataaccatttgtactttaggctaccatgcggccagcctcgttagaggatactggggatactga

SEQ ID NO: 28694 - protein, 153 aa, Muscodor strobelii
  misc_feature: SGI Peptide ID NO. 569844
  misc_feature (12)..(153): NCBI GI: 171682776 Blast Desc: protein product [Podospora anserina] gi|170941347|emb|CAP66997.1| protein product [Podospora anserina]
  misc_feature (3)..(151): NCBI GI: 169617550 Blast Desc: SNOG_11957 [Phaeosphaeria nodorum SN15] gi|160703432|gb|EAT80369.2| SNOG_11957 [Phaeosphaeria nodorum SN15]
  misc_feature (3)..(151): NCBI GI: 189194647 Blast Desc: PTRG_03329 [Pyrenophora tritici-repentis Pt-1C-BFP] gi|187979226|gb|EDU45852.1| PTRG_03329 [Pyrenophora tritici-repentis Pt-1C-BFP]
  misc_feature (24)..(146): NCBI GI: 71018723 Blast Desc: UM03445.1 [Ustilago maydis 521] gi|46099350|gb|EAK84583.1| UM03445.1 [Ustilago maydis 521]
  misc_feature (14)..(137): NCBI GI: 281208538 Blast Desc: PPL_04409 [Polysphondylium pallidum PN500]
  misc_feature (14)..(153): NCBI GI: 281208537 Blast Desc: PPL_04408 [Polysphondylium pallidum PN500]
  misc_feature (18)..(133): NCBI GI: 281208539 Blast Desc: PPL_04410 [Polysphondylium pallidum PN500]
  misc_feature (19)..(135): NCBI GI: 91794787 Blast Desc: Sden_3440 [Shewanella denitrificans OS217] gi|91716789|gb|ABE56715.1| Uncharacterized relative of glutathione S-transferase MAPEG superfamily-like protein OS217]
  misc_feature (19)..(135): NCBI GI: 157960107 Blast Desc: Spea_0278 [Shewanella pealeana ATCC 700345] gi|157845107|gb|ABV85606.1| conserved [Shewanella pealeana ATCC 700345]
  misc_feature (14)..(135): NCBI GI: 170724749 Blast Desc: Swoo_0381 [Shewanella woodyi ATCC 51908] gi|169810096|gb|ACA84680.1| conserved [Shewanella woodyi ATCC 51908]
  misc_feature: Useful for introducing or modulating the production of volatile compounds
MSATNVGLSTAPLLPVTGGFALPFTAYFTYLSFRVVAYRITEKQYLGEHSSKEGTEEARLQNKMYLASRCHLNFTENVPFAFVLAALAELNGCDRTVLTRLMSALFVFRVLHADVGLNKGLGLGRPIGYWGSMITICTLGYHAASLVRGYWGY

SEQ ID NO: 28695 - DNA, 1345 bp, Muscodor strobelii
  misc_feature: SGI EST ID NO. CUFF.67676.3
  misc_feature: Variant of the nucleotide sequence at SEQ ID NO 28693
agtccatgacgtcagaattggtcacgttcctttctatacatcacgatcaactttagcatgcgtaacacttttttccccgtcgaatttacaatctggtcacaatcgatactaggacgcgcgcttgatatgataacgcatatgaacatacaatttggcaatggtcacctcgaatcatatgctctaggtatggaaaccccgggcaattgaaagtggaagccaacgcatcactttcggctacaaccaccgaatccaacgtgtgtacttttgagcacatttgtggaatcaatcgatacccgttatgttagggataaaaatacctacatagctttggctgtccccaagtgccgagcattcccattgtcgagtttgtacagtgctacattttgagctgttgttatcaagagcccttgcatggatcacctccgttagtactcggatttaactgtccggcataacaaattaccgtcacctatcccccttgcccgtcggctttgtcatacggacagaccagggatcgttagggtttaaatagaaaaatgaaggtttgcaactcataagcaaacaaattccccagtgaagtctatcgtttcataattgctgacctctttttgttctcttgatccgctgaatccgaattgaaacgactacttcaagatgtctgctaccaacgtcgggctctcgacagcacctctcctgcccgtcaccggtggctttgctttgccattcacagcctattttacatatctgagctttcgtgtagtggcatatcgcataacagaaaagcagtatcttggcgagcactcttcaaaagaaggcacggaggaggctcgtctccagaataagatgtatcttgcgtcgcgctgtcacctgaattttaccgagaatgttcccttcgcgttcgttctggcagcattggcagaactcaacggttgtgatcgcacggttttgacgcggctcatgagtgcgctcttcgtctttcgcgtcctacatgctgacgtgggcttaaacaagggtctagggcttggaagaccaatcggatactggggaagcatgataaccatttgtactttaggctaccatgcggccagcctcgttagaggatactggggatactgattcttccggcattgatgtcgaatgatcagatgtcgaagaacggttgagatccgatgttagtacggagcgatagatatgagtctgactctcttccagtcttggagcgaattggagcattgtaattggcttcttctgccatttcgtcgtttcttgtatcaatggcatatattcggtttagattctaaagttttcatagcaacaaaccctttcagacaatgctacaagcggc

SEQ ID NO: 28696 - DNA, 243 bp, Muscodor strobelii
  misc_feature: SGI cDNA ID NO. 569845
  misc_feature: Encodes the peptide sequence at SEQ ID NO 28697
atgaagttcttgcaaattctcgttctcgctacttcggtgaccgctctggtccttccccgtcatcatgcaggaaagggtagcaataatggcaacgtaaatgccgggaacaacaatggcgcccaaggcaataacaacaatgctgccgctgccgcagcagctgcttgtggtggcaatgccgtacgctcctcttccagatttcacttctcgaagcacgaagttcaagtttctgactcgagtgtatag

SEQ ID NO: 28697 - protein, 80 aa, Muscodor strobelii
  misc_feature: SGI Peptide ID NO. 569845
MKFLQILVLATSVTALVLPRHHAGKGSNNGNVNAGNNNGAQGNNNNAAAAAAAACGGNAVRSSSRFHFSKHEVQVSDSSV

SEQ ID NO: 28698 - DNA, 596 bp, Muscodor strobelii
  misc_feature: SGI EST ID NO. CUFF.67605.0
  misc_feature: Variant of the nucleotide sequence at SEQ ID NO 28696
ttttgcagtctgttccagatcaaattgggcggttgcaatactgtattcagtctgcgagccattttctagcaaccaaaggaggacgcaatgttctataagaactgcaagttgtcttgccgtcctaatagattttcttttagtccagcagcaacagcaacattcaacaattctctgggttttcttatcccttttcttttctggttcttttcagtacgtggctggatttccacattattttcattgcacaaatttatagttttacatcaaacattcattttccccatatataaattctcagtcactccaactcttccttcaaaccgtaaccatgaagttcttgcaaattctcgttctcgctacttcggtgaccgctctggtccttccccgtcatcatgcaggaaagggtagcaataatggcaacgtaaatgccgggaacaacaatggcgcccaaggcaataacaacaatgctgccgctgccgcagcagctgcttgtggtggcaatgccaaacggcaccatgccggcaaaactggtggcggtaatgccaatgggcagaatgcagcagcttgcgccggggcccagaacaataagcgcgagg

SEQ ID NO: 28699 - DNA, 1791 bp, Muscodor strobelii
  misc_feature: SGI cDNA ID NO. 569846
  misc_feature: Encodes the peptide sequence at SEQ ID NO 28700
agcccccgtcccccgtcctccacgcccaccccgggccccagctgcaacggtctcgtgcccgcactgcaatccatgatcaactcgctcccctcgcctccctccaccagcaccaactcctccagctcccatgtgacccgcatgtatccccgtactgtacccgtatcacaggctgacccggcccaggcctcggccggcttcaaggctccccaggttttgagcgaagaagagcgcaatgccatcttggagaacatccgcgcccacgacactgagcacacggtcccggaaggattccgttctctcaaccgtggcacgatgaacagatacttggctacctacttcggactgttccaccaccatctgccgttcctgcatccgtcgtccttcaaggtgaccgaggtccaccccgctctgttgctggctgtgctttccatcggtgctctctacgcctttgatcaggatgaggcctacatactgcacatcggtgccaagatcttggtcaatcagttcctccagaacaaagagaacttcagctcccgaaaatgtcctctctggaccatgcagggttcattgctgaatatgatcttcgccagctggagtggtgaccccaagggtctcgagtgggcctgctccatcaagagtctgctagccaacatggttgccggtaaccgatatgagctgaagcttcgtcaagatgctcgcgagggcaatttcccaagccgtgctgaatggattgaagacgaggggtgtcgccgtacttactatgctgtctacatcttcttcggccttctgacgctgacatacaaccatacgcctgccatcagcttcaacgagttcgaggacctgcagctcccttccaccgagggactatggaactccaaagccgccgacgaggcagcttggcaagagcagctaaggtcgtctcccgccatcaccttcatggtcgctcacgacaatctcttccaaggggaaacgcttaaatacagcgccttcgcaacgcgtgttatgatcaatgctttgttcctcgaggtgtggtatcataagcgcagccccgaagcactgcaggatgtggtcaccgaatacaaactcagactcgcgctagagacctgggagaaatctcttgatctttgcgaacctgaagtggatgcggttccgctcagcgctccccacaagggccacccattgatcttcaacgcccaggccatgtaccgcaacgcacgtgctcgccttgaggtcgatctcaagacagtccaagaagctctccgataccatgatcattatgaagttgcagctgcgatgtcaaatgctagagaccgtgtcaagcgatctagcgagatgatcaaggtcatccaggagtgctacaactgcattgagactgctgtccgacaaggtgtgcgctgggttgctcgtacctcgccgaccaactggagcattgaacaccctctctgcggcatggatcttatgatcacgcttaccttgtggctgtatcgtctggaacatgacgatgaaccggccactgaggaagaaatggcgatgtatcacaaagtccgcatgctgtttgagaaggagtccgaaggtgcgctgaactcgcagcagctcagtgccaccgtcgcccacctgtggggttcaatgctggatgaggtcgttgtttggggaatcactagactaatgggcgagtccttccgccttcactctcaagcccttgttggctacgtcgatgatgttgaggcatcgtcgaacgtctcgacgccgtccatgatctctcaaggggcggacgaggagagcgtgtattaa

SEQ ID NO: 28700 - protein, 596 aa, Muscodor strobelii
  misc_feature: SGI Peptide ID NO. 569846
  misc_feature (9)..(596): NCBI GI: 261358448 Blast Desc: conserved [Verticillium albo-atrum VaMs.102]
  misc_feature (12)..(596): NCBI GI: 171686412 Blast Desc: protein product [Podospora anserina] gi|170943167|emb|CAP68820.1| protein product [Podospora anserina]
  misc_feature (9)..(596): NCBI GI: 46122043 Blast Desc: FG05399.1 [Gibberella zeae PH-1]
  misc_feature (9)..(596): NCBI GI: 256729951 Blast Desc: [Nectria haematococca mpVI 77-13-4]
  misc_feature (60)..(596): NCBI GI: 39974961 Blast Desc: MGG_00373 [Magnaporthe grisea 70-15] gi|145018736|gb|EDK03015.1| MGG_00373 [Magnaporthe grisea 70-15]
  misc_feature (4)..(596): NCBI GI: 156058208 Blast Desc: SS1G_03115 [Sclerotinia sclerotiorum 1980] gi|154700903|gb|EDO00642.1| SS1G_03115 [Sclerotinia sclerotiorum 1980]
  misc_feature (4)..(596): NCBI GI: 154309418 Blast Desc: BC1G_07603 [Botryotinia fuckeliana B05.10] gi|150852427|gb|EDN27619.1| BC1G_07603 [Botryotinia fuckeliana B05.10]
  misc_feature (5)..(596): NCBI GI: 85083550 Blast Desc: NCU06503 [Neurospora crassa OR74A] gi|28918229|gb|EAA27907.1| conserved [Neurospora crassa OR74A]
  misc_feature (16)..(596): NCBI GI: 116208074 Blast Desc: CHGG_03330 [Chaetomium globosum CBS 148.51] gi|88183927|gb|EAQ91395.1| CHGG_03330 [Chaetomium globosum CBS 148.51]
  misc_feature (16)..(589): NCBI GI: 189199018 Blast Desc: conserved [Pyrenophora tritici-repentis Pt-1C-BFP] gi|187982945|gb|EDU48433.1| conserved [Pyrenophora tritici-repentis Pt-1C-BFP]
SPRPPSSTPTPGPSCNGLVPALQSMINSLPSPPSTSTNSSSSHVTRMYPRTVPVSQADPAQASAGFKAPQVLSEEERNAILENIRAHDTEHTVPEGFRSLNRGTMNRYLATYFGLFHHHLPFLHPSSFKVTEVHPALLLAVLSIGALYAFDQDEAYILHIGAKILVNQFLQNKENFSSRKCPLWTMQGSLLNMIFASWSGDPKGLEWACSIKSLLANMVAGNRYELKLRQDAREGNFPSRAEWIEDEGCRRTYYAVYIFFGLLTLTYNHTPAISFNEFEDLQLPSTEGLWNSKAADEAAWQEQLRSSPAITFMVAHDNLFQGETLKYSAFATRVMINALFLEVWYHKRSPEALQDVVTEYKLRLALETWEKSLDLCEPEVDAVPLSAPHKGHPLIFNAQAMYRNARARLEVDLKTVQEALRYHDHYEVAAAMSNARDRVKRSSEMIKVIQECYNCIETAVRQGVRWVARTSPTNWSIEHPLCGMDLMITLTLWLYRLEHDDEPATEEEMAMYHKVRMLFEKESEGALNSQQLSATVAHLWGSMLDEVVVWGITRLMGESFRLHSQALVGYVDDVEASSNVSTPSMISQGADEESVY

SEQ ID NO: 28701 - DNA, 2551 bp, Muscodor strobelii
  misc_feature: SGI EST ID NO. CUFF.68183.1
  misc_feature: Variant of the nucleotide sequence at SEQ ID NO 28699
cgagcccccgtcccccgtcctccacgcccaccccgggccccagctgcaacggtctcgtgcccgcactgcaatccatgatcaactcgctcccctcgcctccctccaccagcaccaactcctccagctcccatgtgacccgcatgtatccccgtactgtacccgtatcacaggctgacccggcccaggcctcggccggcttcaaggctccccaggttttgagcgaagaagagcgcaatgccatcttggagaacatccgcgcccacgacactgagcacacggtcccggaaggattccgttctctcaaccgtggcacgatgaacagatacttggctacctacttcggactgttccaccaccatctgccgttcctgcatccgtcgtccttcaaggtgaccgaggtccaccccgctctgttgctggctgtgctttccatcggtgctctctacgcctttgatcaggatgaggcctacatactgcacatcggtgccaagatcttggtcaatcagttcctccagaacaaagagaacttcagctcccgaaaatgtcctctctggaccatgcagggttcattgctgaatatgatcttcgccagctggagtggtgaccccaagggtctcgagtgggcctgctccatcaagagtctgctagccaacatggttgccggtaaccgatatgagctgaagcttcgtcaagatgctcgcgagggcaatttcccaagccgtgctgaatggattgaagacgaggggtgtcgccgtacttactatgctgtctacatcttcttcggccttctgacgctgacatacaaccatacgcctgccatcagcttcaacgagttcgaggacctgcagctcccttccaccgagggactatggaactccaaagccgccgacgaggcagcttggcaagagcagctaaggtcgtctcccgccatcaccttcatggtcgctcacgacaatctcttccaaggggaaacgcttaaatacagcgccttcgcaacgcgtgttatgatcaatgctttgttcctcgaggtgtggtatcataagcgcagccccgaagcactgcaggatgtggtcaccgaatacaaactcagactcgcgctagagacctgggagaaatctcttgatctttgcgaacctgaagtggatgcggttccgctcagcgctccccacaagggccacccattgatcttcaacgcccaggccatgtaccgcaacgcacgtgctcgccttgaggtcgatctcaagacagtccaagaagctctccgataccatgatcattatgaagttgcagctgcgatgtcaaatgctagagaccgtgtcaagcgatctagcgagatgatcaaggtcatccaggagtgctacaactgcattgagactgctgtccgacaaggtgtgcgctgggttgctcgtacctcgccgaccaactggagcattgaacaccctctctgcggcatggatcttatgatcacgcttaccttgtggctgtatcgtctggaacatgacgatgaaccggccactgaggaagaaatggcgatgtatcacaaagtccgcatgctgtttgagaaggagtccgaaggtgcgctgaactcgcagcagctcagtgccaccgtcgcccacctgtggggttcaatgctggatgaggtcgttgtttggggaatcactagactaatgggcgagtccttccgccttcactctcaagcccttgttggctacgtcgatgatgttgaggcatcgtcgaacgtctcgacgccgtccatgatctctcaaggggcggacgaggagagcgtgtattaatacttcataacgagacccacgatttcatttgttttcactgctttgtgccgagggacgggaaggggcatcatttcctaggcattataccagatcgtttcgtacttgtttcgtccaacacaatctggacatggcgcgggggtggttgacttgggagttccgtcgtctatgcgtttgtctttgcatccaacgtctgcatctacggtcactggtaattaggggggaaactgggacggcaactgggctctctctcggtgacctggtggagggatatcggcgcggctcgcgcaaatctaatgtctgatgcaggactgctggcccggcgccggaacttctcttcccctctgtctattagctacggcactcttaatctgtttaatgatgctagccgttcgctggcttgttttttcctgcggttgtcgtctctgataccttgttctacatacttgcgacgtttcctctctgttgttggttactttccttgcgcttagtgattcgggctggctgttcttcagcaatggcggcagattgtcgaagtgtcgagatggacttgagaaggaggagaaaatcgtaacgaagagagcaacgcaaatgtcaaattgattttcatctccttgtgctggaacttcatttcctacgtctgtatagatacttctgctttgcttctcatacaaatagcatcacatctcctggcgactgatatgtcttctcaagcaagtgaaatattgttagtgatatgaaatgtgtgagtgtgttgctgc

SEQ ID NO: 28702 - DNA, 924 bp, Muscodor strobelii
  misc_feature: SGI cDNA ID NO. 569847
  misc_feature: Encodes the peptide sequence at SEQ ID NO 28703
aatcaacagcagcttttcgtcaatatcagctacgtagacttcgtttccatccctattgccctacagctcaagaacaccgctggcgctgttcagaccgtgcaaggtctcccaacaaatggactagaccaaatctgttcgcaactcacagctcaaggcgcctctgagaatgtcggttggggaagtctcgtaataaaagctaaaaacggttccaacctccgagccctatctcccaactcaggaattgtaatgaacaacagtctcttcaacaactactacagttcctacgtctcccaagtatggtccaaatacgcctccaacaacctaaccatcgacacacaagcgcaatggggttccgtgacgggcaaagtcagtaacaacgctctgacgttctccaacgttggtacatttgcccagccctccgccgccgatatattttcatgcagcactggaccgttcggcaattatcccaccgctacttcggcagagatgggcgctatcggcgctcgtctcgcagcagcattcaacaggagtacgctgttgaataatgcgaatcaaccgaatggggaactcacctcgaacttctataccacaagtcctacgaaccattatgcgcggatcgtacactctgtgaacttagaccatcgcggttatgcattcccgtacgatgacgtgtcgtcaagtggaaacacggcgccggatcaggctggtacggtgttcgatggttcgccgcagttgctgactatcactgtcggtggcccgacaagtgctgggtctaataagggtgacaaggcggttgagggtgatgatggacagaaggatgacgggaagaaaggcgaggggaagaagactactgctggtggaattaagggcgttctggcgaagatgaagggactgttcactgggtgttttggaagtcggaagtga

SEQ ID NO: 28703 - protein, 307 aa, Muscodor strobelii
  misc_feature: SGI Peptide ID NO. 569847
  misc_feature (1)..(250): NCBI GI: 256394360 Blast Desc: Carbohydrate binding family 6 [Catenulispora acidiphila DSM 44928] gi|256360586|gb|ACU74083.1| Carbohydrate binding family 6 [Catenulispora acidiphila DSM 44928]
  misc_feature (1)..(252): NCBI GI: 261358449 Blast Desc: glucanase B [Verticillium albo-atrum VaMs.102]
  misc_feature (1)..(252): NCBI GI: 255942767 Blast Desc: Pc18g03120 [Penicillium chrysogenum Wisconsin 54-1255] gi|211586885|emb|CAP94536.1| Pc18g03120 [Penicillium chrysogenum Wisconsin 54-1255]
  misc_feature (1)..(252): NCBI GI: 154319668 Blast Desc: BC1G_02315 [Botryotinia fuckeliana B05.10] gi|150855973|gb|EDN31165.1| BC1G_02315 [Botryotinia fuckeliana B05.10]
  misc_feature (1)..(277): NCBI GI: 242776524 Blast Desc: glucan endo-1,3-beta-glucosidase precursor, [Talaromyces stipitatus ATCC 10500] gi|218722472|gb|EED21890.1| glucan endo-1,3-beta-glucosidase precursor, [Talaromyces ATCC
  misc_feature (1)..(252): NCBI GI: 145611456 Blast Desc: MGG_00375 [Magnaporthe grisea 70-15] gi|145018734|gb|EDK03013.1| MGG_00375 [Magnaporthe grisea 70-15]
  misc_feature (1)..(287): NCBI GI: 212532795 Blast Desc: conserved [Penicillium marneffei ATCC 18224] gi|210071918|gb|EEA26007.1| conserved [Penicillium marneffei ATCC 18224]
  misc_feature (1)..(253): NCBI GI: 256729949 Blast Desc: NECHADRAFT_95637 [Nectria haematococca mpVI 77-13-4]
  misc_feature (1)..(251): NCBI GI: 154295338 Blast Desc: BC1G_13250 [Botryotinia fuckeliana B05.10] gi|150844117|gb|EDN19310.1| BC1G_13250 [Botryotinia fuckeliana B05.10]
  misc_feature (1)..(251): NCBI GI: 156040587 Blast Desc: SS1G_12310 [Sclerotinia sclerotiorum 1980] gi|154696366|gb|EDN96104.1| SS1G_12310 [Sclerotinia sclerotiorum 1980]
  misc_feature (1)..(250): SWISSPROT Homolog: EC 3.2.1.39 Glucan endo-1,3-beta-D-glucosidase
NQQQLFVNISYVDFVSIPIALQLKNTAGAVQTVQGLPTNGLDQICSQLTAQGASENVGWGSLVIKAKNGSNLRALSPNSGIVMNNSLFNNYYSSYVSQVWSKYASNNLTIDTQAQWGSVTGKVSNNALTFSNVGTFAQPSAADIFSCSTGPFGNYPTATSAEMGAIGARLAAAFNRSTLLNNANQPNGELTSNFYTTSPTNHYARIVHSVNLDHRGYAFPYDDVSSSGNTAPDQAGTVFDGSPQLLTITVGGPTSAGSNKGDKAVEGDDGQKDDGKKGEGKKTTAGGIKGVLAKMKGLFTGCFGSRK

SEQ ID NO: 28704 - DNA, 1290 bp, Muscodor strobelii
  misc_feature: SGI cDNA ID NO. 569848
  misc_feature: Encodes the peptide sequence at SEQ ID NO 28705
atgacgaaccctacgactaacttcgctttcaagaacaacacgggctcgtcgacggcatatgcctatgtgacgggacaggatatcaacaagaacaatgcatatgccttcatacagtcagatggaaagaccgtgtactatccggcatcgccctcgtcaacggggcagcctctagctgtcgactgtgcgatcccacttggcgctccaggtgctaccacgaccatcacgattccccaactcgccggcggccgtgtatggttcgtgatcggaagcaaactcacgtttctgctgaacccaggcccgggaattgttgagcccgcagtcacaaatcaggctgatgctaattacaatctgaactggggtttctataatcaacagcagcttttcgtcaatatcagctacgtagacttcgtttccatccctattgccctacagctcaagaacaccgctggcgctgttcagaccgtgcaaggtctcccaacaaatggactagaccaaatctgttcgcaactcacagctcaaggcgcctctgagaatgtcggttggggaagtctcgtaataaaagctaaaaacggttccaacctccgagccctatctcccaactcaggaattgtaatgaacaacagtctcttcaacaactactacagttcctacgtctcccaagtatggtccaaatacgcctccaacaacctaaccatcgacacacaagcgcaatggggttccgtgacgggcaaagtcagtaacaacgctctgacgttctccaacgttggtacatttgcccagccctccgccgccgatatattttcatgcagcactggaccgttcggcaattatcccaccgctacttcggcagagatgggcgctatcggcgctcgtctcgcagcagcattcaacaggagtacgctgttgaataatgcgaatcaaccgaatggggaactcacctcgaacttctataccacaagtcctacgaaccattatgcgcggatcgtacactctgtgaacttagaccatcgcggttatgcattcccgtacgatgacgtgtcgtcaagtggaaacacggcgccggatcaggctggtacggtgttcgatggttcgccgcagttgctgactatcactgtcggtggcccgacaagtgctgggtctaataagggtgacaaggcggttgagggtgatgatggacagaaggatgacgggaagaaaggcgaggggaagaagactactgctggtggaattaagggcgttctggcgaagatgaagggactgttcactgggtgttttggaagtcggaagtga

SEQ ID NO: 28705 - protein, 429 aa, Muscodor strobelii
  misc_feature: SGI Peptide ID NO. 569848
  misc_feature (2)..(372): NCBI GI: 256394360 Blast Desc: Carbohydrate binding family 6 [Catenulispora acidiphila DSM 44928] gi|256360586|gb|ACU74083.1| Carbohydrate binding family 6 [Catenulispora acidiphila DSM 44928]
  misc_feature (1)..(374): NCBI GI: 261358449 Blast Desc: glucanase B [Verticillium albo-atrum VaMs.102]
  misc_feature (5)..(374): NCBI GI: 255942767 Blast Desc: Pc18g03120 [Penicillium chrysogenum Wisconsin 54-1255] gi|211586885|emb|CAP94536.1| Pc18g03120 [Penicillium chrysogenum Wisconsin 54-1255]
  misc_feature (5)..(399): NCBI GI: 242776524 Blast Desc: glucan endo-1,3-beta-glucosidase precursor, [Talaromyces stipitatus ATCC 10500] gi|218722472|gb|EED21890.1| glucan endo-1,3-beta-glucosidase precursor, [Talaromyces ATCC
  misc_feature (5)..(374): NCBI GI: 154319668 Blast Desc: BC1G_02315 [Botryotinia fuckeliana B05.10] gi|150855973|gb|EDN31165.1| BC1G_02315 [Botryotinia fuckeliana B05.10]
  misc_feature (5)..(429): NCBI GI: 212532795 Blast Desc: conserved [Penicillium marneffei ATCC 18224] gi|210071918|gb|EEA26007.1| conserved [Penicillium marneffei ATCC 18224]
  misc_feature (8)..(374): NCBI GI: 145611456 Blast Desc: MGG_00375 [Magnaporthe grisea 70-15] gi|145018734|gb|EDK03013.1| MGG_00375 [Magnaporthe grisea 70-15]
  misc_feature (5)..(374): NCBI GI: 189192364 Blast Desc: glucanase B [Pyrenophora tritici-repentis Pt-1C-BFP] gi|187974127|gb|EDU41626.1| glucanase B [Pyrenophora tritici-repentis Pt-1C-BFP]
  misc_feature (5)..(374): NCBI GI: 169600283 Blast Desc: SNOG_02972 [Phaeosphaeria nodorum SN15] gi|111068583|gb|EAT89703.1| SNOG_02972 [Phaeosphaeria nodorum SN15]
  misc_feature (5)..(373): NCBI GI: 154295338 Blast Desc: BC1G_13250 [Botryotinia fuckeliana B05.10] gi|150844117|gb|EDN19310.1| BC1G_13250 [Botryotinia fuckeliana B05.10]
  misc_feature (5)..(372): SWISSPROT Homolog: EC 3.2.1.39 Glucan endo-1,3-beta-D-glucosidase
MTNPTTNFAFKNNTGSSTAYAYVTGQDINKNNAYAFIQSDGKTVYYPASPSSTGQPLAVDCAIPLGAPGATTTITIPQLAGGRVWFVIGSKLTFLLNPGPGIVEPAVTNQADANYNLNWGFYNQQQLFVNISYVDFVSIPIALQLKNTAGAVQTVQGLPTNGLDQICSQLTAQGASENVGWGSLVIKAKNGSNLRALSPNSGIVMNNSLFNNYYSSYVSQVWSKYASNNLTIDTQAQWGSVTGKVSNNALTFSNVGTFAQPSAADIFSCSTGPFGNYPTATSAEMGAIGARLAAAFNRSTLLNNANQPNGELTSNFYTTSPTNHYARIVHSVNLDHRGYAFPYDDVSSSGNTAPDQAGTVFDGSPQLLTITVGGPTSAGSNKGDKAVEGDDGQKDDGKKGEGKKTTAGGIKGVLAKMKGLFTGCFGSRK

SEQ ID NO: 28706 - DNA, 1149 bp, Muscodor strobelii
  misc_feature: SGI cDNA ID NO. 569849
  misc_feature: Encodes the peptide sequence at SEQ ID NO 28707
atgagattcgcccgaccaacccaaccctgggttggcgtatttggcattttcttgcttttcagtcggctcgtgttaggagactgcgaatgtgggtattcagtcgggaaggacgacatcggggtgcctatcatcttcacagatctaatggagacggactttgtccatgtcgatatcgcgaccgatagtagaggaaaggcgtggacgacccaggcatataatcggtccagtggagatgcgcgtggtccgtacggtgaatcgtacgcaatcgacaacgtgttatcgaatatcatcacggacccgaaagtcttcagtggttccggaagtctaggctcaaatgccggactgcgccttgtcgttcgcggcaaaacacacgataatatggtttccgtagcggaaacggctacgacggacctggattatttctatgggacttttagaattggtatggagactacggatgtcccgggcacatgtagtgcctttttctggtaccataacgatacccaagaaatcgatatcgaatttctctcctcgcaatataacaaagccaagaaaatcttccccgtgaatctcgttctacaatcaagagactcggaatcagccggctacaatgccgcaaacacaacgggctttcgtaccgtgaacctcccctttgacccaacgacggatttccatgaatatcgtttcgatttcttagcggatagggtgctattctacgctgatggcaagttcctcgcggaacttactggagatggtgttccggtctcgtcaggtcatctacttatatcacattggagcaacgggaacgagggctggtctcagggcccgccggcacaagacgctatcacgacggtgagctatgttaaggcgtacttcaactcgtctcttgaacagaggcagagcgaattcagggaccgttgtaaagatcccaaggcaaatggtgcggtttgcgatatcccgaactatgatccaatgtttttcttcagcgatgatactggtcctgggcctaacgggtcatcccctggaggcggcggtgatgatggcgggccgacagatggggagagcggctctatgaagcatgctgttatgggatgggcagcattgctgtggactgtgattgttatattatatgttccaattagatactaa

SEQ ID NO: 28707 - protein, 382 aa, Muscodor strobelii
  misc_feature: SGI Peptide ID NO. 569849
  misc_feature (97)..(274): Pfam Id: PF00722 Pfam Desc: Glycosyl hydrolases family 16
  misc_feature (16)..(320): NCBI GI: 145611458 Blast Desc: MGG_00374 [Magnaporthe grisea 70-15] gi|145018735|gb|EDK03014.1| MGG_00374 [Magnaporthe grisea 70-15]
  misc_feature (24)..(330): NCBI GI: 116208076 Blast Desc: CHGG_03331 [Chaetomium globosum CBS 148.51] gi|88183928|gb|EAQ91396.1| CHGG_03331 [Chaetomium globosum CBS 148.51]
  misc_feature (16)..(332): NCBI GI: 256729950 Blast Desc: NECHADRAFT_122771 [Nectria haematococca mpVI 77-13-4]
  misc_feature (22)..(321): NCBI GI: 46122045 Blast Desc: FG05400.1 [Gibberella zeae PH-1]
  misc_feature (75)..(340): NCBI GI: 154309414 Blast Desc: BC1G_07601 [Botryotinia fuckeliana B05.10] gi|150852425|gb|EDN27617.1| BC1G_07601 [Botryotinia fuckeliana B05.10]
  misc_feature (28)..(331): NCBI GI: 189199024 Blast Desc: conserved [Pyrenophora tritici-repentis Pt-1C-BFP] gi|187982948|gb|EDU48436.1| conserved [Pyrenophora tritici-repentis Pt-1C-BFP]
  misc_feature (57)..(320): NCBI GI: 85083554 Blast Desc: NCU06504 [Neurospora crassa OR74A] gi|28918230|gb|EAA27908.1| [Neurospora crassa OR74A]
  misc_feature (9)..(323): NCBI GI: 169614345 Blast Desc: SNOG_10314 [Phaeosphaeria nodorum SN15] gi|160707326|gb|EAT82649.2| SNOG_10314 [Phaeosphaeria nodorum SN15]
  misc_feature (16)..(336): NCBI GI: 169612633 Blast Desc: SNOG_09441 [Phaeosphaeria nodorum SN15] gi|160702552|gb|EAT83633.2| SNOG_09441 [Phaeosphaeria nodorum SN15]
  misc_feature (75)..(208): NCBI GI: 156058210 Blast Desc: SS1G_03116 [Sclerotinia sclerotiorum 1980] gi|154700904|gb|EDO00643.1| SS1G_03116 [Sclerotinia sclerotiorum 1980]
MRFARPTQPWVGVFGIFLLFSRLVLGDCECGYSVGKDDIGVPIIFTDLMETDFVHVDIATDSRGKAWTTQAYNRSSGDARGPYGESYAIDNVLSNIITDPKVFSGSGSLGSNAGLRLVVRGKTHDNMVSVAETATTDLDYFYGTFRIGMETTDVPGTCSAFFWYHNDTQEIDIEFLSSQYNKAKKIFPVNLVLQSRDSESAGYNAANTTGFRTVNLPFDPTTDFHEYRFDFLADRVLFYADGKFLAELTGDGVPVSSGHLLISHWSNGNEGWSQGPPAQDAITTVSYVKAYFNSSLEQRQSEFRDRCKDPKANGAVCDIPNYDPMFFFSDDTGPGPNGSSPGGGGDDGGPTDGESGSMKHAVMGWAALLWTVIVILYVPIRY

SEQ ID NO: 28708 - DNA, 1050 bp, Muscodor strobelii
  misc_feature: SGI cDNA ID NO. 569850
  misc_feature: Encodes the peptide sequence at SEQ ID NO 28709
atgtcactcactttgggcactttgcgcaacgacaaagccattcctggtgatggcgaagacactatctcaaagctcacctggtctcccgtcgccaatcacctcgctgccgcatcatgggacagtaaagtccgcatttacgacgtcaacacctccggatccgccaaaggactcaccgccctcaccgccgacggcccgctcttcgactgcacatgggccaaggatggaaccaccgtcatggctgcaggagccagcaagaagattcacttcctgcacttggccagcggccagcagggcaccatcggctctcatgctgctcccatccgtggtgttcgtctcattgacatcccgtcctcaaatgcgcctatcgtcgtctctggttcatgggacaagagcgtcaagtactgggacccgcgtcaacccgacacctctcctatctgcacactcgagtgcaaggatcgtgtctatgccttggatgccaagtctggattgctggtcatcgctaccgctgagcgctggattcaccatgtcgacttacgtgatccgaccaaattcctgaagacgattgaatcaccactgctccatcagacaaagcaggtcactgtctttcctgatggcaaaggatgggccaccaccagcatcgagggccgatgtggagttaatgccgtggcagaaaaagatcagaagaccgtgaattttactttcaggtgtcaccgtgatccggttgatgtcaaaaagcaggtcaaggtctgggctgtcaacgactttcagtttcacccgactcgtacgtcgtgcttcgtcaccgccggttcggatggcatcttttccttctgggattgtgtcagacgctctcggcttcagcactacccacgggtcaccagcgtcagcaatgatcctctcgctattacttcagtctcgttcaattccgatggcagtttccttgcctatgctgtcgggtatgactgggctcgtggttgtgcagggaaccacccgaaactggagaccaagatcatgctgcaccctgtcagcacgctcgactcagttcatcgttga

SEQ ID NO: 28709 - protein, 349 aa, Muscodor strobelii
  misc_feature: SGI Peptide ID NO. 569850
  misc_feature (9)..(47): Pfam Id: PF00400 Pfam Desc: WD domain, G-beta repeat
  misc_feature (94)..(136): Pfam Id: PF00400 Pfam Desc: WD domain, G-beta repeat
  misc_feature (14)..(343): NCBI GI: 116207966 Blast Desc: CHGG_03276 [Chaetomium globosum CBS 148.51] gi|88183873|gb|EAQ91341.1| CHGG_03276 [Chaetomium globosum CBS 148.51]
  misc_feature (2)..(342): NCBI GI: 67521844 Blast Desc: AN1379.2 [Aspergillus nidulans FGSC A4] gi|3202044|gb|AAC27297.1| SONA [Emericella nidulans] gi|40746053|gb|EAA65209.1| AN1379.2 [Aspergillus nidulans FGSC ;
  misc_feature (4)..(342): NCBI GI: 121702179 Blast Desc: nuclear pore complex protein (SonA), [Aspergillus clavatus NRRL 1] gi|119397497|gb|EAW07928.1| nuclear pore complex protein (SonA), [Aspergillus clavatus NRRL 1]
  misc_feature (4)..(341): NCBI GI: 261353164 Blast Desc: Poly(A)+ RNA export protein [Verticillium albo-atrum VaMs.102]
  misc_feature (4)..(342): NCBI GI: 70994986 Blast Desc: nuclear pore complex protein (SonA) [Aspergillus fumigatus Af293] gi|66849904|gb|EAL90231.1| nuclear pore complex protein (SonA), [Aspergillus fumigatus Af293] nuclear pore A1163]
  misc_feature (6)..(342): NCBI GI: 115402063 Blast Desc: Poly(A)+ RNA export protein [Aspergillus terreus NIH2624] gi|114188954|gb|EAU30654.1| Poly(A)+ RNA export protein [Aspergillus terreus NIH2624]
  misc_feature (6)..(342): NCBI GI: 242785867 Blast Desc: nuclear pore complex protein (SonA), [Talaromyces stipitatus ATCC 10500] gi|218720833|gb|EED20252.1| nuclear pore complex protein (SonA), [Talaromyces stipitatus ATCC 10500]
  misc_feature (4)..(342): NCBI GI: 169768116 Blast Desc: [Aspergillus oryzae RIB40] gi|238485067|ref|XP_002373772.1| nuclear pore complex protein (SonA), [Aspergillus flavus NRRL3357] gi|83766384|dbj|BAE56527.1|
  misc_feature (5)..(343): NCBI GI: 46137529 Blast Desc: FG10280.1 [Gibberella zeae PH-1]
  misc_feature (6)..(342): NCBI GI: 212543149 Blast Desc: nuclear pore complex protein (SonA), [Penicillium marneffei ATCC 18224] gi|210066636|gb|EEA20729.1| nuclear pore complex protein (SonA), [Penicillium marneffei ATCC 18224]
MSLTLGTLRNDKAIPGDGEDTISKLTWSPVANHLAAASWDSKVRIYDVNTSGSAKGLTALTADGPLFDCTWAKDGTTVMAAGASKKIHFLHLASGQQGTIGSHAAPIRGVRLIDIPSSNAPIVVSGSWDKSVKYWDPRQPDTSPICTLECKDRVYALDAKSGLLVIATAERWIHHVDLRDPTKFLKTIESPLLHQTKQVTVFPDGKGWATTSIEGRCGVNAVAEKDQKTVNFTFRCHRDPVDVKKQVKVWAVNDFQFHPTRTSCFVTAGSDGIFSFWDCVRRSRLQHYPRVTSVSNDPLAITSVSFNSDGSFLAYAVGYDWARGCAGNHPKLETKIMLHPVSTLDSVHR

SEQ ID NO: 28710 - DNA, 1653 bp, Muscodor strobelii
  misc_feature: SGI EST ID NO. CUFF.67793.0
  misc_feature: Variant of the nucleotide sequence at SEQ ID NO 28708
ttcttcctctatttccttcaaatcgttgcaataagtttcaacgatcccactctctcttcacaacgatttcatcccggtacataatcaacacttgccaacaaatactgcaaagatgtcactcactttgggcactttgcgcaacgacaaagccattcctggtgatggcgaagacactatctcaaagctcacctggtctcccgtcgccaatcacctcgctgccgcatcatgggacagtaaagtccgcatttacgacgtcaacacctccggatccgccaaaggactcaccgccctcaccgccgacggcccgctcttcgactgcacatgggccaaggtaagtcatctaactacacagctatcatcgtcctgtcctcgtcccatcctcgtcaacacgccttgaaagaaaaccaaaccaatctctcccaggtgagtactaaactaatgagattttcacttgacgctacgatattgacagatgacccctaggatggaaccaccgtcatggctgcaggagccagcaagaagattcacttcctgcacttggccagcggccagcagggcaccatcggctctcatgctgctcccatccgtggtgttcgtctcattgacatcccgtcctcaaatgcgcctatcgtcgtctctggttcatgggacaagagcgtcaagtactgggacccgcgtcaacccgacacctctcctatctgcacactcgagtgcaaggatcgtgtctatgccttggatgccaagtctggattgctggtcatcgctaccgctgagcgctggattcaccatgtcgacttacgtgatccgaccaaattcctgaagacgattgaatcaccactgctccatcagacaaagcaggtcactgtctttcctgatggcaaaggatgggccaccaccagcatcgagggccgatgtggagttaatgccgtggcagaaaaagatcagaagaccgtgaattttactttcaggtgtcaccgtgatccggttgatgtcaaaaagcaggtcaaggtctgggctgtcaacgactttcagtttcacccgactcgtacgtcgtgcttcgtcaccgccggttcggatggcatcttttccttctgggattgtgtcagacgctctcggcttcagcactacccacgggtcaccagcgtcagcaatgatcctctcgctattacttcagtctcgttcaattccgatggcagtttccttgcctatgctgtcgggtatgactgggctcgtggttgtgcagggaaccacccgaaactggagaccaagatcatgctgcaccctgtcagcacgctcgactcagttcatcgttgagatgtgcctcgggaaatggataatttgggagcaacggggcttacggtaagccaaagggcataggatgaattgggtatgaaccagaaattccagggagagctttgtcgttgaggaacgaaagcgacctgatgcaggcaatcttgtattcatggaggatctcctttgtcacacagaattggtacatgtactcttcataatggagagaatggaggacatggcaagaatggggaaatgaagtagagagtggtcacatgtgagggaactggatcaaatatgatccacagtttgtacagaatgattaaagtcttgacaaattacacaaaactgaggatataaatc

SEQ ID NO: 28711 - DNA, 1833 bp, Muscodor strobelii
  misc_feature: SGI cDNA ID NO. 569851
  misc_feature: Encodes the peptide sequence at SEQ ID NO 28712
atgggcaagaagaggaaggccacgaccactaggtcgagtggcccgcgcgaatatgatcccaaggatggaaggctcggtcacatcacgagccatcgagacctgatgaacgatcaagaccgtttcgaggacgacgacgacgagattctcttcgacgacgctcccaaatccaaacgccaaaaagccgaggaaatacttgaagactccgaagaggagatactgggatattctgagggctctgaagacgaagatgattccgatcgccataaaccgtcaaagaagtcaactaaatcaaaaaagtcccgcggccaacaagactcggacgatgaacagccccaagatgaggatgagcatgatgacggctactggggtgcatccagacaggactactacgatgccgaccagatcgaaaccactgtcgatgccgaggaggaggagaaggaggctttgcgactgcagaagaagaagctcgccaagatgtccgaagctgactttttcaatgaggacgagtggctggctgctgaacccgaggctggcgatcaggatgaggtcgtcaccgaagtcctgaaagaggtagagatccctgccgacatgggcaccgacgagaggagccgcattttgcatgctagataccccgagcttcccttccttgccgacgagcttctccagttacaacctttgcttctggacctccaaaaagaagcccaaggccaggaccccaaaactctggccgccgtcaaatatcggatccttggctcatttgtggcaactctcgctatgtattttggcatattgacctcgccagcccgagacggtctaggtgaggccaagtcattagatccactagagcttcgcgagcatgaggtcatgggtacgcttttggagtgtcgaaatgcttggaagagagtagagcatctcaaaccatcccgtataattaaggccaccgagagtttgccgtcaccgccacacgaggatgatcttgctatatcagaggaacagatggtgccgtcgacacagtctaaacaaactagcaaagccaacaaagccaaggctaaggcagaacgcaaggcaaaagcgatcgaagattccttggcggatcttaactcccttattaagacgaagaaggcaccaacgaagagagcagcgcacaaggacgatgcggaagatagcaactcagacttcggtgaagaggactatctggatacgcggactgccgctgacaaggcagcacgcaagaagactcttaggttttacacatctcaaatcgtacagaaagcaaatcgccgcgcagaggctggacgtgacgctggtggcgatatggatataccctacagagaacgcttccgagacagacagagtcgcctcaatgccgaagcacagaagcgtggaaagaagggctccaatattggtgccgatctgggcgatgacagtgatgatgcggatcgcgaagtcgccaaagcggtcagagaagagggtaatcaagaatattatgacctgatcgcaacagcatccaacaaacggaagaaggataaggctgcgcgggctgcagcgctagcagaggctggctctgccgaccgcattgttgaaacagaggagctgggacctgatggccggagagaaattacttatgccatcaaggccaacaagggtcttgcacccaggcggaagaaggaagtacgaaatagcagagtgaagaagaagctgcagtaccagaataagttgaagaagctccgcagccagaaagctgtgtatggaggcggagaaggaagagggggctatgctggagagctgagcggtcttaaaaccaaccttgtaaaatccacgaagctctcatga

SEQ ID NO: 28712 - protein, 610 aa, Muscodor strobelii
  misc_feature: SGI Peptide ID NO. 569851
  misc_feature (212)..(301): Pfam Id: PF04000 Pfam Desc: Sas10/Utp3/C1D family
  misc_feature (532)..(609): Pfam Id: PF09368 Pfam Desc: Sas10 C-terminal domain
  misc_feature (1)..(609): NCBI GI: 256729684 Blast Desc: NECHADRAFT_46921 [Nectria haematococca mpVI 77-13-4]
  misc_feature (1)..(609): NCBI GI: 116208052 Blast Desc: CHGG_03319 [Chaetomium globosum CBS 148.51] gi|88183916|gb|EAQ91384.1| CHGG_03319 [Chaetomium globosum CBS 148.51]
  misc_feature (1)..(609): NCBI GI: 46122357 Blast Desc: FG05556.1 [Gibberella zeae PH-1]
  misc_feature (1)..(609): NCBI GI: 39974985 Blast Desc: MGG_00361 [Magnaporthe grisea 70-15] gi|145018749|gb|EDK03028.1| MGG_00361 [Magnaporthe grisea 70-15]
  misc_feature (2)..(604): NCBI GI: 156065335 Blast Desc: SS1G_00678 [Sclerotinia sclerotiorum 1980] gi|154691537|gb|EDN91275.1| SS1G_00678 [Sclerotinia sclerotiorum 1980]
  misc_feature (1)..(610): NCBI GI: 85086866 Blast Desc: NCU00301 [Neurospora crassa OR74A] gi|28918867|gb|EAA28536.1| [Neurospora crassa OR74A]
  misc_feature (1)..(494): NCBI GI: 171686440 Blast Desc: protein product [Podospora anserina] gi|170943181|emb|CAP68834.1| protein product [Podospora anserina]
  misc_feature (38)..(609): NCBI GI: 255936567 Blast Desc: Pc13g08850 [Penicillium chrysogenum Wisconsin 54-1255] gi|211583930|emb|CAP91954.1| Pc13g08850 [Penicillium chrysogenum Wisconsin 54-1255]
  misc_feature (36)..(609): NCBI GI: 242768455 Blast Desc: Sas10/Utp3 family protein [Talaromyces stipitatus ATCC 10500] gi|218724768|gb|EED24185.1| Sas10/Utp3 family protein [Talaromyces stipitatus ATCC 10500]
  misc_feature (2)..(609): NCBI GI: 212542599 Blast Desc: Sas10/Utp3 family protein [Penicillium marneffei ATCC 18224] gi|210066361|gb|EEA20454.1| Sas10/Utp3 family protein [Penicillium marneffei ATCC 18224]
MGKKRKATTTRSSGPREYDPKDGRLGHITSHRDLMNDQDRFEDDDDEILFDDAPKSKRQKAEEILEDSEEEILGYSEGSEDEDDSDRHKPSKKSTKSKKSRGQQDSDDEQPQDEDEHDDGYWGASRQDYYDADQIETTVDAEEEEKEALRLQKKKLAKMSEADFFNEDEWLAAEPEAGDQDEVVTEVLKEVEIPADMGTDERSRILHARYPELPFLADELLQLQPLLLDLQKEAQGQDPKTLAAVKYRILGSFVATLAMYFGILTSPARDGLGEAKSLDPLELREHEVMGTLLECRNAWKRVEHLKPSRIIKATESLPSPPHEDDLAISEEQMVPSTQSKQTSKANKAKAKAERKAKAIEDSLADLNSLIKTKKAPTKRAAHKDDAEDSNSDFGEEDYLDTRTAADKAARKKTLRFYTSQIVQKANRRAEAGRDAGGDMDIPYRERFRDRQSRLNAEAQKRGKKGSNIGADLGDDSDDADREVAKAVREEGNQEYYDLIATASNKRKKDKAARAAALAEAGSADRIVETEELGPDGRREITYAIKANKGLAPRRKKEVRNSRVKKKLQYQNKLKKLRSQKAVYGGGEGRGGYAGELSGLKTNLVKSTKLS

SEQ ID NO: 28713 - DNA, 2231 bp, Muscodor strobelii
  misc_feature: SGI EST ID NO. CUFF.67796.0
  misc_feature: Variant of the nucleotide sequence at SEQ ID NO 28711
ttttgtacttcttaccttaggtacctatggtggggtcaaaggcttgataagaacggtgataagaacaccgaccaactaaaaaagttgcgagttgacattgaagccgccacggccgcccgcaatacctaacatcgtaacatatcccaaaacacaatccgaaacaggacgacaaaacatgggcaagaagaggaaggccacgaccactaggtcgagtggcccgcgcgaatatgatcccaaggatggaaggctcggtcacatcacgagccatcgagacctgatgaacgatcaagaccgtttcgaggacgacgacgacgagattctcttcgacgacgctcccaaatccaaacgccaaaaagccgaggaaatacttgaagactccgaagaggagatactgggatattctgagggctctgaagacgaagatgattccgatcgccataaaccgtcaaagaagtcaactaaatcaaaaaagtcccgcggccaacaagactcggacgatgaacagccccaagatgaggatgagcatgatgacggctactggggtgcatccagacaggactactacgatgccgaccagatcgaaaccactgtcgatgccgaggaggaggagaaggaggctttgcgactgcagaagaagaagctcgccaagatgtccgaagctgactttttcaatgaggacgagtggctggctgctgaacccgaggctggcgatcaggatgaggtcgtcaccgaagtcctgaaagaggtagagatccctgccgacatgggcaccgacgagaggagccgcattttgcatgctagataccccgagcttcccttccttgccgacgagcttctccagttacaacctttgcttctggacctccaaaaagaagcccaaggccaggaccccaaaactctggccgccgtcaaatatcggatccttggctcatttgtggcaactctcgctatgtattttggcatattgacctcgccagcccgagacggtctaggtgaggccaagtcattagatccactagagcttcgcgagcatgaggtcatgggtacgcttttggagtgtcgaaatgcttggaagagagtagagcatctcaaaccatcccgtataattaaggccaccgagagtttgccgtcaccgccacacgaggatgatcttgctatatcagaggaacagatggtgccgtcgacacagtctaaacaaactagcaaagccaacaaagccaaggctaaggcagaacgcaaggcaaaagcgatcgaagattccttggcggatcttaactcccttattaagacgaagaaggcaccaacgaagagagcagcgcacaaggacgatgcggaagatagcaactcagacttcggtgaagaggactatctggatacgcggactgccgctgacaaggcagcacgcaagaagactcttaggttttacacatctcaaatcgtacagaaagcaaatcgccgcgcagaggctggacgtgacgctggtggcgatatggatataccctacagagaacgcttccgagacagacagagtcgcctcaatgccgaagcacagaagcgtggaaagaagggctccaatattggtgccgatctgggcgatgacagtgatgatgcggatcgcgaagtcgccaaagcggtcagagaagagggtaatcaagaatattatgacctgatcgcaacagcatccaacaaacggaagaaggataaggctgcgcgggctgcagcgctagcagaggctggctctgccgaccgcattgttgaaacagaggagctgggacctgatggccggagagaaattacttatgccatcaaggccaacaagggtcttgcacccaggcggaagaaggaagtacgaaatagcagagtgaagaagaagctgcagtaccagaataagttgaagaagctccgcagccagaaagctgtgtatggaggcggagaaggaagagggggctatgctggagagctgagcggtcttaaaaccaaccttgtaaaatccacgaagctctcatgagggtctattgccagacacgggaagaacataatcaaatacatgtgtatatcccaacgcgtatcaaccacaataaacgcatacagcatcatgtacagacaagggacaagtgttgaatgacttatagtgttttggtacttatctcaaatacgtacgaaatgcgtactcatccagccctcttctcgcatgcagtagttcgttatacaataatcgcaatagatgatat

SEQ ID NO: 28714 - DNA, 1053 bp, Muscodor strobelii
  misc_feature: SGI cDNA ID NO. 569852
  misc_feature: Encodes the peptide sequence at SEQ ID NO 28715
atggagctttcttctcagacggcgtggattacggtggctattgggttgattttggcattcgttgtagccttcagtatgggtgccttttggagccaaaatcagatgcccgtcgatggcaagacggtcctaatcaccggtgcctcggacggcatgggacgcagcgctgcccgccagatggccgagagaggcgcaaacctcatcctcgtctcacgcaacgctagcaagttggaggaggcaatggcagaagctaaggccgccgctcgcaacccccagacccagcgctttacctacatccttgccgacgtctccaagcccgactacgccccggctctgctcgccgaagccattaagtggaacgatggaaagcctcttgatgtcgtgtggtgtattgccggcgcctccacgcccgatttctggatcgaggcgccgctgtctctcacgaggaaacaaatggacatcaacttctggggcgctgccgagatggcccacgcaatcttgcgtctgtggtgtgctccagatgcccccgttgtgcccgagccgaagcacctcatattcacctcctctgtcctcgctttcttccccgtcgtcggatacggcccgtacacacctgccaagagcgctctacgcggactcgccgacactttgaaccaggagcttaagctctaccctcaggaggtcaagctccatgtcgtacatcctggctccatctcgagccctggatttgagaaggaaacccttacaaagcccgatatcacactcctcatcgaggaaggtgaccctgtgcagactccagatgccgtggcagccctcgcgatcaaaggacttgagagaggagactatttcatcaccgtcgcctttctaggccatgtgttgcgctgggccgctgtcggcggatcggtccggaacaattggcttgtggataccatcatgtcctgggtcatatccatcgtggtgctgtttgcgcttcccgatatccttagcaaaatcaaaaaatacgcaaagaagcatggacaccctataaactatcgaaaggaaggcaatcacgatcgataa

SEQ ID NO: 28715 - protein, 350 aa, Muscodor strobelii
  misc_feature: SGI Peptide ID NO. 569852
  misc_feature (40)..(220): Pfam Id: PF00106 Pfam Desc: short chain dehydrogenase
  misc_feature (40)..(127): Pfam Id: PF00106 Pfam Desc: short chain dehydrogenase
  misc_feature (184)..(220): Pfam Id: PF00106 Pfam Desc: short chain dehydrogenase
  misc_feature (41)..(79): Pfam Id: PF08659 Pfam Desc: KR domain
  misc_feature (11)..(338): NCBI GI: 116208054 Blast Desc: CHGG_03320 [Chaetomium globosum CBS 148.51] gi|88183917|gb|EAQ91385.1| CHGG_03320 [Chaetomium globosum CBS 148.51]
  misc_feature (1)..(349): NCBI GI: 256733277 Blast Desc: NECHADRAFT_79406 [Nectria haematococca mpVI 77-13-4]
  misc_feature (26)..(345): NCBI GI: 164429000 Blast Desc: NCU00302 [Neurospora crassa OR74A] gi|166214990|sp|Q7RZR2.2|TSC10_NEUCR RecName: Full=3-ketodihydrosphingosine reductase tsc-10; AltName: AltName:
  misc_feature (1)..(344): NCBI GI: 46124635 Blast Desc: FG06695.1 [Gibberella zeae PH-1]
  misc_feature (13)..(347): NCBI GI: 145611474 Blast Desc: MGG_00362 [Magnaporthe grisea 70-15] gi|145018748|gb|EDK03027.1| MGG_00362 [Magnaporthe grisea 70-15]
  misc_feature (9)..(341): NCBI GI: 154291758 Blast Desc: BC1G_15038 [Botryotinia fuckeliana B05.10] gi|150846617|gb|EDN21810.1| BC1G_15038 [Botryotinia fuckeliana B05.10]
  misc_feature (9)..(337): NCBI GI: 156034537 Blast Desc: SS1G_13203 [Sclerotinia sclerotiorum 1980] gi|154698607|gb|EDN98345.1| SS1G_13203 [Sclerotinia sclerotiorum 1980]
  misc_feature (51)..(339): NCBI GI: 171686438 Blast Desc: protein product [Podospora anserina] gi|170943180|emb|CAP68833.1| protein product [Podospora anserina]
  misc_feature (1)..(339): NCBI GI: 212542601 Blast Desc: 3-ketosphinganine reductase (Tsc10), [Penicillium marneffei ATCC 18224] gi|210066362|gb|EEA20455.1| 3-ketosphinganine reductase (Tsc10), [Penicillium marneffei ATCC
  misc_feature (31)..(337): NCBI GI: 121701773 Blast Desc: 3-ketosphinganine reductase (Tsc10), [Aspergillus clavatus NRRL 1] gi|119397294|gb|EAW07725.1| 3-ketosphinganine reductase (Tsc10), [Aspergillus clavatus NRRL 1]
  misc_feature (26)..(345): SWISSPROT Homolog: EC 1.1.1.102 3-dehydrosphinganine reductase
MELSSQTAWITVAIGLILAFVVAFSMGAFWSQNQMPVDGKTVLITGASDGMGRSAARQMAERGANLILVSRNASKLEEAMAEAKAAARNPQTQRFTYILADVSKPDYAPALLAEAIKWNDGKPLDVVWCIAGASTPDFWIEAPLSLTRKQMDINFWGAAEMAHAILRLWCAPDAPVVPEPKHLIFTSSVLAFFPVVGYGPYTPAKSALRGLADTLNQELKLYPQEVKLHVVHPGSISSPGFEKETLTKPDITLLIEEGDPVQTPDAVAALAIKGLERGDYFITVAFLGHVLRWAAVGGSVRNNWLVDTIMSWVISIVVLFALPDILSKIKKYAKKHGHPINYRKEGNHDR

SEQ ID NO: 28716 - DNA, 1744 bp, Muscodor strobelii
  misc_feature: SGI EST ID NO. CUFF.67645.0
  misc_feature: Variant of the nucleotide sequence at SEQ ID NO 28714
gaccgcgttgcgaatagcttcaagcgctaccgagtattgcagcaacctgggatacttgagctaacagacaggctagggtctgccattggcaccgcaaccctgcatggatgagtagagccttcgttccgcactgcgtgtcaattcatcagaattagtctcccttctcacatgtaaatatttgacacctcttcatggagctttcttctcagacggcgtggattacggtggctattgggttgattttggcattcgttgtagccttcagtatgggtgccttttggagccaaaatcagatgcccgtcgatggcaagacggtcctaatcaccggtgcctcggacggcatgggacgcagcgctgcccgccagatggccgagagaggcgcaaacctcatcctcgtctcacgcaacgctagcaagttggaggaggcaatggcagaagctaaggccgccgctcgcaacccccagacccagcgctttacctacatccttgccgacgtctccaagcccgactacgccccggctctgctcgccgaagccattaagtggaacgatggaaagcctcttgatgtcgtgtggtgtattgccggcgcctccacgcccgatttctggatcgaggcgccgctgtctctcacgaggaaacaaatggacatcaacttctggggcgctgccgagatggcccacgcaatcttgcgtctgtggtgtgctccagatgcccccgttgtgcccgagccgaagcacctcatattcacctcctctgtcctcgctttcttccccgtcgtcggatacggcccgtacacacctgccaagagcgctctacgcggactcgccgacactttgaaccaggagcttaagctctaccctcaggaggtcaagctccatgtcgtacatcctggctccatctcgagccctggatttgagaaggaaacccttacaaagcccgatatcacactcctcatcgaggaaggtgaccctgtgcagactccagatgccgtggcagccctcgcgatcaaaggacttgagagaggagactatttcatcaccgtcgcctttctaggccatgtgttgcgctgggccgctgtcggcggatcggtccggaacaattggcttgtggataccatcatgtcctgggtcatatccatcgtggtgctgtttgcgcttcccgatatccttagcaaaatcaaaaaatacgcaaagaagcatggacaccctataaactatcgaaaggaaggcaatcacgatcgataaatgactaatgacacggaaagaacccagaccataaagagcactcgagcgtaacacacgatatagtcatgcctacagacaagacttggctcctacaactctcatacaacgccgcatagatgaacttcagagagccttcgaggccgtcaaaaagtgcgatactggcatcggtggtgggatcatccgatctattgaccattgatagccatatacttcgctaacttcgattccgatcgcggccaatcatacctgtaataaatagaatgggggtaaacaaaactagagtcgcattatacctcaaacctagaccagacatcaagacatgggataaaacggggtaaagacacatgggctactgcgtcaagaatcactcctagatacgactcatgtactgggagttgttcaataataagcggaagaataataacacaaaactataacaatcgcgaaacgcacatgtatttaataatcgtaacaacttactcgaaaagatccaaccccgg

SEQ ID NO: 28717 - DNA, 690 bp, Muscodor strobelii
  misc_feature: SGI cDNA ID NO. 569853
  misc_feature: Encodes the peptide sequence at SEQ ID NO 28718
atgcctctgaatcgaatgcaaatcaacacggccaatgtgacagcaaatgtgcttcagtcgttcagtaacgtcggtgaggcgacacacgggaacgtacgccatctagtagctgcccgaagtttcgtacaagatgccattcaattaccacttcctagcaaccagtggcaaatagaggtgcagttctggcattcaactaccatgtctctgattcaacatggtctcctagaatacatgactgggccgaacgacgaggattttcaaaaatatgtccagacaccctccacacccgaggaacaggccttatgccagcggcaacgagtacgcatcagccaaggattcgccaatgtttctagtctgggactcttcttcacgctcagtctcggcgctgtcatcactctaattgccctgttcctcgacaacataatgggatacgtgacacgattttcagaggggggtggaaagaaacatcgggcgtggatacgagacgacgtcttgcattttcagagactcgcttacagccgggagcaagcgttcgggccccggtggatagagactgacgggggtgacatacctttggttgagggcaacggcttcttggaccccattcgcgacccagaggaggctaaaatagacaagaatcaaagcaggctgtcagtcgactcgctcatggatgttggtgcaaccctatga

SEQ ID NO: 28718 - protein, 229 aa, Muscodor strobelii
  misc_feature: SGI Peptide ID NO. 569853
  misc_feature (3)..(172): NCBI GI: 159128250 Blast Desc: conserved [Aspergillus fumigatus A1163]
  misc_feature (3)..(172): NCBI GI: 70986226 Blast Desc: conserved [Aspergillus fumigatus Af293] gi|66846236|gb|EAL86569.1| conserved [Aspergillus fumigatus Af293]
  misc_feature (3)..(172): NCBI GI: 115399382 Blast Desc: [Aspergillus terreus NIH2624] gi|114192163|gb|EAU33863.1| [Aspergillus terreus NIH2624]
  misc_feature (3)..(172): NCBI GI: 119474227 Blast Desc: NFIA_004500 [Neosartorya fischeri NRRL 181] gi|119407142|gb|EAW17092.1| conserved [Neosartorya fischeri NRRL 181]
  misc_feature (38)..(224): NCBI GI: 189194015 Blast Desc: conserved [Pyrenophora tritici-repentis Pt-1C-BFP] gi|187978910|gb|EDU45536.1| conserved [Pyrenophora tritici-repentis Pt-1C-BFP]
  misc_feature (47)..(189): NCBI GI: 238490874 Blast Desc: conserved [Aspergillus flavus NRRL3357] gi|220697087|gb|EED53428.1| conserved [Aspergillus flavus NRRL3357]
  misc_feature (47)..(189): NCBI GI: 169772941 Blast Desc: [Aspergillus oryzae RIB40] gi|83768800|dbj|BAE58937.1| protein product [Aspergillus oryzae]
  misc_feature (2)..(172): NCBI GI: 242821753 Blast Desc: conserved [Talaromyces stipitatus ATCC 10500] gi|218712665|gb|EED12090.1| conserved [Talaromyces stipitatus ATCC 10500]
  misc_feature (85)..(218): NCBI GI: 169598142 Blast Desc: SNOG_01870 [Phaeosphaeria nodorum SN15] gi|111068962|gb|EAT90082.1| SNOG_01870 [Phaeosphaeria nodorum SN15]
  misc_feature (1)..(172): NCBI GI: 46116086 Blast Desc: FG03885.1 [Gibberella zeae PH-1]
MPLNRMQINTANVTANVLQSFSNVGEATHGNVRHLVAARSFVQDAIQLPLPSNQWQIEVQFWHSTTMSLIQHGLLEYMTGPNDEDFQKYVQTPSTPEEQALCQRQRVRISQGFANVSSLGLFFTLSLGAVITLIALFLDNIMGYVTRFSEGGGKKHRAWIRDDVLHFQRLAYSREQAFGPRWIETDGGDIPLVEGNGFLDPIRDPEEAKIDKNQSRLSVDSLMDVGATL

SEQ ID NO: 28719 - DNA, 3103 bp, Muscodor strobelii
  misc_feature: SGI EST ID NO. CUFF.67718.0
  misc_feature: Variant of the nucleotide sequence at SEQ ID NO 28717
gaatgagaggaatacgaggtgataagaatgattggatgccacgtccttagatcgcgggcgtatcattaggctctcaacctacttttctgggccggaaggctttggcagacacccccaagaacgtctttcggcccccagtggtttgtatattttgatactttggccataattgctacctaagctactcgccgccttcgtccttcttgttctttgcaatgagccacagcatcgagcgcctttttgaaaatctcatttcagatattgttgcttagtcgcaagcttctccatgttcccatcgttacgagggtactatctcagggctgggcgttgcctattgtaccaaagaatcgcatcagccctacgaccccgtttatgaaaccggcctgccgccatgatacagcgtattgtaagggggcgtgggatgacgggttaaaatttacctacctgtggtgaaacattatgccaaagagacgtagatacgacacgtacgaaacatggcagccaaggtgtctcattcagatatataacgacatcattcccacttctttccgccgaagttaggttcaattaacaaaacgcatagatttactatacccgtacagtgcagctgaagctacctccacatagttaaggttcccgtgtcccttcaagcaggcttaccgacacgccagagccgttgccatgtcgattgcatcaacagatatgtttactggcatgtagacagactggtcgaaagatagtcaagttcttgggtctaccataacgctaacctcatcaaacagcagacttctggccgcattccttgctatctatgtatcactatcggtttccaacctttggcttctcctcgtatatagcatccatcgagctcgatatagcatcacggagggcaaatgtcgtaccatagttcggcagcagcaagccttcctcaaagccggcctgtccccaacctcaaccaatatacgcctcatcaaactttactgggcttaccgtttcaccccatttgcctagcgccagtcgtggctctggataaccatctcagccctaagcgccgcgaacagtgccgcggctgggctattttcttcacagatcatagactcatcactctacattaacgttctaattaattcctcaagctgtgggtttttttcaccttcacttacggacggcggggtgggcgatccgggcttaatagcgggaaaccagaatgtcgcaacattagttgatttagcgtcaacatatgcacgtaattgttataactccaccagcgacaagggtcaatgcagcttttttccatcgagcaccatcccttgggaaacggactaggaggctgagtgccctttcaccaaaatgtatgtaggcccagctatacgccttaacactgggctattaaactcgaactccgtcttaggcattaattcaccagccgccgatcaaatagagttacggaaaataactacatgcgctcccattcgacaagatggatacacaaaaactgaacccgccgatgttgatacgttagatcgatctgtgtcctaattatatggccccataattggcgataacgcaactggggcctttgatacactgtcggctaaccttacatttgcctacactatgagtgcatcttatcatagtggccgctcagataaacgggacatttggtctcccatccctgagatgaacaatacccaaggggacgggactgtaattttcctttcgagcaacaatgtgctattcccggaccaatgcgacgacccaatattctcagcacacacgccgcaagatgaagcaggcattatctggtatgtggaggaccatttagctggcgtactaggttgcctcgaacagtatcagatatgtagcacagtctctgatgcctgttcccgcgtgggtgggttatatgacgtccttctcgaagttacggacaagatgcctctgaatcgaatgcaaatcaacacggccaatgtgacagcaaatgtgcttcagtcgttcagtaacgtcggtgaggcgacacacgggaacgtacgccatctagtagctgcccgaagtttcgtacaagatgccattcaattaccacttcctagcaaccagtggcaaatagaggtgcagttctggcattcaactaccatgtctctgattcaacatggtctcctagaatacatgactgggccgaacgacgaggattttcaaaaatatgtccagacaccctccacacccgaggaacaggccttatgccagcggcaacgagtacgcatcagccaaggattcgccaatgtttctagtctgggactcttcttcacgctcagtctcggcgctgtcatcactctaattgccctgttcctcgacaacataatgggatacgtgacacgattttcagaggggggtggaaagaaacatcgggcgtggatacgagacgacgtcttgcattttcagagactcgcttacagccgggagcaagcgttcgggccccggtggatagagactgacgggggtgacatacctttggttgagggcaacggcttcttggaccccattcgcgacccagaggaggctaaaatagacaagaatcaaagcaggctgtcagtcgactcgctcatggatgttggtgcaaccctatgacacaaagccaatccatacgttcatataccatcgtctacaacatcgctaagcggctgattattggtgagacgatggtgacaatgagataaagactgcctagatattacagcgagtttatctcagtggcgaattctaccgcttcggctataagctggattatctatgatgtattactaagctaaggaatgtgctgtggagatcattttggtagcttctatgggcggcttagaacaaaaagttcgaaggagggtacccgatttttccttttaccttttttcagatgaacataccctctgtggtgacgaacaagaacttgtcggttgctttgtttaagaataacaatgtcattgttacacagtatcccatataattccatggcgggtttcataactttgctgctgcatttgaacagcatacctaagtgccttgtaaaggaaagaggtggtactgaaatctatgttatttagatgatagggcttag

SEQ ID NO: 28720 - DNA, 1062 bp, Muscodor strobelii
  misc_feature: SGI cDNA ID NO. 569854
  misc_feature: Encodes the peptide sequence at SEQ ID NO 28721
atgggttgtggaatgagtacggaggagaaggagggcaaggcccgcaacgaggagatcgagaaccagctgaagcgcgacaagatgatgcagcgcaacgagatcaagatgcttcttctaggtgctggtgaatctggaaagtcaactatcctgaagcagatgaagctgatccacgagggtggttattcacgcgacgagcgggagtccttcaaggagatcatcttcagcaacacggtccagtcaatgcgtgttattctcgaggctatggaatccctcgagctaccgcttgaggaccagcgcatggagtaccatgtgcagaccatcttcatgcagcccgcacagatcgagggcgatgttctgcctcctgaggtcggcaatgctatcgaggctctgtggaaagaccgcggagttcaggactgtttcaagcggtcgcgtgagtaccaactgaacgattcggcaagatactatttcgacaacattgctcgaattgctgctcccgattacatgcccaatgatcaggatgttctccgatctcgtgtcaagacgaccggtatcacagagactactttcatcattggcgacttgacttaccgcatgtttgacgttggtggccagagatcagagcgaaagaagtggatccactgcttcgagaatgtcaccactattctcttcctagtcgctatctcagagtacgaccagcttcttttcgaggacgagactgtcaaccgtatgcaggaggctttgacgctgttcgattcgatctgcaactcgaggtggttcatcaagacgtcaatcatcttgttcctgaacaagatcgatcgattcaaggagaagctgcccgtcagcccgatgaagaactacttccccgactacgagggcggtgaggactacgctgctgcttgcgactacatcttgaaccgcttcgtcagcttaaatcagcatgagacgaaacaaatctacacacatttcacctgtgccaccgacacgacgcaaattcgcttcgttatggctgctgtaaatgatattatcatccaagaaaacctccgattatgcggtttgatctaa

SEQ ID NO: 28721 - protein, 353 aa, Muscodor strobelii
  misc_feature: SGI Peptide ID NO. 569854
  misc_feature (6)..(352): Pfam Id: PF00503 Pfam Desc: G-protein alpha subunit
  misc_feature (1)..(353): NCBI GI: 46122315 Blast Desc: GBA1_CRYPA Guanine nucleotide-binding protein alpha subunit [Gibberella zeae PH-1] gi|15028921|emb|CAC45042.1| G protein alpha subunit [Gibberella fujikuroi] guanine protein G f.
  misc_feature (1)..(353): NCBI GI: 193735628 Blast Desc: guanine nucleotide-binding protein [Fusarium oxysporum f. cubense]
  misc_feature (1)..(353): NCBI GI: 3929354 Blast Desc: GPA1_COLTR RecName: Full=Guanine nucleotide-binding protein subunit alpha gi|2906027|gb|AAC03782.1| G protein alpha subunit homolog [Colletotrichum trifolii]
  misc_feature (1)..(353): NCBI GI: 186968861 Blast Desc: heterotrimeric G protein [Glomerella graminicola]
  misc_feature (1)..(353): NCBI GI: 2494877 Blast Desc: GPA1_CRYPA RecName: Full=Guanine nucleotide-binding protein subunit alpha gi|563251|gb|AAA67706.1| guanine nucleotide regulatory protein [Cryphonectria parasitica]
  misc_feature (1)..(353): NCBI GI: 39974977 Blast Desc: guanine nucleotide-binding protein alpha subunit [Magnaporthe grisea 70-15] gi|148887376|sp|O13315.4|GPA1_MAGGR RecName: Full=Guanine nucleotide-binding protein subunit alpha
  misc_feature (1)..(353): NCBI GI: 2293544 Blast Desc: MAGB [Magnaporthe grisea]
  misc_feature (1)..(353): NCBI GI: 27728513 Blast Desc: G protein alpha subunit [Hypocrea virens]
  misc_feature (1)..(353): NCBI GI: 15072479 Blast Desc: protein GTPase Tga1 [Trichoderma atroviride] gi|28300423|gb|AAO37686.1| heterotrimeric G protein alpha subunit TGA1 [Trichoderma atroviride]
  misc_feature (1)..(353): NCBI GI: 85083509 Blast Desc: guanine nucleotide-binding protein alpha subunit [Neurospora crassa OR74A] gi|585176|sp|Q05425.1|GPA1_NEUCR RecName: Full=Guanine nucleotide-binding protein alpha-1 subunit;
  misc_feature (36)..(332): SWISSPROT Homolog: EC 3.1.3.16 Phosphoprotein phosphatase
MGCGMSTEEKEGKARNEEIENQLKRDKMMQRNEIKMLLLGAGESGKSTILKQMKLIHEGGYSRDERESFKEIIFSNTVQSMRVILEAMESLELPLEDQRMEYHVQTIFMQPAQIEGDVLPPEVGNAIEALWKDRGVQDCFKRSREYQLNDSARYYFDNIARIAAPDYMPNDQDVLRSRVKTTGITETTFIIGDLTYRMFDVGGQRSERKKWIHCFENVTTILFLVAISEYDQLLFEDETVNRMQEALTLFDSICNSRWFIKTSIILFLNKIDRFKEKLPVSPMKNYFPDYEGGEDYAAACDYILNRFVSLNQHETKQIYTHFTCATDTTQIRFVMAAVNDIIIQENLRLCGLI

SEQ ID NO: 28722 - DNA, 1941 bp, Muscodor strobelii
  misc_feature: SGI EST ID NO. CUFF.68007.0
  misc_feature: Variant of the nucleotide sequence at SEQ ID NO 28720
cgacaacgtagcagcatattgtccattatcctcattgccgccacaatcgatgctcacattcaaatcaagcatcgacccaaaacgctaattcgcaacttcgtatagcacgaatccattgccggtgctcccgatcacatcgacgtgtacttgccgccgtggcctgaattcctatcggatcacttacagagtcaacatctctacacagccgtcaagatgggttgtggaatgagtacggaggagaaggagggcaaggcccgcaacgaggagatcgagaaccagctgaagcgcgacaagatgatgcagcgcaacgagatcaagatgcttcttctaggtgctggtgaatctggaaagtcaactatcctgaagcagatgaagctgatccacgagggtggttattcacgcgacgagcgggagtccttcaaggagatcatcttcagcaacacggtccagtcaatgcgtgttattctcgaggctatggaatccctcgagctaccgcttgaggaccagcgcatggagtaccatgtgcagaccatcttcatgcagcccgcacagatcgagggcgatgttctgcctcctgaggtcggcaatgctatcgaggctctgtggaaagaccgcggagttcaggactgtttcaagcggtcgcgtgagtaccaactgaacgattcggcaagatactatttcgacaacattgctcgaattgctgctcccgattacatgcccaatgatcaggatgttctccgatctcgtgtcaagacgaccggtatcacagagactactttcatcattggcgacttgacttaccgcatgtttgacgttggtggccagagatcagagcgaaagaagtggatccactgcttcgagaatgtcaccactattctcttcctagtcgctatctcagagtacgaccagcttcttttcgaggacgagactgtcaaccgtatgcaggaggctttgacgctgttcgattcgatctgcaactcgaggtggttcatcaagacgtcaatcatcttgttcctgaacaagatcgatcgattcaaggagaagctgcccgtcagcccgatgaagaactacttccccgactacgagggcggtgaggactacgctgctgcttgcgactacatcttgaaccgcttcgtcagcttaaatcagcatgagacgaaacaaatctacacacatttcacctgtgccaccgacacgacgcaaattcgcttcgttatggctgctgtaaatgatattatcatccaagaaaacctccgattatgcggtttgatctaaccgacatgaccgactcacgacatgcgaggaaagacgacttctaaaatacccacaaacgtatacctacagctgccagtaatggtttagatctggctaatgattgacctgtaccccgcgatgatttggcgaacgaatcttgcatgtgttttatttgcacctgaaactgtccaacatattccttcacccactgtgtttttacatgaccgcttccgttaccgcccctttcaggtctgctagagacctagacagttcccgagcacacacaagatgcgtaacatgacgtcgaatgaggggcctattgcatcgcggattacatatcttgtttaattatgattcggcggcgaggttgacctctcacatttgtttttcttttttcactttgaaggcatgcggaatgccccggcgaacgcccaaaacggggattaggcaacgtacaaactgcgttgtgcgattgatagtcaggggcgaggcgatggatgattgcgacgaagttataccaaggaggagtcgtagcgagtgtgtgtgctcggagcaagttcgagctcagagatgaaaatggttggattgtcgatataaatgaataaacccaaccgcagttctacatatgaaagcctgctaggctaccttgtctgcaaaatgtgactaacgaaaccgtcaaggctcgcg

SEQ ID NO: 28723 - DNA, 777 bp, Muscodor strobelii
  misc_feature: SGI cDNA ID NO. 569855
  misc_feature: Encodes the peptide sequence at SEQ ID NO 28724
atggcgtcaattcaaatggatcgcatgggcggcactagagccttcaatcacagcgctggtaatgacgccgaggccgaatacgatcgtctgcgacaagaggcgcgtctccatcagaacaaggtcaacaagttagctggcgaagcacaagcagcgtaccagaatggtgacggcgaagaggctcatagattgaaaatagccaaagaaaaggaaaaagaaaaagcagacgagtggaatcgcaaggcgagcgattatatcttccgcgagaataatgctccagggcgcgtcgccgaagatacgattgatcttcatggccaattcgttcaagaggcggaagatattctcgaagaacggatcaaatatgcccagtcaacaggacaaacccaccttcatgtgattgtcggaaaaggaaaccacagcgcaaaccacattcaaaagatcaagccgcgcgttgagcagatctgccgagaactcggacttcaatatgcaaccgaagagaatgctgggcggatatacgtgaacctgcaaggcggcgaggtcacacacatgccgccattgccgcaacagccctcaagctaccaaggtggctacggcagtcaacatcatggtggacagcagcaacatcaccagcaacaacagtatggcggtcaacaacatcaccaacagcagcagtatggcgggcatcagcagcatcagcagcaaaatgaacaagacgagattgttgagaaactcgtcaataagcttgtgcgcaagttgggagattgctgcgtagttatgtag

SEQ ID NO: 28724 - protein, 258 aa, Muscodor strobelii
  misc_feature: SGI Peptide ID NO. 569855
  misc_feature (26)..(91): Pfam Id: PF08590 Pfam Desc: Domain of function (DUF1771)
  misc_feature (100)..(175): Pfam Id: PF01713 Pfam Desc: Smr domain
  misc_feature (1)..(258): NCBI GI: 189207675 Blast Desc: smr domain containing protein [Pyrenophora tritici-repentis Pt-1C-BFP] gi|187976264|gb|EDU42890.1| smr domain containing protein [Pyrenophora tritici-repentis
  misc_feature (11)..(258): NCBI GI: 67516743 Blast Desc: AN0653.2 [Aspergillus nidulans FGSC A4] gi|40746273|gb|EAA65429.1| AN0653.2 [Aspergillus nidulans FGSC A4] gi|259489079|tpe|CBF89053.1| TPA: Smr domain protein nidulans
  misc_feature (2)..(186): NCBI GI: 116208058 Blast Desc: CHGG_03322 [Chaetomium globosum CBS 148.51] gi|88183919|gb|EAQ91387.1| CHGG_03322 [Chaetomium globosum CBS 148.51]
  misc_feature (3)..(258): NCBI GI: 242774761 Blast Desc: Smr domain protein [Talaromyces stipitatus ATCC 10500] gi|218722125|gb|EED21543.1| Smr domain protein [Talaromyces stipitatus ATCC 10500]
  misc_feature (11)..(258): NCBI GI: 119495315 Blast Desc: Smr domain protein [Neosartorya fischeri NRRL 181] gi|119412607|gb|EAW22548.1| Smr domain protein [Neosartorya fischeri NRRL 181]
  misc_feature (11)..(258): NCBI GI: 212532129 Blast Desc: Smr domain protein [Penicillium marneffei ATCC 18224] gi|210071585|gb|EEA25674.1| Smr domain protein [Penicillium marneffei ATCC 18224]
  misc_feature (11)..(258): NCBI GI: 42820718 Blast Desc: smr family protein, [Aspergillus fumigatus] gi|159131439|gb|EDP56552.1| Smr domain protein [Aspergillus fumigatus A1163]
  misc_feature (3)..(258): NCBI GI: 85086875 Blast Desc: NCU00303 [Neurospora crassa OR74A] gi|28918869|gb|EAA28538.1| [Neurospora crassa OR74A]
  misc_feature (1)..(184): NCBI GI: 156053822 Blast Desc: SS1G_05759 [Sclerotinia sclerotiorum 1980] gi|154703539|gb|EDO03278.1| SS1G_05759 [Sclerotinia sclerotiorum 1980]
  misc_feature (11)..(258): NCBI GI: 119181735 Blast Desc: CIMG_05951 [Coccidioides immitis RS]
MASIQMDRMGGTRAFNHSAGNDAEAEYDRLRQEARLHQNKVNKLAGEAQAAYQNGDGEEAHRLKIAKEKEKEKADEWNRKASDYIFRENNAPGRVAEDTIDLHGQFVQEAEDILEERIKYAQSTGQTHLHVIVGKGNHSANHIQKIKPRVEQICRELGLQYATEENAGRIYVNLQGGEVTHMPPLPQQPSSYQGGYGSQHHGGQQQHHQQQQYGGQQHHQQQQYGGHQQHQQQNEQDEIVEKLVNKLVRKLGDCCVVM

SEQ ID NO: 28725 - DNA, 1270 bp, Muscodor strobelii
  misc_feature: SGI EST ID NO. CUFF.67692.0
  misc_feature: Variant of the nucleotide sequence at SEQ ID NO 28723
cttgcagccagtcttgcgttgaacctagaccatgcttgccagagagtaaaccagcctcgtcgcgtctggtcccagccccggatccgcccgtaggcgccactaggctttatgatgctttagcggcagatcttccccaattcccaagataatattggtggatgaggcgcgtgtctgaatcaagcagactttttggcgcgcatggtctccaagcagaagcaattgaggtcatcgtcgtccccattacgttcgttgttgtgctacgatttcttcgtgatttcttcgcgacgtcaacgtccgtatttctaagatggcgtcaattcaaatggatcgcatgggcggcactagagccttcaatcacagcgctggtaatgacgccgaggccgaatacgatcgtctgcgacaagaggcgcgtctccatcagaacaaggtcaacaagttagctggcgaagcacaagcagcgtaccagaatggtgacggcgaagaggctcatagattgaaaatagccaaagaaaaggaaaaagaaaaagcagacgagtggaatcgcaaggcgagcgattatatcttccgcgagaataatgctccagggcgcgtcgccgaagatacgattgatcttcatggccaattcgttcaagaggcggaagatattctcgaagaacggatcaaatatgcccagtcaacaggacaaacccaccttcatgtgattgtcggaaaaggaaaccacagcgcaaaccacattcaaaagatcaagccgcgcgttgagcagatctgccgagaactcggacttcaatatgcaaccgaagagaatgctgggcggatatacgtgaacctgcaaggcggcgaggtcacacacatgccgccattgccgcaacagccctcaagctaccaaggtggctacggcagtcaacatcatggtggacagcagcaacatcaccagcaacaacagtatggcggtcaacaacatcaccaacagcagcagtatggcgggcatcagcagcatcagcagcaaaatgaacaagacgagattgttgagaaactcgtcaataagcttgtgcgcaagttgggagattgctgcgtagttatgtagggtatgaaatagatggtatgttggattccaattttcaaatagcggaaatgaagaacccgaaatatggtgtcgtaatgacagggaattttggactgttacacggccgtgtaacactgttggaccattaccatattttgcatggtagcatcccatatctagaattgtgatagaaactgaaagcttcaa

SEQ ID NO: 28726 - DNA, 1890 bp, Muscodor strobelii
  misc_feature: SGI cDNA ID NO. 569856
  misc_feature: Encodes the peptide sequence at SEQ ID NO 28727
atgtcagaatacgttggtctgacatatcttggtcagcaattcgatcttggtgtgcagcccatggatcgcgaatctgtggattttgccagcatgaaacagtgcttggattactgtgagactcaccacaaggccctctgtggccccatttctgaagcaaggccgaataatcttcgagtgatcgattgtcgctcgaagaggcgcaaggttatcctcgctccccctgcctgttgctatgtagcgttatcttatgtctggggaaacccatcacctgctcctcaaaagaagcccagaaactttgcgttcctttcgtctctgaaacatcgaaataaaacggcaatatttccgcaagtggtgaatgattcgatcgaggcagcgattgctctgggtttcgattatctatgggtagatcagttctgtatcaatcaaaatgatcctgccgataagcagcatcatattgcacagatggacaagatatatgcaaacgctgcctgcactattgctgctgccgccggagaagatagcacatacggacttcccggtatcagtcgacctcgtgaaagacagcaacaacttacgataaaggaaggtgtcacgttcataggtaacaaaaaccacttctaccgtcatacggcgcgctccgcatggtcaaagcgaggctggacattacaggagagtttcctttcttctcgcaggatcatcttcacggatcatggtacatacttcttatgtaacagtcgccaagcagttgaaggtataaaacaaccgcttcatgttccccgcaaggaggaaggcttttacggctacgttttagcaggaataaatgcacccgagcggtcctttgaagaattggaagtcttagccaacggtgttctagagcagtatgctcgtcgtcagcttacgtatgcttctgataagttagccgcgtgtctgggcatgttgaaagtcctccagaggtcgggattatttctcccgtggggagtaccgttattacaagacggacacaatccgacaagactctcgctagactgggatgaaaacggcaaatataataagaagcttgtgcgtgtcccggaagtcccaagttggtcgagtttggggtggtatggcggcagcggcgtgatcgttgggcggtattccgataacgttaagcttgagagctcttatatctactttggcgatattacacgaccactcttgagtctggaccagatggcgagtgaactccaagaagggcgaatgaggattgattcatgcccgaggtatttgcacttgactggtctctttttgcgcgtctcattcgcgaagatggcatggacggagccgttaccatggagagaaccagacgattatgtttatcataacacgaaattcacacggtcaagctcgggacgccaagtagaagtgacacaccctccagccctggactacccttacgcctccctccctctaacagatgacctaagggtttggttcaactacgccgcagataccgagccaccgactagcgacgatggaataatcggactactgctaggatctttcggctacacagaagatgttctacgcgaggcatatgccttactaagggaccaaaggaatttgtacgaatttttccattcgaatttgaatatggaatgtgaatcgcaaattcactcagtggcgagggacttgtttcgtcttaacaaagttatcctgctcaagaatcacggagactattacgaacggataggcctgtttgatctgccgattcaggagactaaagagggcagacatggacaaattggattctgtaacgatgcacgtgagcgcatcgtaacggtagatttacaggattatactatgcccctttggcttaaggaggcgtgggttcaatctgtagttattggataa

SEQ ID NO: 28727 - protein, 629 aa, Muscodor strobelii
  misc_feature: SGI Peptide ID NO. 569856
  misc_feature (78)..(224): Pfam Id: PF06985 Pfam Desc: Heterokaryon incompatibility protein (HET)
  misc_feature (16)..(374): NCBI GI: 256723982 Blast Desc: NECHADRAFT_86266 [Nectria haematococca mpVI 77-13-4]
  misc_feature (17)..(369): NCBI GI: 256728352 Blast Desc: NECHADRAFT_87690 [Nectria haematococca mpVI 77-13-4]
  misc_feature (16)..(424): NCBI GI: 171678749 Blast Desc: protein product [Podospora anserina] gi|170937444|emb|CAP62102.1| protein product [Podospora anserina]
  misc_feature (24)..(369): NCBI GI: 256727917 Blast Desc: [Nectria haematococca mpVI 77-13-4]
  misc_feature (21)..(369): NCBI GI: 115433588 Blast Desc: [Aspergillus terreus NIH2624] gi|114189783|gb|EAU31483.1| [Aspergillus terreus NIH2624]
  misc_feature (25)..(376): NCBI GI: 169605681 Blast Desc: SNOG_05865 [Phaeosphaeria nodorum SN15] gi|111065809|gb|EAT86929.1| SNOG_05865 [Phaeosphaeria nodorum SN15]
  misc_feature (4)..(371): NCBI GI: 154289695 Blast Desc: BC1G_16027 [Botryotinia fuckeliana B05.10] gi|150848808|gb|EDN24001.1| BC1G_16027 [Botryotinia fuckeliana B05.10]
  misc_feature (24)..(370): NCBI GI: 46121251 Blast Desc: FG05004.1 [Gibberella zeae PH-1]
  misc_feature (35)..(326): NCBI GI: 256731216 Blast Desc: [Nectria haematococca mpVI 77-13-4]
  misc_feature (22)..(367): NCBI GI: 169621105 Blast Desc: SNOG_13757 [Phaeosphaeria nodorum SN15] gi|111057661|gb|EAT78781.1| SNOG_13757 [Phaeosphaeria nodorum SN15]
MSEYVGLTYLGQQFDLGVQPMDRESVDFASMKQCLDYCETHHKALCGPISEARPNNLRVIDCRSKRRKVILAPPACCYVALSYVWGNPSPAPQKKPRNFAFLSSLKHRNKTAIFPQVVNDSIEAAIALGFDYLWVDQFCINQNDPADKQHHIAQMDKIYANAACTIAAAAGEDSTYGLPGISRPRERQQQLTIKEGVTFIGNKNHFYRHTARSAWSKRGWTLQESFLSSRRIIFTDHGTYFLCNSRQAVEGIKQPLHVPRKEEGFYGYVLAGINAPERSFEELEVLANGVLEQYARRQLTYASDKLAACLGMLKVLQRSGLFLPWGVPLLQDGHNPTRLSLDWDENGKYNKKLVRVPEVPSWSSLGWYGGSGVIVGRYSDNVKLESSYIYFGDITRPLLSLDQMASELQEGRMRIDSCPRYLHLTGLFLRVSFAKMAWTEPLPWREPDDYVYHNTKFTRSSSGRQVEVTHPPALDYPYASLPLTDDLRVWFNYAADTEPPTSDDGIIGLLLGSFGYTEDVLREAYALLRDQRNLYEFFHSNLNMECESQIHSVARDLFRLNKVILLKNHGDYYERIGLFDLPIQETKEGRHGQIGFCNDARERIVTVDLQDYTMPLWLKEAWVQSVVIG

SEQ ID NO: 28728 - DNA, 985 bp, Muscodor strobelii
  misc_feature: SGI EST ID NO. CUFF.67701.0
  misc_feature: Variant of the nucleotide sequence at SEQ ID NO 28726
cgccggagaagatagcacatacggacttcccggtatcagtcgacctcgtgaaagacagcaacaacttacgataaaggaaggtgtcacgttcataggtaacaaaaaccacttctaccgtcatacggcgcgctccgcatggtcaaagcgaggctggacattacaggagagtttcctttcttctcgcaggatcatcttcacggatcatggtacatacttcttatgtaacagtcgccaagcagttgaaggtataaaacaaccgcttcatgttccccgcaaggaggaaggcttttacggctacgttttagcaggaataaatgcacccgagcggtcctttgaagaattggaagtcttagccaacggtgttctagagcagtatgctcgtcgtcagcttacgtatgcttctgataagttagccgcgtgtctgggcatgttgaaagtcctccagaggtcgggattatttctcccgtggggagtaccgttattacaagacggacacaatccgacaagactctcgctagactgggatgaaaacggcaaatataataagaagcttgtgcgtgtcccggaagtcccaagttggtcgagtttggggtggtatggcggcagcggcgtgatcgttgggcggtattccgataacgttaagcttgagagctcttatatctactttggcgatattacacgaccactcttgagtctggaccagatggcgagtgaactccaagaagggcgaatgaggattgattcatgcccgaggtatttgcacttgactggtctctttttgcgcgtctcattcgcgaagatggcatggacggagccgttaccatggagagaaccagacgattatgtttatcataacacgaaattcacacggtcaagctcgggacgccaagtagaagtgacacaccctccagccctggactacccttacgcctccctccctctaacagatgacctaagggtttggttcaactacgccgcagatacc

SEQ ID NO: 28729 - DNA, 810 bp, Muscodor strobelii
  misc_feature: SGI cDNA ID NO. 569857
  misc_feature: Reduced expression when VOC is produced
  misc_feature: Encodes the peptide sequence at SEQ ID NO 28730
atgcgttactccgttgtcgctctgttcgctggtgccgtcatggctaccaagaccgtctacagcactgacgttgtcaccgttacctcctgcggtcccgaggtcactgactgccccggcggatcataccctacccaaggctactcgacctccgaggttgctcccacaacttcttcttacccggtcgacaccacctgcactgaggaggagaccacgtccactgctgctcccaccaccagctaccctgccggcggtgcctcaagcagctacccaaccgagtccacgagcgtcgtttatcccaccggatctgcttctgcttctgcctcatcttcttacccctccggccccgagacttccagctacccagttggcggatcttacccatcttccagctatcccgctggcggctcgtcgccttcttccagctaccctgccggtggctcttctccctcgagctacagcagtgcccctgcttcttctagctaccccgttgcttcttccagcagtgctcccgctacaactctcagcactgcttcgtaccctgcaggcggttacacttcggtcatccccatcacttacaccacctgtgttcccactgtcagcaccagctacagcaccatcaccgtcagcccgacctccagcgctcccgcatacccaacgagcggctacccaactgttcctgctggcactggcagctacagcgctactccttatcccacaggctctcccatccccactgctggtgcttccagcatggctggctctgccgtcttcgccgctgctgccggtgtcgccgctatcttccttgcttaa

SEQ ID NO: 28730 - protein, 269 aa, Muscodor strobelii
  misc_feature: SGI Peptide ID NO. 569857
  misc_feature (1)..(240): NCBI GI: 261197537 Blast Desc: conserved [Ajellomyces dermatitidis SLH14081] gi|239595801|gb|EEQ78382.1| conserved [Ajellomyces dermatitidis SLH14081] gi|239606798|gb|EEQ83785.1| conserved [Ajellomyces
  misc_feature (1)..(240): NCBI GI: 240281549 Blast Desc: conserved [Ajellomyces capsulatus H143]
  misc_feature (14)..(225): NCBI GI: 39942032 Blast Desc: [Magnaporthe grisea 70-15] gi|145012162|gb|EDJ96818.1| [Magnaporthe grisea 70-15]
  misc_feature (1)..(41): NCBI GI: 154309742 Blast Desc: BC1G_07341 [Botryotinia fuckeliana B05.10] gi|150851802|gb|EDN26995.1| BC1G_07341 [Botryotinia fuckeliana B05.10]
  misc_feature: Useful for introducing or modulating the production of volatile compounds
MRYSVVALFAGAVMATKTVYSTDVVTVTSCGPEVTDCPGGSYPTQGYSTSEVAPTTSSYPVDTTCTEEETTSTAAPTTSYPAGGASSSYPTESTSVVYPTGSASASASSSYPSGPETSSYPVGGSYPSSSYPAGGSSPSSSYPAGGSSPSSYSSAPASSSYPVASSSSAPATTLSTASYPAGGYTSVIPITYTTCVPTVSTSYSTITVSPTSSAPAYPTSGYPTVPAGTGSYSATPYPTGSPIPTAGASSMAGSAVFAAAAGVAAIFLA

SEQ ID NO: 28731 - DNA, 1385 bp, Muscodor strobelii
  misc_feature: SGI EST ID NO. CUFF.67716.0
  misc_feature: Variant of the nucleotide sequence at SEQ ID NO 28729
agagcgaacactcccctcctttgtctgcaacatcctattaatactcgacctctcttgtttgaatgcgacctctttttctctctttcctcttcagcccaacagccaattcgcaatctgcaactcgctcaactttgacttcggtcgtccattctttttcaacgctctaagcttcaagcttcaccacactctttaacccactcacgaataatcttgtcgtttttcaaacgtacatatcaacaataaatcaaaatgcgttactccgttgtcgctctgttcgctggtgccgtcatggctaccaagaccgtctacagcactgacgttgtcaccgttacctcctgcggtcccgaggtcactgactgccccggcggatcataccctacccaaggctactcgacctccgaggttgctcccacaacttcttcttacccggtcgacaccacctgcactgaggaggagaccacgtccactgctgctcccaccaccagctaccctgccggcggtgcctcaagcagctacccaaccgagtccacgagcgtcgtttatcccaccggatctgcttctgcttctgcctcatcttcttacccctccggccccgagacttccagctacccagttggcggatcttacccatcttccagctatcccgctggcggctcgtcgccttcttccagctaccctgccggtggctcttctccctcgagctacagcagtgcccctgcttcttctagctaccccgttgcttcttccagcagtgctcccgctacaactctcagcactgcttcgtaccctgcaggcggttacacttcggtcatccccatcacttacaccacctgtgttcccactgtcagcaccagctacagcaccatcaccgtcagcccgacctccagcgctcccgcatacccaacgagcggctacccaactgttcctgctggcactggcagctacagcgctactccttatcccacaggctctcccatccccactgctggtgcttccagcatggctggctctgccgtcttcgccgctgctgccggtgtcgccgctatcttccttgcttaagtgatcacttgagtgagtggatgtggtgtttgttgatatttggatatctactgcatgaaaaaacagcctggggaaggctacgacaagtaatgattgcattgcatcacggggacctcgatcccatgcttctgtatttaatttttaattgtatttaggcgccttagggaagcacttgttctgaacatattctctttgcacatatcttccgtctgtttacaattccaagtagaattcctcaggcgacttgattggtaactgatcttgaaatgtgaccgttgagaattgcaatagtaaacatcctctcattttcgcttcctctgccccgg

SEQ ID NO: 28732 - DNA, 3204 bp, Muscodor strobelii
  misc_feature: SGI cDNA ID NO. 569858
  misc_feature: Encodes the peptide sequence at SEQ ID NO 28733
atggagtctcaggtaattaaaccatcgtcgctcctaccgcccactcgctcgcctctcgatttgctgtataatctgttgtatatattacgggatgctgatgtttttgcttggtctccctccctccagatcgagaatgccatcgagatcgcctggaatcccacctccgatgcctccctcaagggccaggccttcgactacctgaaccaggtccgcctggatccccaggcctggcagatctgcgtcggtctcttcaccagacagcagcagccctccgaagtcgtccgcctcgtcgccctcgagatcatcaacaatgccatccacgtccagtccctcgatgcccagagcctcatctccctccgcgacgccctcttccagtatgtccgaaccaactacggccccgcccaccaagggcctgccgactctccgtccctacagaacaagctcacccagatcttcaccaccctcttcgtcgccctctacaagcaaggctgggagacctgcatcgacgacttcttatccctcaccgccgccccgggaagcacacagtatgacaaccctgttggcatcgtcctctatctccgcatcctcggctcgatccacgacgagattgccgatgtcctagttgcacgccaaggccctcaggttcgcctacataccgagctcaaggatctcatgcgagagcgacatgtcgcaaaaatagcccagtcttggcaggatcttctcgcccagtatggcggccacaatgacagcattgtcgagatgaccctcaaggttataggcaagtgggtcagctggatcgatatctctttgattatcaacgaggctatgctgggccgcattttccctctaatcggtaggaccagcgaatcagggggcgaggacaaggttcgcgatgccgccgtcgacgccttcaacgagatcgtgggcaagaagatgcgtcctgctgacaagacggagatgatctcgttcctcgacttgcagaacatcgtctcccagcttgtcgccagtcctgcgctgtcagaattcaaaggtacgcctcgttatgacaccgacctcgccgaagctgttgcgaagctcgtcaacactgctgtggccgatcttgtcagagttctcgaagactcctccgccgatgagaatactcgaggaaaggcaacgcagctgttgcgtgggttcattcctcttctgctacgtttcttctccgacgagtacgacgaagtatgctcctccgtcattccttctctgacggacctcttgcaatacttccgaaaactttccgagctaccagatgccttctctgagatgctcccacctatcttaaatgccatcatcatgaaaatgcgctacgacgagacttcatcatggggcaacgaagatgaacagacagatgaagctgaatttcaggagctacggaaaagattgcaagtcttgcaaaaaagtgttgctgccgtcaaccagcatctttacatagagatactgtcgaatctggtggccaacactttccaatcactggatgagcggggcgcgcagcttgattggagagatcttgatctggcactccacgagatgtacctctttggcgagcttgcaatgccaaatcaaggacttagcaccaagagccagccggtaccagaggcaaccgaaagattagcggccatgatgaccaagatgatacagtcaggtgttgcgaatttcccacatcctgcgatcgtcttacagtatatggaaatctgtcatcgatacagtgcctttttcgagacaaattcttccatgattggtcaagtactcgagaattttgttcggttagtgcatcacgaacatgttcgaattcgggtgcgctcttggtatctcttccatcgtttcgtgagacatcttagggctcaagtgggcaatgtcgcagagacgatcatccaatcaattagtgacctcctgcctatcaaggcagaggccccaagcgatgaggcggacgacgatatgtcctcggacgagacggataattcggccgacgcaattttcaatggccagctgtatttgtacgaggccattgggtgtatctcgtcgacttccgctattccagctgagaaacaggcaatctatgcccgctcagtcatggatcccctctttgtcgatatggaacagcatttggcccgtgctaaatcgggtgatgcgcaagccatccaacaagtacaccacattatcatggcattgggcactcttgcggatgggttctcggattggaaccctgggcttggttccgcgcgacctcctccccctaagcttgtcgcagacgaattttccagggcagcagaggctatcctcattgctcttgatagtctcaacacagtgtcagacatccgcgctgcttgtcggtcagcattctcgcgtctcatgggcgtcctaggctccgccattcttccacagcttccccagtggattgaaggccttctgtcgcagagctcttccaaggacgagatggctatgttccttcgtcttttggatcaagttgtgtttggcttcaagtctgaaatattcgatgtcctcaacatgcttctgactcccctgttgcagagagtgtttaatgggctttcggagccaatcagtggcaccgacgatgaaatacagctcggtgaacttcgacgcgaatacctgacgttcatccagatcatcctgaataacgacttaggcggagtacttgtgtcagaagttaatcaaggcttctttgagtctctgattcactcgattctcgagttggcgaagaatgtgagtctagagtcagggaatctttcagcaagccgaattgcgttcgggctgctcacaaaaatggccgctgtttggggcggtccggatgtggccaacatcgcggccaacccttcagctcctttcggcacacctgcccccgtcattcccggcttcgaccaattcttaatgaatagatttcatccaacgtgttgggaggtcttacgtaactcaggttttcgacctggaaacgatgcacaggcgagacaggttctcaacgagattgctggtctcgaacaagctatctacctgaagacaggtgatcaattcatacagcatttgcaatccacactctttccggtacttggggtcaatagcgatgatttcctacggcccatgaccactagtgtcgataaaaaggctttcgggaagtacttgcagtcatttgctaaacctgcgtacgacgagtga

SEQ ID NO: 28733 - protein, 1067 aa, Muscodor strobelii
  misc_feature: SGI Peptide ID NO. 569858
  misc_feature (141)..(304): Pfam Id: PF08389 Pfam Desc: Exportin 1-like protein
  misc_feature (42)..(1062): NCBI GI: 46124563 Blast Desc: FG06659.1 [Gibberella zeae PH-1]
  misc_feature (42)..(1062): NCBI GI: 116191857 Blast Desc: CHGG_05646 [Chaetomium globosum CBS 148.51] gi|121927700|sp|Q2H6R9.1|XPOT_CHAGB RecName: Full=Exportin-T; AltName: Full=tRNA exportin; AltName: Full=Exportin(tRNA); CBS
  misc_feature (41)..(1062): NCBI GI: 261354048 Blast Desc: KapM [Verticillium albo-atrum VaMs.102]
  misc_feature (42)..(1062): NCBI GI: 164428875 Blast Desc: NCU11169 [Neurospora crassa OR74A] gi|193806647|sp|Q7RWV9.2|XPOT_NEUCR RecName: Full=Exportin-T; AltName: Full=tRNA exportin; AltName: Full=Exportin(tRNA); crassa
  misc_feature (42)..(1062): NCBI GI: 145614366 Blast Desc: MGG_10127 [Magnaporthe grisea 70-15] gi|193806604|sp|A4RMB1.1|XPOT_MAGGR RecName: Full=Exportin-T; AltName: Full=tRNA exportin; AltName: Full=Exportin(tRNA); grisea
  misc_feature (42)..(1062): NCBI GI: 193806641 Blast Desc: MGG_10127 [Magnaporthe grisea 70-15] gi|193806604|sp|A4RMB1.1|XPOT_MAGGR RecName: Full=Exportin-T; AltName: Full=tRNA exportin; AltName: Full=Exportin(tRNA); grisea
  misc_feature (43)..(1062): NCBI GI: 171686952 Blast Desc: protein product [Podospora anserina] gi|170943437|emb|CAP69090.1| protein product [Podospora anserina]
  misc_feature (42)..(1062): NCBI GI: 156051854 Blast Desc: SS1G_07334 [Sclerotinia sclerotiorum 1980] gi|193806613|sp|A7EPT5.1|XPOT_SCLS1 RecName: Full=Exportin-T; AltName: Full=tRNA exportin; AltName: Full=Exportin(tRNA); 1980]
  misc_feature (42)..(1062): NCBI GI: 193806644 Blast Desc: SS1G_07334 [Sclerotinia sclerotiorum 1980] gi|193806613|sp|A7EPT5.1|XPOT_SCLS1 RecName: Full=Exportin-T; AltName: Full=tRNA exportin; AltName: Full=Exportin(tRNA); 1980]
  misc_feature (42)..(1057): NCBI GI: 193806642 Blast Desc: SS1G_07334 [Sclerotinia sclerotiorum 1980] gi|193806613|sp|A7EPT5.1|XPOT_SCLS1 RecName: Full=Exportin-T; AltName: Full=tRNA exportin; AltName: Full=Exportin(tRNA); 1980]
MESQVIKPSSLLPPTRSPLDLLYNLLYILRDADVFAWSPSLQIENAIEIAWNPTSDASLKGQAFDYLNQVRLDPQAWQICVGLFTRQQQPSEVVRLVALEIINNAIHVQSLDAQSLISLRDALFQYVRTNYGPAHQGPADSPSLQNKLTQIFTTLFVALYKQGWETCIDDFLSLTAAPGSTQYDNPVGIVLYLRILGSIHDEIADVLVARQGPQVRLHTELKDLMRERHVAKIAQSWQDLLAQYGGHNDSIVEMTLKVIGKWVSWIDISLIINEAMLGRIFPLIGRTSESGGEDKVRDAAVDAFNEIVGKKMRPADKTEMISFLDLQNIVSQLVASPALSEFKGTPRYDTDLAEAVAKLVNTAVADLVRVLEDSSADENTRGKATQLLRGFIPLLLRFFSDEYDEVCSSVIPSLTDLLQYFRKLSELPDAFSEMLPPILNAIIMKMRYDETSSWGNEDEQTDEAEFQELRKRLQVLQKSVAAVNQHLYIEILSNLVANTFQSLDERGAQLDWRDLDLALHEMYLFGELAMPNQGLSTKSQPVPEATERLAAMMTKMIQSGVANFPHPAIVLQYMEICHRYSAFFETNSSMIGQVLENFVRLVHHEHVRIRVRSWYLFHRFVRHLRAQVGNVAETIIQSISDLLPIKAEAPSDEADDDMSSDETDNSADAIFNGQLYLYEAIGCISSTSAIPAEKQAIYARSVMDPLFVDMEQHLARAKSGDAQAIQQVHHIIMALGTLADGFSDWNPGLGSARPPPPKLVADEFSRAAEAILIALDSLNTVSDIRAACRSAFSRLMGVLGSAILPQLPQWIEGLLSQSSSKDEMAMFLRLLDQVVFGFKSEIFDVLNMLLTPLLQRVFNGLSEPISGTDDEIQLGELRREYLTFIQIILNNDLGGVLVSEVNQGFFESLIHSILELAKNVSLESGNLSASRIAFGLLTKMAAVWGGPDVANIAANPSAPFGTPAPVIPGFDQFLMNRFHPTCWEVLRNSGFRPGNDAQARQVLNEIAGLEQAIYLKTGDQFIQHLQSTLFPVLGVNSDDFLRPMTTSVDKKAFGKYLQSFAKPAYDE

SEQ ID NO: 28734 - DNA, 4872 bp, Muscodor strobelii
  misc_feature: SGI EST ID NO. CUFF.67786.1
  misc_feature: Variant of the nucleotide sequence at SEQ ID NO 28732
gccagatagcagccatgttttatcttgttttcagtcatatatccattcattcaggtaattatgatcttgaatagctgccagtcgtgtcgagacaaccccctccttcaatcgttgttttgcaccgacgttcatcaagcccagaaacgtcacattgacgtcgacaacattgtggcaatgcggaccatgacggcaaggagtcctaatttctactcggtcgacgccagtagttctatgctttcatttccaaggacgtcttcatttgtattccgtcttcaacgctggagcttccaccaggtacggatgctgatcagaccatggcccagggcatagcaactgataagagttaccatctaccatagacagtactgagtcaattgagttcagtaagccgcaactatgatgtaagactgcaatacttcttgactcttcattcgagctcagaattattgtacaccgctaccgagcacttcgtgatttccattgcgagcactacatcatcccttatgagtctatacattcgaacatagtcattttgaggatcatgtagtgaagactgttgaaagaaattgttagacccgaccgtaaacctctatcatctatactatgacactggctcaggtgaaaatggcatgacgtatctaatatcaatatgatgatggagttctcatgtcgaaacaacgtcgaactagaatagcaccattaggcggctaatggtggtgcaacccgaataataggccgatagccatcagcttgtacaccggaagctgattcaaagcgctgttcggaaatcatttccacacataagtaaactgcttatcccaaatataagagtttgcatcagcatgtcgccgacaaaggaaagaagaaaggttgagtgaaagcaccagccgaggattttccgggggtgggataaagccgtgggataaaaggtgttggtggttgacaatgaggggcacagagctcaccgctcaggctggaggctcaaggtgggggatcgctgttgcagttgagacttttgagtcagagcctgaaatcaggcacatgtgtgcgtggtaagtacgtgtgtccatattgccatgcacctgcctttgacgtaggtgcacctgcagtcgataatcattcggcattcactctaagccttccaaactatcagccttgccttgacccaaacccccaaccccaaacccgcgtcgagtgtgccccgccctttctctgaggaacttaatcaccaagcgaagccatcacaacgtgagataacgcagctcgacaacacaccaccaccgcctcctcgctgtgcagctgcgggaccgttgttggcgacggccatgtgcttggggctctgtctgccataggaacggaacacgagcatcatggagtctcagatcgagaatgccatcgagatcgcctggaatcccacctccgatgcctccctcaagggccaggccttcgactacctgaaccaggtccgcctggatccccaggcctggcagatctgcgtcggtctcttcaccagacagcagcagccctccgaagtcgtccgcctcgtcgccctcgagatcatcaacaatgccatccacgtccagtccctcgatgcccagagcctcatctccctccgcgacgccctcttccagtatgtccgaaccaactacggccccgcccaccaagggcctgccgactctccgtccctacagaacaagctcacccagatcttcaccaccctcttcgtcgccctctacaagcaaggctgggagacctgcatcgacgacttcttatccctcaccgccgccccgggaagcacacagtatgacaaccctgttggcatcgtcctctatctccgcatcctcggctcgatccacgacgagattgccgatgtcctagttgcacgccaaggccctcaggttcgcctacataccgagctcaaggatctcatgcgagagcgacatgtcgcaaaaatagcccagtcttggcaggatcttctcgcccagtatggcggccacaatgacagcattgtcgagatgaccctcaaggttataggcaagtgggtcagctggatcgatatctctttgattatcaacgaggctatgctgggccgcattttccctctaatcggtaggaccagcgaatcagggggcgaggacaaggttcgcgatgccgccgtcgacgccttcaacgagatcgtgggcaagaagatgcgtcctgctgacaagacggagatgatctcgttcctcgacttgcagaacatcgtctcccagcttgtcgccagtcctgcgctgtcagaattcaaaggtacgcctcgttatgacaccgacctcgccgaagctgttgcgaagctcgtcaacactgctgtggccgatcttgtcagagttctcgaagactcctccgccgatgagaatactcgaggaaaggcaacgcagctgttgcgtgggttcattcctcttctgctacgtttcttctccgacgagtacgacgaagtatgctcctccgtcattccttctctgacggacctcttgcaatacttccgaaaactttccgagctaccagatgccttctctgagatgctcccacctatcttaaatgccatcatcatgaaaatgcgctacgacgagacttcatcatggggcaacgaagatgaacagacagatgaagctgaatttcaggagctacggaaaagattgcaagtcttgcaaaaaagtgttgctgccgtcaaccagcatctttacatagagatactgtcgaatctggtggccaacactttccaatcactggatgagcggggcgcgcagcttgattggagagatcttgatctggcactccacgagatgtacctctttggcgagcttgcaatgccaaatcaaggacttagcaccaagagccagccggtaccagaggcaaccgaaagattagcggccatgatgaccaagatgatacagtcaggtgttgcgaatttcccacatcctgcgatcgtcttacagtatatggaaatctgtcatcgatacagtgcctttttcgagacaaattcttccatgattggtcaagtactcgagaattttgttcggttagtgcatcacgaacatgttcgaattcgggtgcgctcttggtatctcttccatcgtttcgtgagacatcttagggctcaagtgggcaatgtcgcagagacgatcatccaatcaattagtgacctcctgcctatcaaggcagaggccccaagcgatgaggcggacgacgatatgtcctcggacgagacggataattcggccgacgcaattttcaatggccagctgtatttgtacgaggccattgggtgtatctcgtcgacttccgctattccagctgagaaacaggcaatctatgcccgctcagtcatggatcccctctttgtcgatatggaacagcatttggcccgtgctaaatcgggtgatgcgcaagccatccaacaagtacaccacattatcatggcattgggcactcttgcggatgggttctcggattggaaccctgggcttggttccgcgcgacctcctccccctaagcttgtcgcagacgaattttccagggcagcagaggctatcctcattgctcttgatagtctcaacacagtgtcagacatccgcgctgcttgtcggtcagcattctcgcgtctcatgggcgtcctaggctccgccattcttccacagcttccccagtggattgaaggccttctgtcgcagagctcttccaaggacgagatggctatgttccttcgtcttttggatcaagttgtgtttggcttcaagtctgaaatattcgatgtcctcaacatgcttctgactcccctgttgcagagagtgtttaatgggctttcggagccaatcagtggcaccgacgatgaaatacagctcggtgaacttcgacgcgaatacctgacgttcatccagatcatcctgaataacgacttaggcggagtacttgtgtcagaagttaatcaaggcttctttgagtctctgattcactcgattctcgagttggcgaagaatgtgagtctagagtcagggaatctttcagcaagccgaattgcgttcgggctgctcacaaaaatggccgctgtttggggcggtccggatgtggccaacatcgcggccaacccttcagctcctttcggcacacctgcccccgtcattcccggcttcgaccaattcttaatgaatagatttcatccaacgtgttgggaggtcttacgtaactcaggttttcgacctggaaacgatgcacaggcgagacaggttctcaacgagattgctggtctcgaacaagctatctacctgaagacaggtgatcaattcatacagcatttgcaatccacactctttccggtacttggggtcaatagcgatgatttcctacggcccatgaccactagtgtcgataaaaaggctttcgggaagtacttgcagtcatttgctaaacctgcgtacgacgagtgacggaaacagagacgcatcaaaagttcaccactacgactcacgtagttcatccggggatgatggagaatcacccattctacgcaaggtctttttcattattgcataaaaaggagttggaaggacgattataccaccacatttccgagctcgggtatgtttccttcctggactagatagacgacgacatgagaagcgccgtgcatgtttctttaattccagctaaacccttcattgtgatgggtacattcccctccaagcgccacataatcggtttctcaaaggcatgagggctacagttagcatctggcaacataagcgatcttaagacgaagaaaattttgagacttctcgaactgttctcttcgtgatcttagatgcttgtcaacaaaaatggaagatgattatcatccca

SEQ ID NO: 28735 - DNA, 978 bp, Muscodor strobelii
  misc_feature: SGI cDNA ID NO. 569859
  misc_feature: Encodes the peptide sequence at SEQ ID NO 28736
atgatcgcaaccgcactcatccccctcgtggctctcggcgcgggcctcacgtcggcttacgacacaaccctaggcttcaaaggtgcaccagagatcgagaatcgaactatcgatgagatctatagcgctgccgtagctgaaggcgggatagtaaccctttggcatggcggcgacgagaccaaccaacaagacggtctaaagcaagccttcgaggcgcgcttccccaagatgacccttaacgtgaccgtcgacctttctaagtaccacgacggcaacatcgaccgccaactcgccacgggcgacctctgcgtcgacagtgtcgccatccagacgttacacgacttcccgcggtgggacgaagcaggtgcgctgctgcattatatgccgctgaattttgacaaggtctggcccagtttccgggaccccagaggcgcgtggcatggcacctcggtgtttgcttggagctttctgtggaatacggatcgcgtggaggaggggccgcgggagtttgaggatttcttgaagccggagtttaaggacaagattgtgttaacttatccgaatgatgatgatgctgttctttttgctttcgacttgatcctgcaacaatacgggtatgaatggttcgaagcgctccgcaaacaaaacgttcgctgggtccgtggcactggaactcctctcaccttagtgagccaaagtaactccacgtcgtccgtgacattcacctcggacgctggattaacgccctctaaacctatcggcatcgcattccccacgaaaggacaattcgtcacctggccgcaacgaggcggaattctcaaggacgcaccgcatcccgaaggcgccaagctgctgcataacttcttccttagcgatgagtaccagaacctaacgaactcgtggagcgtacgctctgatatcccgggctccgaagggttatgccgaacttgccgatatagcatcgacgaataccgatga

SEQ ID NO: 28736 - protein, 325 aa, Muscodor strobelii
  misc_feature: SGI Peptide ID NO. 569859
  misc_feature (9)..(296): Pfam Id: PF01547 Pfam Desc: Bacterial extracellular solute-binding protein
  misc_feature (6)..(313): NCBI GI: 256722563 Blast Desc: NECHADRAFT_63858 [Nectria haematococca mpVI 77-13-4]
  misc_feature (20)..(315): NCBI GI: 256722776 Blast Desc: NECHADRAFT_53189 [Nectria haematococca mpVI 77-13-4]
  misc_feature (10)..(313): NCBI GI: 261352385 Blast Desc: ABC transporter [Verticillium albo-atrum VaMs.102]
  misc_feature (1)..(312): NCBI GI: 39968899 Blast Desc: MGG_10060 [Magnaporthe grisea 70-15] gi|145015307|gb|EDJ99843.1| MGG_10060 [Magnaporthe grisea 70-15]
  misc_feature (28)..(307): NCBI GI: 256724157 Blast Desc: NECHADRAFT_51349 [Nectria haematococca mpVI 77-13-4]
  misc_feature (9)..(312): NCBI GI: 46110763 Blast Desc: FG02263.1 [Gibberella zeae PH-1]
  misc_feature (19)..(315): NCBI GI: 261358077 Blast Desc: ABC transporter [Verticillium albo-atrum VaMs.102]
  misc_feature (31)..(312): NCBI GI: 189198483 Blast Desc: ABC-type Fe3+ transport system [Pyrenophora tritici-repentis Pt-1C-BFP] gi|187981527|gb|EDU48153.1| ABC-type Fe3+ transport system [Pyrenophora tritici-repentis Pt-1C-BFP]
  misc_feature (17)..(312): NCBI GI: 169624319 Blast Desc: SNOG_15417 [Phaeosphaeria nodorum SN15] gi|160705149|gb|EAT77082.2| SNOG_15417 [Phaeosphaeria nodorum SN15]
  misc_feature (6)..(319): NCBI GI: 261822253 Blast Desc: extracellular solute-binding protein family 1 [Pectobacterium wasabiae WPP163] gi|261606266|gb|ACX88752.1| extracellular solute-binding protein family 1 [Pectobacterium
MIATALIPLVALGAGLTSAYDTTLGFKGAPEIENRTIDEIYSAAVAEGGIVTLWHGGDETNQQDGLKQAFEARFPKMTLNVTVDLSKYHDGNIDRQLATGDLCVDSVAIQTLHDFPRWDEAGALLHYMPLNFDKVWPSFRDPRGAWHGTSVFAWSFLWNTDRVEEGPREFEDFLKPEFKDKIVLTYPNDDDAVLFAFDLILQQYGYEWFEALRKQNVRWVRGTGTPLTLVSQSNSTSSVTFTSDAGLTPSKPIGIAFPTKGQFVTWPQRGGILKDAPHPEGAKLLHNFFLSDEYQNLTNSWSVRSDIPGSEGLCRTCRYSIDEYR

SEQ ID NO: 28737 - DNA, 3113 bp, Muscodor strobelii
  misc_feature: SGI EST ID NO. CUFF.67755.0
  misc_feature: Variant of the nucleotide sequence at SEQ ID NO 28735
cgcggctatattccgctatagcggtaacagaattgagtcagtcaaatcgctgcgcagtttacattcctactgatcagaggccaggattcctgcaagaatttgattgttcaccgctttccctcgattatatgtacaactttctattattacaacaagggtaacgttactagaaatttgacaataatggttgagctctcacgcgccttcatccttcgtctcagctgcactttcaacccgacgtctgtgatctcgtagcgaatgatcattcaccagtccactcggtccataaaagcctggttatcacactcaagcagacaaaaagaacagtttcgctgaacctcatgctcgagacagatctctatttaaatgataataaggacgtcacaggtttcgatacgtgaaagttgataatagattcgcgcggagatctgacatggtcttatgagtgattaaataattgttccgactgcgggtcacaggtattagtcaccattggtcatctacttacacggtttttctgcactggagacttcatcgtcaatatgtaatgcttttgaaagcattcgtaatgtttaactttctccaatgccgaaataacaggttaattagctatgcttgctaggagggattaacaagctaacaattaccttcctgcctgtccccgacacgtgccctcaggtacttattacttacccgatatttgctacgttataactttggtacttttcaagctatctatgccgtatgtttttctacatccgagataatagaaaaaaaatggccaaaagggccggctaaggcgatggtccgactgtaagggacggcggccgagtggcaaaggtccaacacgcctcagctttggagaaagtaattgcgggaggaagtattgtggcgtatatagcttgaaaagtaccaaacatgaagttatagcgtagaaagtgtcgggtactagtaagtggtaagtggagcaagtgtcggggataggcgggaagggaattgttagcttgtctgtatacgcgcttgccaatgaatttgttactgagcgcgtggatcatcccacatagagagccggtagaggtttagtcacgatagcgtcattaacgaggctgattcctgcgatccggacacgacctcgtctcgcgttgcggtgaagactaactcaacaccagggaagcacgggggctatcaacatccatatacctcaagatgatatataaattgcccggacccaggtgatgtcgcttgatgtcactatcacgatcaacccattcatactgcatcccgacttgcgcatcttcaccatgatcgcaaccgcactcatccccctcgtggctctcggcgcgggcctcacgtcggcttacgacacaaccctaggcttcaaaggtgcaccagagatcgagaatcgaactatcgatgagatctatagcgctgccgtagctgaaggcgggatagtaaccctttggcatggcggcgacgagaccaaccaacaagacggtctaaagcaagccttcgaggcgcgcttccccaagatgacccttaacgtgaccgtcgacctttctaagtaccacgacggcaacatcgaccgccaactcgccacgggcgacctctgcgtcgacagtgtcgccatccagacgttacacgacttcccgcggtgggacgaagcaggtgcgctgctgcattatatgccgctgaattttgacaaggtctggcccagtttccgggaccccagaggcgcgtggcatggcacctcggtgtttgcttggagctttctgtggaatacggatcgcgtggaggaggggccgcgggagtttgaggatttcttgaagccggagtttaaggacaagattgtgttaacttatccgaatgatgatgatgctgttctttttgctttcgacttgatcctgcaacaatacgggtatgaatggttcgaagcgctccgcaaacaaaacgttcgctgggtccgtggcactggaactcctctcaccttagtgagccaaagtaactccacgtcgtccgtgacattcacctcggacgctggattaacgccctctaaacctatcggcatcgcattccccacgaaaggacaattcgtcacctggccgcaacgaggcggaattctcaaggacgcaccgcatcccgaaggcgccaagctgctgcataacttcttccttagcgatgagtaccagaacctaacgaactcgtggagcgtacgctctgatatcccgggctccgaagggttatgccgaacttgccgatatagcatcgacgaataccgatgagttcgggaggtggatgatggatcgagggcgtgttgaacgactgagattcttctttgaggataagttgggcactgcccaaggtttgagcccccttaaggatgacttgtgatgaggtttggacttggaacatttggggcgcgttggaggggcaagactcccgaagccgtccgaagatgttttccccagtgcaaagcagaaaacaatggtttggtcaaagtggcgggcgggatcttggcataataatggatacctatcttaattacgatgtaaggtgaatagaaccaaatgcaacccgcacaccaagtcgatcactctcccgggttcgttaagtctagcgacaaaagtgttctgtctgtattggacgactacctatctccgctgcaactattgatgtaaatcgtgcgtaagtgccctgtgtgggcaactacatttccactctggaccaaaacctcaaagaacgagttctgtgcatcccattgtttaaaaaaactctattatgccttatacccatccctcgcgaagcaaagccctaacgtccgtgacattgcatttactgaatcgcctaccaaaaaaataagaattgtctagtcatactgaaagtgatagaaaaacatggaaacgcgaaagttgtctggagagattatggtgagctaggagtaggtgaattcggaacaggccgattacagcgcggaatcctcctaggcctgagatcgtatctttttgcggcccaacggccacgcagagcactaagaccttggggtttccgcttggggcggcgcgaccattgttcgtaggtgtcgtggtagacacttggccctgtcttcaattgggttg

SEQ ID NO: 28738 - DNA, 678 bp, Muscodor strobelii
  misc_feature: SGI cDNA ID NO. 569860
  misc_feature: Encodes the peptide sequence at SEQ ID NO 28739
atgtctcctcccactagctcacaaagcagccgaaagccttataaggcggcacagaggcagcagactatcaagcgcagagcggggagacgcacccgcggagagcagttagacatcgatagagaagaatatcccagcgatgtagaaaccgttgtcattggtaaaaacaagtcaaagccccaaggcaatcgccaaacgcagtcgtcctctgaagttaaaggcaaagagtctgccgctgcggcccacaagacgctcgcgacctactccgtgatggatactaagggctttgatttctcggcacttcctgaacatctccagaacgcccctatggaacagcgtattgagcactgcagacaaacgcgagcggctttggcaagtcttaataccgcggctttcaacatgctgaacaacttgcagaatgatctcaatgcatggctctcggacgaaaacacagcagaacccccgccagaggccactaactcttcgtctattgacgaaaataacgggctttttgtggatgaccacaaacctcgccagacaagcagctcagactacaaaggcccaatcatctgcccaatgcctcgcagaatggccgcgagccctgagagtctcgagaagaccccccagcccaagacccccccagcccgaggactctggatccgagttcaactggaaacgtga

SEQ ID NO: 28739 - protein, 225 aa, Muscodor strobelii
  misc_feature: SGI Peptide ID NO. 569860
MSPPTSSQSSRKPYKAAQRQQTIKRRAGRRTRGEQLDIDREEYPSDVETVVIGKNKSKPQGNRQTQSSSEVKGKESAAAAHKTLATYSVMDTKGFDFSALPEHLQNAPMEQRIEHCRQTRAALASLNTAAFNMLNNLQNDLNAWLSDENTAEPPPEATNSSSIDENNGLFVDDHKPRQTSSSDYKGPIICPMPRRMAASPESLEKTPQPKTPPARGLWIRVQLET

SEQ ID NO: 28740 - DNA, 406 bp, Muscodor strobelii
  misc_feature: SGI EST ID NO. CUFF.67731.0
  misc_feature: Variant of the nucleotide sequence at SEQ ID NO 28738
cagcgatgtagaaaccgttgtcattggtaaaaacaagtcaaagccccaaggcaatcgccaaacgcagtcgtcctctgaagttaaaggcaaagagtctgccgctgcggcccacaagacgctcgcgacctactccgtgatggatactaagggctttgatttctcggcacttcctgaacatctccagaacgcccctatggaacagcgtattgagcactgcagacaaacgcgagcggctttggcaagtcttaataccgcggctttcaacatgctgaacaacttgcagaatgatctcaatgcatggctctcggacgaaaacacagcagaacccccgccagaggccactaactcttcgtctattgacgaaaataacgggctttttgtggatgaccacaaacctcgccagaca

SEQ ID NO: 28741 - DNA, 1497 bp, Muscodor strobelii
  misc_feature: SGI cDNA ID NO. 569861
  misc_feature: Encodes the peptide sequence at SEQ ID NO 28742
atggctcccccaaaggcagcgctcgacttccttgagttcgtcaacgcatctcccactccttatcatgccgtccactcggctattgctcgcctggagaaggctggcttcattcccgtcaaagagcgggacaactggtcttccacgctgaagcccggtggcaaatattacatgacgcgcaatggctcaaccattgtagcgttcgccattggtgccaagtggaaacccggaaaccctattgccatgctcggcgctcacacggactctccctgcctgcgtgtcaagcccgcaagcaagaagaacggcgtgggcttcatgcagatcggtattgagacctacggcggtggcatctggcacagctggtttgacagagatctctcgcttgccggccgagttcttgtcagagatggcaagggaaactttgtccaaaagcttgccaagatcgacagacccatcatccgcattcctacgctcgctattcacctggatcgctcgtccgagttcaaccctaacaaagaaaccgaactgttccctatcgccggcatggtcgccgccgagctaaacagaacgggcaagactgagcaaaccaaagactcggaggcggacgagagccgcgacgagacgttccagccattgaaggacatgggggaccgccaccacccatacgttctcgagctcgtcgccgagaacatcggggtcaaggttgaggacatagtcgattttgagttagttctctacgacgtccagaaatcttgcctcggtggtttgaatgaggaattcatttactctgcaagactcgacaacttgaacatgacatactgcagcgtcatggggcttattgaatcggttgagagttccagcttagatgacgagacttcgatccgtctcatcacttgcttcgatcatgaagaaattggttcgacctctgcgcaaggcgctaattccgacctcttgcccgccgttgtgcgccgactgtctattcttgcaggtagccgccacggcgatggcatgtccgataaatcatgggaacacatcagctctgacccggatatcgacctaacgactgcctttgaacagtccatggctgtctcattccttgtctccgctgacatggcccactccgtgcatcccaattatgttggcaagtatgagtcgaaccaccagccagaaatgaacaaaggtactgtcattaaaatcaacgcaaaccagcggtatgcgaccaactcgcctggaattgtgcttctccaagagatggccaagcgagctagcgtacccttacagctattcgtggtgagaaacgactcatcttgtggtagcaccattggtccaatgctatctgccaaaatgggcgttcgtacactggatctaggcaacccacaactaagcatgcacagtatcagggaaaccggcggaacttacgatgttgagcatgccataaaactattcaagtcttacttgtcaaactactcggagctcgaatcaaaaatctttgtagactag

SEQ ID NO: 28742 - protein, 498 aa, Muscodor strobelii
  misc_feature: SGI Peptide ID NO. 569861
  misc_feature (13)..(485): Pfam Id: PF02127 Pfam Desc: Aminopeptidase I zinc metalloprotease (M18)
  misc_feature (13)..(330): Pfam Id: PF02127 Pfam Desc: Aminopeptidase I zinc metalloprotease (M18)
  misc_feature (350)..(485): Pfam Id: PF02127 Pfam Desc: Aminopeptidase I zinc metalloprotease (M18)
  misc_feature (1)..(498): NCBI GI: 39969031 Blast Desc: conserved [Magnaporthe grisea 70-15] gi|59803056|gb|AAX07699.1| aspartyl aminopeptidase-like protein [Magnaporthe grisea] gi|145021304|gb|EDK05433.1| conserved grisea
  misc_feature (7)..(498): NCBI GI: 156051810 Blast Desc: SS1G_07312 [Sclerotinia sclerotiorum 1980] gi|154705090|gb|EDO04829.1| SS1G_07312 [Sclerotinia sclerotiorum 1980]
  misc_feature (1)..(498): NCBI GI: 261354054 Blast Desc: aspartyl aminopeptidase [Verticillium albo-atrum VaMs.102]
  misc_feature (1)..(498): NCBI GI: 46124555 Blast Desc: FG06655.1 [Gibberella zeae PH-1]
  misc_feature (1)..(498): NCBI GI: 164428861 Blast Desc: aspartyl aminopeptidase [Neurospora crassa OR74A] gi|157072312|gb|EAA28010.2| aspartyl aminopeptidase [Neurospora crassa OR74A]
  misc_feature (1)..(498): NCBI GI: 256732839 Blast Desc: [Nectria haematococca mpVI 77-13-4]
  misc_feature (5)..(498): NCBI GI: 189201814 Blast Desc: aspartyl aminopeptidase [Pyrenophora tritici-repentis Pt-1C-BFP] gi|187984342|gb|EDU49830.1| aspartyl aminopeptidase [Pyrenophora tritici-repentis Pt-1C-BFP]
  misc_feature (5)..(498): NCBI GI: 169767798 Blast Desc: [Aspergillus oryzae RIB40] gi|238484707|ref|XP_002373592.1| aspartyl aminopeptidase [Aspergillus flavus NRRL3357] RecName: Full=Aspartyl Short=DAP
  misc_feature (5)..(498): NCBI GI: 121705172 Blast Desc: aspartyl aminopeptidase [Aspergillus clavatus NRRL 1] gi|119398995|gb|EAW09423.1| aspartyl aminopeptidase [Aspergillus clavatus NRRL 1]
  misc_feature (1)..(498): NCBI GI: 116191861 Blast Desc: CHGG_05648 [Chaetomium globosum CBS 148.51] gi|88181561|gb|EAQ89029.1| CHGG_05648 [Chaetomium globosum CBS 148.51]
  misc_feature (5)..(498): SWISSPROT Homolog: EC 3.4.11.21 Aspartyl aminopeptidase
MAPPKAALDFLEFVNASPTPYHAVHSAIARLEKAGFIPVKERDNWSSTLKPGGKYYMTRNGSTIVAFAIGAKWKPGNPIAMLGAHTDSPCLRVKPASKKNGVGFMQIGIETYGGGIWHSWFDRDLSLAGRVLVRDGKGNFVQKLAKIDRPIIRIPTLAIHLDRSSEFNPNKETELFPIAGMVAAELNRTGKTEQTKDSEADESRDETFQPLKDMGDRHHPYVLELVAENIGVKVEDIVDFELVLYDVQKSCLGGLNEEFIYSARLDNLNMTYCSVMGLIESVESSSLDDETSIRLITCFDHEEIGSTSAQGANSDLLPAVVRRLSILAGSRHGDGMSDKSWEHISSDPDIDLTTAFEQSMAVSFLVSADMAHSVHPNYVGKYESNHQPEMNKGTVIKINANQRYATNSPGIVLLQEMAKRASVPLQLFVVRNDSSCGSTIGPMLSAKMGVRTLDLGNPQLSMHSIRETGGTYDVEHAIKLFKSYLSNYSELESKIFVD

SEQ ID NO: 28743 - DNA, 3088 bp, Muscodor strobelii
  misc_feature: SGI EST ID NO. CUFF.67735.0
  misc_feature: Variant of the nucleotide sequence at SEQ ID NO 28741
tcgatttgttacgacccttacttgtacagtgtccaaatgtctaaccgaggttgccaacatcaaacgatgccaacacaagtcgacaagaaagcctcgagtcaatgaagtgacagcgtgttggtgcgacaaacaggcgataaagcgttgcaagctgggtcttggccctctcttcaccgagatggaacagcagataaccaatcaaggcgagttgttcctctgcctgtgctcgttggtcgctcgtcgcattcttcgctgaggaatgattgaatgatgacagggctcaagtcagcgaatggtgggctgtatctagcgatctacatgtgtgtaataggttgcctctgatgtgggtagcctgaggacgcaaagttgttggccctgtgaacacatacaacgaataatcaaacatatcttacggacgcggggcaacataacaataaccagtgtatgaggtcttatcatcatcttctagaacgtattcttgttacggagtagccgtgtcatcatgacaaagaaaatgtcataggttgggcctgttggcagacgtccttggctttggctcagcttagaggtatacatactatccccgttcgtgtgctaagaactagatatgagtaagctggagatcaaggtggtgtagaccgatagtgaggtgcggtatgtgttggattcaaatgcacaagtgcaacatatgcttgcggcatggtcaagcagtggcccggtgcaagtcggtctgcgagctttgaggtgaaaagatcaaagtgaaacactcgcgacactacaaacccccaacccaacggtgccctacggagtaccttgctagtgtgtggacaatggctcgacgaggtgggtggcgggaataggcaactcggcgacggccagacgcccgacattgactcggttgacagagatgcggaacgactagtagatagggcctcgagcttacctggtagtccaccgactaagccagattaagaagctccacggccccaagatctacgcaattgcaggcgccacttcagacgacatagcaacaatcggtagcaaatagatattgggagtctgcgcctctgcaacatcattatcaccaacaatcgacgagtctagcttgtgctgatatccatccgacctttcgccgcgctagcccaacagcttcgtagatgaacatcggagtccgacgctttgccggcctacactccgttcgactctctagcttgtccgtcaccaccttcaccactcggcctctacctcagataggacggacgctgctctgccggaatacagctctcactgttgctattccgtgtctcgcgacatctcgcttcaccagctcggtacacagcatggctcccccaaaggcagcgctcgacttccttgagttcgtcaacgcatctcccactccttatcatgccgtccactcggctattgctcgcctggagaaggctggcttcattcccgtcaaagagcgggacaactggtcttccacgctgaagcccggtggcaaatattacatgacgcgcaatggctcaaccattgtagcgttcgccattggtgccaagtggaaacccggaaaccctattgccatgctcggcgctcacacggactctccctgcctgcgtgtcaagcccgcaagcaagaagaacggcgtgggcttcatgcagatcggtattgagacctacggcggtggcatctggcacagctggtttgacagagatctctcgcttgccggccgagttcttgtcagagatggcaagggaaactttgtccaaaagcttgccaagatcgacagacccatcatccgcattcctacgctcgctattcacctggatcgctcgtccgagttcaaccctaacaaagaaaccgaactgttccctatcgccggcatggtcgccgccgagctaaacagaacgggcaagactgagcaaaccaaagactcggaggcggacgagagccgcgacgagacgttccagccattgaaggacatgggggaccgccaccacccatacgttctcgagctcgtcgccgagaacatcggggtcaaggttgaggacatagtcgattttgagttagttctctacgacgtccagaaatcttgcctcggtggtttgaatgaggaattcatttactctgcaagactcgacaacttgaacatgacatactgcagcgtcatggggcttattgaatcggttgagagttccagcttagatgacgagacttcgatccgtctcatcacttgcttcgatcatgaagaaattggttcgacctctgcgcaaggcgctaattccgacctcttgcccgccgttgtgcgccgactgtctattcttgcaggtagccgccacggcgatggcatgtccgataaatcatgggaacacatcagctctgacccggatatcgacctaacgactgcctttgaacagtccatggctgtctcattccttgtctccgctgacatggcccactccgtgcatcccaattatgttggcaagtatgagtcgaaccaccagccagaaatgaacaaaggtactgtcattaaaatcaacgcaaaccagcggtatgcgaccaactcgcctggaattgtgcttctccaagagatggccaagcgagctagcgtacccttacagctattcgtggtgagaaacgactcatcttgtggtagcaccattggtccaatgctatctgccaaaatgggcgttcgtacactggatctaggcaacccacaactaagcatgcacagtatcagggaaaccggcggaacttacgatgttgagcatgccataaaactattcaagtcttacttgtcaaactactcggagctcgaatcaaaaatctttgtagactagagatcgacttaagtttacaacattgaatacgattgatcatgcctcgttcatacgcataggagtattcgaaggtcaataggaaaataatattctctcttcaatccatcagctagcgtccctctactagtgataggcgtaaggtaaattggctcacattactttacctttagagcttcatggcgagccaaaagttaaataatattgacctttctccgtatctacgattttcggatatataagaatggtgctcg

SEQ ID NO: 28744 - DNA, 4281 bp, Muscodor strobelii
  misc_feature: SGI cDNA ID NO. 569862
  misc_feature: Reduced expression when VOC is produced
  misc_feature: Encodes the peptide sequence at SEQ ID NO 28745
atggcccacatgggcgctggcggcgcccagcagccaaacagaatgggcaattcgcagttgcacgcactggtttaccaccagcttacggccacaacaggaccaactcttccctggcataaccaaataaagatgaacacgcgcgttggcaacgtcatgaacatgctcacgcagatgagatgtcacagcatcacgaataccttcctggctacacctgccagcgaaaacagccaagtcgtatcaatgggccttacgtatgagcgcgatgcttacaacggctcctcagataagactacatacgataagaggatacaggcgcgcatcaatgaactattcgcgatacgccaggcgaacgaacacaacttgcagaataccttgagcgcgcaggctgccgctcaagcccaagcacagaaccaagcgcaaatgatagcgaaccagcagaacatgcagatgcggatgggtcaacaggcacaacaaggttttcaaaatctaccgcaacacatgcagccttcgccaatgcgtcaacccggccagcctgggatgcccatgggcacccccaatggtttcatgatgaatccgaaccagcaatctctacagcagcagatgggcgggcaaatgcaaccccaagtcccgatgcagtctcctatggccaacatgaccgcgcaagaccggatgagactgacccagttagccatcaacaagttccaatcgatagctccagcgcagcgggaccaaatgcgtgctgtggtacagtccaaaatgtcaccccagcagatacaacacctcgcccagcaaaaacaagatccactgatgttcttcttgcaaactcagatagtcaacaccacaaaggcaagtcagaccgcgatggccatgcagggtcagccgccacgacagatggctcatgccgggcagcagatgccaaacggagcaaatggagagtatggtcagttttcaaacgtcgaaagcatcatgaaccaacagaaggcggggttccaggcccaacaagaagggcagacagtggttccagccagcagtagtgccggtcgcacttctaccccccagcccatgggctctttgcctggtcctgctcagggatctggccagccgggtctccctcaccagatgcctcagcatttcaatcatcagcaaggacagcagttgaaaatggaccaaagggctgcggatcagagagctgctcagacacaagcacagataagagcacaggcgcatgcaaagcaacaaatgcaacaaggtcaacccggtggattcaatggagtaggcgtgtcccagagccctggcatgagcaatttgaatgctccagttcgacgacctcccatgggaatgggtcaagctgagcaacatccccaaatgggccaagccaacggtccattcgggaaccagatgttggatcctcgtttcaatcagatgggacagcgtccaggtatgggtggcaacagcatgactcgaaatcaattgctgcaggccatggtcagtcagatgcccccagagacgcgtacccagatcttgaaccagccacccgacaaagtgaatgccatgcttatgcaatggatacaatccaagaaagccgccggacagatggcaggtcgtcctcagcaacagcttggacagccagcacctggcaatcccatgaaccagttcaaccccggaatgaataacatgggtcaacaggtcaattcggggccaccaatgaatcaaccaaaccagcagctgttaccgcatcagctcaacaacaggttgaacacacccggtgcgccacagcctatgaaccagcaagtcctaatggacaatatgcccataccggccaaagtactagagtctctcaaaccacacgtcccgcaaggagagctacctcctgagctaaagaaatggggtcatctcaggcagtggatagcgtccaagaatctcaacccgcagatggtccagagtctcttatcgttccaggccgtccaatttaacagtcttctgtctaagaatccagcgattgcggggggacaactcgtcaatcagccgaacattccacaggccacagcaaaccagcctggcgtcacggcgcccaatatggctggactcaaccagccagttgtgatcacccccgaggaattggctcacttaagaaatcacgagagattccggggcttaccagacgaacagatacggcaagttgcaaccagaataaagatgcagcaacaacgagccaaggcacaaggtggccaaggccaggttccactccatgtcacgccagcgtcccaacctgcgaacgcgatgccaaccgccacttcgcaggcggccaatggagccaatggagtgcaacgacagcagaacactgcgactgatgatgccaccgccaattcaacaggccctggtcggaataacaagcaacctcagaacagccgagcagtgacgaacacacctgtaggttcggcaccaaagagcggtaccaaacggcccagcacggacgaggtagttgaaatcccgaatccctcaacgaccacagcccagcggccaccttcccagcaacaaagcaaggtgccaactgcaacaaatccaccccaaattccgcactttacagctcagcaacttgcaaacatggcccctgaacaaagaatgaagtatgaagccatgatgaagagccgccaacccgctggtcctgctgctgccgccgccgccgcagccagtaacacgcccgagatggtcaaattaaggcaaataggccaagagcagcatcttgcatcgtcccaagagcaacttcctgacataccaatgacacctgagcaatatgaagaagtgaagcagaggatcttgtcgttggttgctgagatgagtaaactgagcaaagttttgggccgctggtacacatatactcgagatgataaccgcgctaaactcttcttcaagatgcgcctgcaccttctgaagcagtttgtgaactctagtgacttgacggcattaaagccgacattgtcaatatccgcatcagacctcgatagaatgaagtcaatgctcgagagcatggcgaaggatgtggcaaaacttaagaaggaacaagacgagcaaaatggtaccgcgccgcaggcagcaccggcccagagcaccatctcaactggccagcctgcgcctctcagcgctgcgaatttggaaaagaacacacaggcactaaacaaagcccaccaaaggaacagcagcaaggcagggcaaccgccagcagcgcctactacctcacaaccgccattctcgtttggggcccaatcgccaaacggtcagccaatctatgtaggacagcctaccgtcactcaggaacacttgcatatacccgcgcgcaagaagcctaggatcggcaatcaaccgggatccagttcgaacggacccagtgctaatgcgtcgcctcaggtgtcgaaactaacgtctcctgaaatgatcaagcgaacaacgagcactgattccaaacaggctcgtaaattcccatgtacggaacagaactgcgaattcagtagcattggtttcgctactgaagaagctcggcgcaagcatatggacgaagaacatatttggcccgcggaagatccccagaagttcgttgccgaaaacctggtcaaagctcttggtttcgatgcggatagcaggtcgaagaaactacaagctatcaacccgcaatcccaaacagcgacaggtataccagcaccagcatcagccgctcgtggatcgccgatgggaaggcaggagagcggtacgggctcaaagccaaatgaaatgaccaaatcggctgctctcaagactggaacacctcaacaggattccggacagaaatcattggatcatatggctcccgttggcgttggaatgctcgccggttccaaggtagaagtcaatggtgccacaatcgacccccaagatctttttgctgtcggtgggctggagataggaggcggcggcgcaatctctgatatgagcgtgtatcgagctatcacgcctcgtgatacgcccgaatcaagcaaagacagtgcagcatccgaaccaatcagtgatttgtccgatggcgttgccctcaatgtcaatgtatcgatagacatgggcttcgatacttggcatccatttgatggacatcacttccacgagtcaatccagcctcatgttgaaccaggtatttttgacgacatgtcgtcgagtaactacttggacctcaactgggacgaggtcaacattgattttgacaagccattcgtgttagatacgtcattattttcgctggacattgcggagtcatga

SEQ ID NO: 28745 - protein, 1426 aa, Muscodor strobelii
  misc_feature: SGI Peptide ID NO. 569862
  misc_feature (792)..(1423): NCBI GI: 261354052 Blast Desc: conserved [Verticillium albo-atrum VaMs.102]
  misc_feature (416)..(1424): NCBI GI: 156051806 Blast Desc: SS1G_07310 [Sclerotinia sclerotiorum 1980] gi|154705088|gb|EDO04827.1| SS1G_07310 [Sclerotinia sclerotiorum 1980]
  misc_feature (600)..(1423): NCBI GI: 154315398 Blast Desc: BC1G_04738 [Botryotinia fuckeliana B05.10] gi|150847701|gb|EDN22894.1| BC1G_04738 [Botryotinia fuckeliana B05.10]
  misc_feature (798)..(1426): NCBI GI: 256733299 Blast Desc: NECHADRAFT_92970 [Nectria haematococca mpVI 77-13-4]
  misc_feature (799)..(1417): NCBI GI: 46124551 Blast Desc: FG06653.1 [Gibberella zeae PH-1]
  misc_feature (855)..(1422): NCBI GI: 171686944 Blast Desc: protein product [Podospora anserina] gi|170943433|emb|CAP69086.1| protein product [Podospora anserina]
  misc_feature (932)..(1422): NCBI GI: 85084068 Blast Desc: NCU00124 [Neurospora crassa OR74A] gi|28918336|gb|EAA28012.1| [Neurospora crassa OR74A]
  misc_feature (1)..(663): NCBI GI: 256733299 Blast Desc: NECHADRAFT_92970 [Nectria haematococca mpVI 77-13-4]
  misc_feature (856)..(1422): NCBI GI: 145614370 Blast Desc: MGG_11346 [Magnaporthe grisea 70-15] gi|145021306|gb|EDK05435.1| MGG_11346 [Magnaporthe grisea 70-15]
  misc_feature (141)..(734): NCBI GI: 85084068 Blast Desc: NCU00124 [Neurospora crassa OR74A] gi|28918336|gb|EAA28012.1| [Neurospora crassa OR74A]
  misc_feature: Useful for introducing or modulating the production of volatile compounds
MAHMGAGGAQQPNRMGNSQLHALVYHQLTATTGPTLPWHNQIKMNTRVGNVMNMLTQMRCHSITNTFLATPASENSQVVSMGLTYERDAYNGSSDKTTYDKRIQARINELFAIRQANEHNLQNTLSAQAAAQAQAQNQAQMIANQQNMQMRMGQQAQQGFQNLPQHMQPSPMRQPGQPGMPMGTPNGFMMNPNQQSLQQQMGGQMQPQVPMQSPMANMTAQDRMRLTQLAINKFQSIAPAQRDQMRAVVQSKMSPQQIQHLAQQKQDPLMFFLQTQIVNTTKASQTAMAMQGQPPRQMAHAGQQMPNGANGEYGQFSNVESIMNQQKAGFQAQQEGQTVVPASSSAGRTSTPQPMGSLPGPAQGSGQPGLPHQMPQHFNHQQGQQLKMDQRAADQRAAQTQAQIRAQAHAKQQMQQGQPGGFNGVGVSQSPGMSNLNAPVRRPPMGMGQAEQHPQMGQANGPFGNQMLDPRFNQMGQRPGMGGNSMTRNQLLQAMVSQMPPETRTQILNQPPDKVNAMLMQWIQSKKAAGQMAGRPQQQLGQPAPGNPMNQFNPGMNNMGQQVNSGPPMNQPNQQLLPHQLNNRLNTPGAPQPMNQQVLMDNMPIPAKVLESLKPHVPQGELPPELKKWGHLRQWIASKNLNPQMVQSLLSFQAVQFNSLLSKNPAIAGGQLVNQPNIPQATANQPGVTAPNMAGLNQPVVITPEELAHLRNHERFRGLPDEQIRQVATRIKMQQQRAKAQGGQGQVPLHVTPASQPANAMPTATSQAANGANGVQRQQNTATDDATANSTGPGRNNKQPQNSRAVTNTPVGSAPKSGTKRPSTDEVVEIPNPSTTTAQRPPSQQQSKVPTATNPPQIPHFTAQQLANMAPEQRMKYEAMMKSRQPAGPAAAAAAAASNTPEMVKLRQIGQEQHLASSQEQLPDIPMTPEQYEEVKQRILSLVAEMSKLSKVLGRWYTYTRDDNRAKLFFKMRLHLLKQFVNSSDLTALKPTLSISASDLDRMKSMLESMAKDVAKLKKEQDEQNGTAPQAAPAQSTISTGQPAPLSAANLEKNTQALNKAHQRNSSKAGQPPAAPTTSQPPFSFGAQSPNGQPIYVGQPTVTQEHLHIPARKKPRIGNQPGSSSNGPSANASPQVSKLTSPEMIKRTTSTDSKQARKFPCTEQNCEFSSIGFATEEARRKHMDEEHIWPAEDPQKFVAENLVKALGFDADSRSKKLQAINPQSQTATGIPAPASAARGSPMGRQESGTGSKPNEMTKSAALKTGTPQQDSGQKSLDHMAPVGVGMLAGSKVEVNGATIDPQDLFAVGGLEIGGGGAISDMSVYRAITPRDTPESSKDSAASEPISDLSDGVALNVNVSIDMGFDTWHPFDGHHFHESIQPHVEPGIFDDMSSSNYLDLNWDEVNIDFDKPFVLDTSLFSLDIAES

SEQ ID NO: 28746 - DNA, 5404 bp, Muscodor strobelii
  misc_feature: SGI EST ID NO. CUFF.68247.1
  misc_feature: Variant of the nucleotide sequence at SEQ ID NO 28744
tggcgcagcaccgcttgagttgtttctttttcctctactcctcttcccaccgtaccacgcgcgccgtctctccacgccgtttgtctcctcgcccatattatgtgccatccgtccattgtcgaacatcagctcgtattccagctcgcaccacggcgccggggcctttgccgccttgttctactctcaccagcgcactgctaacctcctcgaggctgcctgccaggttaccagaacccatcgcgacacctgatatccacgtccatacttgtctttctattccatccgacgttcaactcgtccccgcgaaatcgaagcgaaccgccggaacgccgcatgcctaagactgattgaaagctatgtcgctttgagacacatctgaactaccacaagccggtctattcgttacggcgcccacctcgcgcgacgaggagcttagcccccgcggcgccagccttttgtcggctgactagtctgggacaacgaaggcaacgggaatttggaagaattacctgaggcgatggctgtcaacatggcccacatgggcgctggcggcgcccagcagccaaacagaatgggcaattcgcagttgcacgcactggtttaccaccagcttacggccacaacaggaccaactcttccctggcataaccaaataaagatgaacacgcgcgttggcaacgtcatgaacatgtaagcattgaactcaggaatcttgtccctgatcgcacggaactgtaccaggctcacgcagatgagatgtcacagcatcacgaataccttcctggctacacctgccagcgaaaacagccaagtcgtatcaatgggccttacgtatgagcgcgatgcttacaacggctcctcagataaggtagatgcagatccagtcccgtccgaacgctctatccactaacactcgctcaagactacatacgataagaggatacaggcgcgcatcaatgaactattcgcgatacgccaggcgaacgaacacaacttgcagaataccttgagcgcgcaggctgccgctcaagcccaagcacagaaccaagcgcaaatgatagcgaaccagcagaacatgcagatgcggatgggtcaacaggcacaacaaggttttcaaaatctaccgcaacacatgcagccttcgccaatgcgtcaacccggccagcctgggatgcccatgggcacccccaatggtttcatgatgaatccgaaccagcaatctctacagcagcagatgggcgggcaaatgcaaccccaagtcccgatgcagtctcctatggccaacatgaccgcgcaagaccggatgagactgacccagttagccatcaacaagttccaatcgatagctccagcgcagcgggaccaaatgcgtgctgtggtacagtccaaaatgtcaccccagcagatacaacacctcgcccagcaaaaacaagatccactgatgttcttcttgcaaactcagatagtcaacaccacaaaggcaagtcagaccgcgatggccatgcagggtcagccgccacgacagatggctcatgccgggcagcagatgccaaacggagcaaatggagagtatggtcagttttcaaacgtcgaaagcatcatgaaccaacagaaggcggggttccaggcccaacaagaagggcagacagtggttccagccagcagtagtgccggtcgcacttctaccccccagcccatgggctctttgcctggtcctgctcagggatctggccagccgggtctccctcaccagatgcctcagcatttcaatcatcagcaaggacagcagttgaaaatggaccaaagggctgcggatcagagagctgctcagacacaagcacagataagagcacaggcgcatgcaaagcaacaaatgcaacaaggtcaacccggtggattcaatggagtaggcgtgtcccagagccctggcatgagcaatttgaatgctccagttcgacgacctcccatgggaatgggtcaagctgagcaacatccccaaatgggccaagccaacggtccattcgggaaccagatgttggatcctcgtttcaatcagatgggacagcgtccaggtatgggtggcaacagcatgactcgaaatcaattgctgcaggccatggtcagtcagatgcccccagagacgcgtacccagatcttgaaccagccacccgacaaagtgaatgccatgcttatgcaatggatacaatccaagaaagccgccggacagatggcaggtcgtcctcagcaacagcttggacagccagcacctggcaatcccatgaaccagttcaaccccggaatgaataacatgggtcaacaggtcaattcggggccaccaatgaatcaaccaaaccagcagctgttaccgcatcagctcaacaacaggttgaacacacccggtgcgccacagcctatgaaccagcaagtcctaatggacaatatgcccataccggccaaagtactagagtctctcaaaccacacgtcccgcaaggagagctacctcctgagctaaagaaatggggtcatctcaggcagtggatagcgtccaagaatctcaacccgcagatggtccagagtctcttatcgttccaggccgtccaatttaacagtcttctgtctaagaatccagcgattgcggggggacaactcgtcaatcagccgaacattccacaggccacagcaaaccagcctggcgtcacggcgcccaatatggctggactcaaccagccagttgtgatcacccccgaggaattggctcacttaagaaatcacgagagattccggggcttaccagacgaacagatacggcaagttgcaaccagaataaagatgcagcaacaacgagccaaggcacaaggtggccaaggccaggttccactccatgtcacgccagcgtcccaacctgcgaacgcgatgccaaccgccacttcgcaggcggccaatggagccaatggagtgcaacgacagcagaacactgcgactgatgatgccaccgccaattcaacaggccctggtcggaataacaagcaacctcagaacagccgagcagtgacgaacacacctgtaggttcggcaccaaagagcggtaccaaacggcccagcacggacgaggtagttgaaatcccgaatccctcaacgaccacagcccagcggccaccttcccagcaacaaagcaaggtgccaactgcaacaaatccaccccaaattccgcactttacagctcagcaacttgcaaacatggcccctgaacaaagaatgaagtatgaagccatgatgaagagccgccaacccgctggtcctgctgctgccgccgccgccgcagccagtaacacgcccgagatggtcaaattaaggcaaataggccaagagcagcatcttgcatcgtcccaagagcaacttcctgacataccaatgacacctgagcaatatgaagaagtgaagcagaggatcttgtcgttggttgctgagatgagtaaactgagcaaagttttgggccgctggtacacatatactcgagatgataaccgcgctaaactcttcttcaagatgcgcctgcaccttctgaagcagtttgtgaactctagtgacttgacggcattaaagccgacattgtcaatatccgcatcagacctcgatagaatgaagtcaatgctcgagagcatggcgaaggatgtggcaaaacttaagaaggaacaagacgagcaaaatggtaccgcgccgcaggcagcaccggcccagagcaccatctcaactggccagcctgcgcctctcagcgctgcgaatttggaaaagaacacacaggcactaaacaaagcccaccaaaggaacagcagcaaggcagggcaaccgccagcagcgcctactacctcacaaccgccattctcgtttggggcccaatcgccaaacggtcagccaatctatgtaggacagcctaccgtcactcaggaacacttgcatatacccgcgcgcaagaagcctaggatcggcaatcaaccgggatccagttcgaacggacccagtgctaatgcgtcgcctcaggtgtcgaaactaacgtctcctgaaatgatcaagcgaacaacgagcactgattccaaacaggctcgtaaattcccatgtacggaacagaactgcgaattcagtagcattggtttcgctactgaagaagctcggcgcaagcatatggacgaagaacatatttggcccgcggaagatccccagaagttcgttgccgaaaacctggtcaaagctcttggtttcgatgcggatagcaggtcgaagaaactacaagctatcaacccgcaatcccaaacagcgacaggtataccagcaccagcatcagccgctcgtggatcgccgatgggaaggcaggagagcggtacgggctcaaagccaaatgaaatgaccaaatcggctgctctcaagactggaacacctcaacaggattccggacagaaatcattggatcatatggctcccgttggcgttggaatgctcgccggttccaaggtagaagtcaatggtgccacaatcgacccccaagatctttttgctgtcggtgggctggagataggaggcggcggcgcaatctctgatatgagcgtgtatcgagctatcacgcctcgtgatacgcccgaatcaagcaaagacagtgcagcatccgaaccaatcagtgatttgtccgatggcgttgccctcaatgtcaatgtatcgatagacatgggcttcgatacttggcatccatttgatggacatcacttccacgagtcaatccagcctcatgttgaaccaggtatttttgacgacatgtcgtcgagtaactacttggacctcaactgggacgaggtcaacattgattttgacaagccattcgtgttagatacgtcattattttcgctggacattgcggagtcatgatttcttactttatttcagttctttccggcctagcgacgtcttcactgttggaaaagctacaaggagcgcttgttattacatttggcctggtcctaataagcgcatcttccagatgtgctggtcttcgaagcgtcctggtacgtttcgatttgtgcaattaaggaatagcgagtaatcggaatgggtgttcaacggatgggaaaaacatatgggcgtgtagattcgcgaagtatgatggcgcttggcgtttcgattctacacattcggcctggagaaggatttatctcgttaatgagttcagtggaaaaggagataccgaacagatgatctatgtcatccacctaagatagggacgggggggactgtatatatgataatgacgagtgacacagcgatacccggctcgagcaatcaaaacagatgctttgattttaacattacagctacctttgtacaacaatgcaatgtgtaaacggaccaagtattaca

SEQ ID NO: 28747 - DNA, 1632 bp, Muscodor strobelii
  misc_feature: SGI cDNA ID NO. 569863
  misc_feature: Encodes the peptide sequence at SEQ ID NO 28748
atggaattaataaagctcatcttcatctcgctcgctgcggcgccagcgctagccacgcctttgccgatgctcgaaatcggtcccagcgttcctgagacggaactgctagttcgcgagggcatcaaattagcacagactcgagatcttgagaaacggattgaagcagaattttctttggacagaacgtggaataacgaggttctattcggtggatcttggaacgactcccagcccgatgaaggcacggcagagagcgcaaagctctcagtgacatgtctggaatgctatacacgcggcactgtgacagcgaagctcacagatcacgatatcttcaacccggctctgcgtttagagttttcagacgtcgaggcgtatgcatttcttggcgtggaagtgaacgcagcgcagacattctccctgactcttttctcgtccgatagtccgataggtatcggtatcacggggcttgatgtcggcgtggtgtttttcgtcgatcttgttttctctcttagcgaggaaatcgatctcacggccggttttcaggtccaggttcctaatgattcgtacctggaggctgatatctttggtggggatgttggggatagtttctttgagggcttgcagagccaatctcttcccgtgacggttgtctctgggaaagcaacattcaaggccgatcttagactgcgtgttcaagctggagctgaagctagtctggacatcttcggcattggcgctggcgctgttgttggtatctacgctaacatcattgagtttgtggctatcatcgaggagactccctcgtgtccgcttgaagccgatttttggtgggatttgaatgttggtgcttatgcacatctcgacgttgtcgttgattacacaacgctgggcccagtgccaacagtttctacaacactccttgctgcatcgacgtgcggtggttacgccatctactacaacgccatctactactccggtcatttcaagcaacctcactttcagcggatcatcttacgtaccggctacttcagcctcgagcggaagccccatctcaagttcagccctgtccacctcgatacctcagatcacttcgtctccactcccaaccctcagtattccaggtgctggctctggttactctgtctccaatatttcgattgctgcttcttacacatctacctcgaccatcatcacgacctctactccgacctcatcttattcttcagcaccaacctacacatcgacacacacctacacactgacacgctgcggtgcaccgggagcgatgaactgccccgcttcgtaccaatccacagtcgtcgtgacacgcacaagcacatattgcccgggggcaacctcaacagtcgccgcgggcaaggggtacccaatcccatcttcatcacactacgccgtcagcaccgcggtcattgtcctcacgcccctccccactcccattaccgcaaccttcacagcagcgccaacaacggtcggtggtgtaaaggctcaagcggagtcctcgagctatgtaactcagacatcgacctcgacgataacagtgacgcaatccgtgatcccatcatcaacatacattcctatagacacttcaacatacacaccctccaagtctcctag

SEQ ID NO: 28748 - protein, 543 aa, Muscodor strobelii
  misc_feature: SGI Peptide ID NO. 569863
  misc_feature (44)..(309): NCBI GI: 46127191 Blast Desc: FG07973.1 [Gibberella zeae PH-1]
  misc_feature (117)..(301): NCBI GI: 154323668 Blast Desc: BC1G_00233 [Botryotinia fuckeliana B05.10] gi|150842462|gb|EDN17655.1| BC1G_00233 [Botryotinia fuckeliana B05.10]
  misc_feature (87)..(312): NCBI GI: 256722894 Blast Desc: [Nectria haematococca mpVI 77-13-4]
  misc_feature (115)..(309): NCBI GI: 256720765 Blast Desc: NECHADRAFT_101767 [Nectria haematococca mpVI 77-13-4]
  misc_feature (156)..(306): NCBI GI: 156056965 Blast Desc: SS1G_04213 [Sclerotinia sclerotiorum 1980] gi|154701999|gb|EDO01738.1| SS1G_04213 [Sclerotinia sclerotiorum 1980]
  misc_feature (37)..(310): NCBI GI: 46115352 Blast Desc: FG03518.1 [Gibberella zeae PH-1]
  misc_feature (115)..(313): NCBI GI: 189201047 Blast Desc: conserved [Pyrenophora tritici-repentis Pt-1C-BFP] gi|187983959|gb|EDU49447.1| conserved [Pyrenophora tritici-repentis Pt-1C-BFP]
  misc_feature (105)..(317): NCBI GI: 169618213 Blast Desc: SNOG_12296 [Phaeosphaeria nodorum SN15] gi|111058989|gb|EAT80109.1| SNOG_12296 [Phaeosphaeria nodorum SN15]
  misc_feature (37)..(236): NCBI GI: 261356440 Blast Desc: conserved [Verticillium albo-atrum VaMs.102]
  misc_feature (116)..(314): NCBI GI: 67526125 Blast Desc: AN3520.2 [Aspergillus nidulans FGSC A4] gi|40739891|gb|EAA59081.1| AN3520.2 [Aspergillus nidulans FGSC A4] gi|259481965|tpe|CBF75982.1| TPA: conserved [Aspergillus FGSC
MELIKLIFISLAAAPALATPLPMLEIGPSVPETELLVREGIKLAQTRDLEKRIEAEFSLDRTWNNEVLFGGSWNDSQPDEGTAESAKLSVTCLECYTRGTVTAKLTDHDIFNPALRLEFSDVEAYAFLGVEVNAAQTFSLTLFSSDSPIGIGITGLDVGVVFFVDLVFSLSEEIDLTAGFQVQVPNDSYLEADIFGGDVGDSFFEGLQSQSLPVTVVSGKATFKADLRLRVQAGAEASLDIFGIGAGAVVGIYANIIEFVAIIEETPSCPLEADFWWDLNVGAYAHLDVVVDYTTLGPVPTVSTTLLAASTCGGYAIYYNAIYYSGHFKQPHFQRIILRTGYFSLERKPHLKFSPVHLDTSDHFVSTPNPQYSRCWLWLLCLQYFDCCFLHIYLDHHHDLYSDLILFFSTNLHIDTHLHTDTLRCTGSDELPRFVPIHSRRDTHKHILPGGNLNSRRGQGVPNPIFITLRRQHRGHCPHAPPHSHYRNLHSSANNGRWCKGSSGVLELCNSDIDLDDNSDAIRDPIINIHSYRHFNIHTLQVS

SEQ ID NO: 28749 - DNA, 2468 bp, Muscodor strobelii
  misc_feature: SGI EST ID NO. CUFF.67784.0
  misc_feature: Variant of the nucleotide sequence at SEQ ID NO 28747
ctgagccttatgtgccctggtccggagtactgggtcacctgcagtgtagttagagcgaatggaatgagtggttgttggtccggtcagcgatcggcagagggctctctgccttgcgagaagttgtggcatgcctgccatgttttaaggtataggtgtgagatataagatctgtctcccctgggtgtcgtgtaaatactcgatgaattccacaagcattctcttgaggaccgtacgcctcattcgtcgttctttataggctattgggccgtgtcattcctttttgatatattgctgatgcactgaaaaactcgtgtactggaaattgtcacaagaaaccactacacactcattcactcctctacaagaagcatcattaacacagtcattcttttgaaatctcacgatggaattaataaagctcatcttcatctcgctcgctgcggcgccagcgctagccacgcctttgccgatgctcgaaatcggtcccagcgttcctgagacggaactgctagttcgcgagggcatcaaattagcacagactcgagatcttgagaaacggattgaagcagaattttctttggacagaacgtggaataacgaggttctattcggtggatcttggaacgactcccagcccgatgaaggcacggcagagagcgcaaagctctcagtgacatgtctggaatgctatacacgcggcactgtgacagcgaagctcacagatcacgatatcttcaacccggctctgcgtttagagttttcagacgtcgaggcgtatgcatttcttggcgtggaagtgaacgcagcgcagacattctccctgactcttttctcgtccgatagtccgataggtatcggtatcacggggcttgatgtcggcgtggtgtttttcgtcgatcttgttttctctcttagcgaggaaatcgatctcacggccggttttcaggtccaggttcctaatgattcgtacctggaggctgatatctttggtggggatgttggggatagtttctttgagggcttgcagagccaatctcttcccgtgacggttgtctctgggaaagcaacattcaaggccgatcttagactgcgtgttcaagctggagctgaagctagtctggacatcttcggcattggcgctggcgctgttgttggtatctacgctaacatcattgagtttgtggctatcatcgaggagactccctcgtgtccgcttgaagccgatttttggtgggatttgaatgttggtgcttatgcacatctcgacgttgtcgttgattacacaacgctgggcccagtgccaacagtttctacaacactccttgctgcatcgacggtgtctacatgtttgatcgagggaggctcaccgactcagacttcttcaatcagtgcggtggttacgccatctactacaacgccatctactactccggtcatttcaagcaacctcactttcagcggatcatcttacgtaccggctacttcagcctcgagcggaagccccatctcaagttcagccctgtccacctcgatacctcagatcacttcgtctccactcccaaccctcagtattccaggtgctggctctggttactctgtctccaatatttcgattgctgcttcttacacatctacctcgaccatcatcacgacctctactccgacctcatcttattcttcagcaccaacctacacatcgacacacacctacacactgacacgctgcggtgcaccgggagcgatgaactgccccgcttcgtaccaatccacagtcgtcgtgacacgcacaagcacatattgcccgggggcaacctcaacagtcgccgcgggcaaggggtacccaatcccatcttcatcacactacgccgtcagcaccgcggtcattgtcctcacgcccctccccactcccattaccgcaaccttcacagcagcgccaacaacggtcggtggtgtaaaggctcaagcggagtcctcgagctatgtaactcagacatcgacctcgacgataacagtgacgcaatccgtgatcccatcatcaacatacattcctatagacacttcaacatacacaccctccaagtctcctagcagtgcagcatacgtaacttcatatccgacaccaaccggaaaatcgaacgctaccatgaccacgtacccttccccacaaactacagtccctgttgccggtgctggtcgttttgatgtcttttctcccttattatgccttctggtggcattcgctgtctttggaagtctgtgagatgggtaggagatctataggttggagtagaagtcaggataataatgtatgtggtggtcacctgtatctacgtacgcagatgcactatcaacaacaaggttctcgacagtacaaattttaacaataatggcctcattcaatagtccgaattctaagagttatcgacttcaagccgcgtaacttagttacggcaaaggagtcattcagc

SEQ ID NO: 28750 - DNA, 6180 bp, Muscodor strobelii
  misc_feature: SGI cDNA ID NO. 569864
  misc_feature: Encodes the peptide sequence at SEQ ID NO 28751
atgtcgtcaccaagttcccctcgcgcatcgcagggagctgccccggctgcggccccagcaccgactccagctcccgcacgagcgccctccacgaacccggaactcgagttgtctaagctgcaggcactaccggtcgagcagcaggacctgtatctgctcaacttcgtagccagcctcaccaagcatgttctggcgctcgtccccgatgactgcaccgcgcagcagttctacctcaagaaagaagtcttccagatcatcagcctgcaggcgccctccccgagccgagtgatacggaataatctgggcaagatactggcccatgtgctgggaaagggcgacagaaaactcctcttcgagaccgtaaacgagctagtcgccatcatctccaatgggaagtccaaaaccgaggctgaggttcgcacccgacatgctgccgtcgtgtgtctaggtgatgtgtactcagcagccggtgatagcgtcattggtctgcatccgttggcatgtgggagcttgacgaagctactgaaatcctctcagacacacgctgggctacgcgctgctactttcatctgtctcactaagatcgccggcatgattcaaggcagcatggaagagaccatagccagagatatatggaagcaagcgcgcagtgccgcgaccaatgacaagggatcacttaccatcgtctctgcttgtcgatgtctgaagtcattggtgaagaataccccgtattttgagaattcaggcgatttcgagagcttgaaatcgacgatattcaaagttattgactcgagctcttctcaagtccgacatgctgcagctgactgtctcgccgaagctatggtaaagagccattctgagctgggagctagtaccgtgcccaaaatcaaaaagcctaaatcaaaagccagtaaaagagtttccatggccccgggtatgggtcttgaagaggacgacgacataccatcacgacctggaagtcctgttcccggaggaggaaagaagagtcaggatttgatcctctctttaagtgatatttttaagacactgtccggtcaattcactcggtcgtcgacaaccaacagagccagagctgccattggagtgtgctatggcagggttgccagacgactaggagagaggttcattgagacaagctacctacggattgtcgagcacttgacaatcgacatccttggcaattcgaatattctcaataatcgatatagactgctgatttctcggcgcatcgtagacattttcctccaggatgtcatcggacggcgggtccttggagaatccggccagattgctgcagctaaagccattgtcaacgatgtcttcaagaactaccctgaggccatcaaagagcgaccagagccaagtaaatacactctcatcgtatctttaagtgcggtagcatcgctgattgaatcgcttggatctgctgcgaacaacttcgcagaaccctgccgagatgctttattgcaaattctgcagcacccaagctatacggtgcaagtctatgcatcgcattgtatgaagacgttcgtccatgcatgtccccagcagctcttaccgtgtttgtctgtatgcatgaacagtctcagcagagagcttaacttgctctccagcggacggaactcgccgagaagatgtataggatttgctcacggactagcagcgacgttaagcgctagccctacacgcccactatacggttctctagatatcaacaaccgggtctattcaatggctacaaatctactcaagtctagcggcaagtcagagctacgtgcttcaagtacacaagtgcaggttgcatggatcctgctcggcggcttaatgtccctggggccaaatttcgtcaaaatccatttgtcacagctgttggtgttgtggaagaacgcgctccccaagccattagcgaaagacaacttcgcacatcgtagcattcttgaggtctctttcttgacccatgtcaaagaatgcgctcttggttgcatcctctcgtttctccaatacaatagtcggttgttgactgtcgatgtctcgaagcgtattgccacaatgcttcaaggtacaacactgttcttgaagctgctcccatcaaagaaaaccacagacgatatcgcgcagcgattgacaccggctttgcaactgcaagatcttgacatgatggcacagaggcgtgttcttcaatgttatgtcaagcttgtaaaccagagtccagccggtggtagcgaagcactcttacagtctaatcttcttaccatcgctatctctctctttgccgaccctgagaattatggcggaaactcattgtccgcttcgatcgctaatgccgccggcacatttgagaccatatgggatgttggtgacaactctggttttggcgtcaatggcttgattcgaggatttacatcaaagaagcttcccggagaaaagaatgaagagccagacggattactgatggatcctactgatccagacaacatgattgatggcttactccagtcaccagtgtgcccttcgctggaacacgatgcgggcttattatacataggcgagctgaatgctcccttggagcttccagaccctccagcgactgaagtggtcaacatggccatccgactatttgcgttcgtgttccctctgactcctgctaaagtgcaagagagcgtcttagagcaaatcgctacttatacctccgctggctctttgcaacgcgatcctggcagaaaggctgccatgaacgtcaatgttgcgagtgcactactatcaactctcaaagtagcagtaaaagagacgcagtctgcgacaggcaatgtgacgaatctggcggtagaaaagctgctacaagaaatgatcagagaattcataattgatcctgatcagtacattcgacatctagggtataacgccattgcgagattgtgcaacgcttccggtaacgcatttacgaataatgaggtgaagcatttggttgataccattgttggcaacagggaacccagtgcacgtgcaggttgctccatggcactgggatggatccaggccaaagtcggtggtatggcggctggataccacttgaagaccattacggggatcttgatgtctttgtgcaatgatccccacccgacagtgcatttttgggctttagaggcattaggcaaagcagcagacgcagcaggcctgggcttcggtcccttcgtttctggaagcttagggatgcttgcgcagctctacctctctgagacccatcatactgagatcgcgtcacccatatcgatgagccttgaaatggagctctcgactgtcacagctattacgcgatgcgttgattccctgatcaatgtagtcggtccagacttgcaagactccacaaagtctcgagagctgattcttacgatggtggagcaacttcaaaacgaagatgatattgtaacccagagagcttgtctgggatgttttgaacacctctcactttacgctcccggtcatatggtttttgcggattatgtgaaattgttgcaaaagtatctcaagtccgaacacaacgatcttcgtgatgccgctgttgatggactctataatctcatgaagcggaattcatacgatgtgattgaagcagcggagacaggttttgaagatcagctgtggttggctttagaccttgtgcccgatcatgatggtattcgcaatctcatccgcaactggttacggcagacctcattaagggacacgagcgactggcttttgcggtgccaaagtgtgctcaacatgactcgacaaaaggctgctgatccattaccaaaaccaattgtcaaacgcagcactaccattgaccttcaggatgaagaggtcgctggattcgcaggcggcgcaggtaaagatgagacccaaccggctgctagctctgagatggagcctttacgatggcaagtgagaacgtttgctatgagttgcgtcagcgatatttttgttctcatcaacaaggacattgctgtcaacggcgaatcccccgcacagcctgtcctgcagagcaagatcgcagaggtaatccgtaccgcgttctctgcctcgacgtccagcgtcttagagcttcggatatggggtctaaaaatcattggcgcagttctaagaatgttcggcaaaacgccagatcctgactttgaagaagccatgcttctagagcagtaccaagctcaaattagctccgcgttgacacctgcgtttgcggcagattcatcaccggaattggcagccgaagctgtcaatgtgtgtgctgcattcattgcgactggaattgtgaccgatgtcgaccgaatggggcgcatcttgaagacattagtgactgcccttgaaaatttctcaactgatgttgaaaatgcaggcattggtgatctcaaaggactcagcccaaatgcccaagttatggtcaagatgtctgtcttctcagcctgggcggatcttcaggtcgctagtctagagcagaaataccttctcgaggttctcaagccgcacattaacaccctgacccctctttggctagcctctctccgcgaatttgctcgtttgcgtttcgaaccagacatctcaatgactcttgggccaccctcgatgtcgggcagcctcgaaacaatctattccgccctcaaccgtgagactttactgagattctaccaagagtcatggctcaagcttgttgatgctatagcaagccttatcgagcaagacagcgagtttgtctttgatgccctagatggcaaggaaaccgatggccctgcgccgaatgggacttcgaagggtgttgatatcaattaccgtgacgagcctgtggccttcttctttgtcctcttcggtatcgcttttgaagctctcgcaactcggccagggcaggccgattcccttgccactcaggagcagactcttgaaattctccaggctctaaagaaaatcctgcatccaagtgtgtcaggtcacgcgatttatcgggaggcaattttttccgagactatggatcttctagatcgcctcgtgctgaccgaggggctggatgttcaaggtgccatcgtcgaaatagcacgagctctctgtgtcggtcacccttcggctcggaaaaagggtcaggctgaagaaggggacctgaccgaagatatcgagcaactcttcgaactcaccaggatcatcgtattagtcctttctgggctactccctaatttgacagaagccggtcaacctgtccgtcatcagctgactgaggaatccatactgcttattcgatcaggtctgaatgccatcgtagatgctgccgaggtattccctgctattataaagaccgaccttcacgcttgcatcattcacatatttggcactatacttgcaacgccttcttgccaggagatcatcgtccctcaggcgctacccatgttcaaacgatttgtcgttagcatgacttctcgcattgctaaagatgggcggtctcccacagatacccagattcaaggctgccttcggaggttcctctccatttacctaaatgcacaaaaacgagaagctccaaactctcttcaatgcgttaagaattgtctgctcgctgttacgattttattcacaggcggtaacaatcgattacccgcaacagatcgtgttgtcataaagtatttagacgaactcttggactgtctaactgaccgcatgaccgcaaagattgccgcaaactgtgtcagatctctgatcttgcagccttcaccaacacctgcagatcaatctattacgcgctatcttctccctcgtcttgtgtcattcgtgtctaatactgagcctgatgatcctgaagacgcaaggaaacttgttgcacatacactaacacaatatgtgtctatcgtgggcaaagaccacgcacaaattgttatgtcagtcataggcccaactttattatctcgcgctgcaaatgagggagaagctgtgtataaggaaactagtgccagattactcgagatggcatcgtcagatcaggcagctttcagaggaatggtaggatctatgaatgagggccagaaggcttttatggaagaggtgataagatctggtagacaggccagtgacgcagatcgcgatagcggcaattcgaaccagcctactatcgctttgaagatgaattttggtggaagttag

SEQ ID NO: 28751 - protein, 2059 aa, Muscodor strobelii
  misc_feature: SGI Peptide ID NO. 569864
  misc_feature (1)..(2058): NCBI GI: 46125051 Blast Desc: FG06903.1 [Gibberella zeae PH-1]
  misc_feature (30)..(2058): NCBI GI: 261358175 Blast Desc: HEAT repeat protein [Verticillium albo-atrum VaMs.102]
  misc_feature (19)..(2058): NCBI GI: 39940516 Blast Desc: MGG_04982 [Magnaporthe grisea 70-15] gi|145010780|gb|EDJ95436.1| MGG_04982 [Magnaporthe grisea 70-15]
  misc_feature (30)..(2058): NCBI GI: 85091682 Blast Desc: NCU08993 [Neurospora crassa OR74A] gi|28920417|gb|EAA29785.1| conserved [Neurospora crassa OR74A]
  misc_feature (32)..(2058): NCBI GI: 171686312 Blast Desc: protein product [Podospora anserina] gi|170943117|emb|CAP68770.1| protein product [Podospora anserina]
  misc_feature (10)..(2058): NCBI GI: 154300596 Blast Desc: BC1G_10886 [Botryotinia fuckeliana B05.10] gi|150856493|gb|EDN31685.1| BC1G_10886 [Botryotinia fuckeliana B05.10]
  misc_feature (31)..(2056): NCBI GI: 169597785 Blast Desc: SNOG_01680 [Phaeosphaeria nodorum SN15] gi|160707588|gb|EAT91329.2| SNOG_01680 [Phaeosphaeria nodorum SN15]
  misc_feature (34)..(2056): NCBI GI: 258570405 Blast Desc: conserved [Uncinocarpus reesii 1704] gi|237904276|gb|EEP78677.1| conserved [Uncinocarpus reesii 1704]
  misc_feature (20)..(2056): NCBI GI: 119467616 Blast Desc: HEAT repeat protein [Neosartorya fischeri NRRL 181] gi|119405766|gb|EAW15717.1| HEAT repeat protein [Neosartorya fischeri NRRL 181]
  misc_feature (31)..(2056): NCBI GI: 225560991 Blast Desc: HEAT repeat protein [Ajellomyces capsulatus G186AR]
MSSPSSPRASQGAAPAAAPAPTPAPARAPSTNPELELSKLQALPVEQQDLYLLNFVASLTKHVLALVPDDCTAQQFYLKKEVFQIISLQAPSPSRVIRNNLGKILAHVLGKGDRKLLFETVNELVAIISNGKSKTEAEVRTRHAAVVCLGDVYSAAGDSVIGLHPLACGSLTKLLKSSQTHAGLRAATFICLTKIAGMIQGSMEETIARDIWKQARSAATNDKGSLTIVSACRCLKSLVKNTPYFENSGDFESLKSTIFKVIDSSSSQVRHAAADCLAEAMVKSHSELGASTVPKIKKPKSKASKRVSMAPGMGLEEDDDIPSRPGSPVPGGGKKSQDLILSLSDIFKTLSGQFTRSSTTNRARAAIGVCYGRVARRLGERFIETSYLRIVEHLTIDILGNSNILNNRYRLLISRRIVDIFLQDVIGRRVLGESGQIAAAKAIVNDVFKNYPEAIKERPEPSKYTLIVSLSAVASLIESLGSAANNFAEPCRDALLQILQHPSYTVQVYASHCMKTFVHACPQQLLPCLSVCMNSLSRELNLLSSGRNSPRRCIGFAHGLAATLSASPTRPLYGSLDINNRVYSMATNLLKSSGKSELRASSTQVQVAWILLGGLMSLGPNFVKIHLSQLLVLWKNALPKPLAKDNFAHRSILEVSFLTHVKECALGCILSFLQYNSRLLTVDVSKRIATMLQGTTLFLKLLPSKKTTDDIAQRLTPALQLQDLDMMAQRRVLQCYVKLVNQSPAGGSEALLQSNLLTIAISLFADPENYGGNSLSASIANAAGTFETIWDVGDNSGFGVNGLIRGFTSKKLPGEKNEEPDGLLMDPTDPDNMIDGLLQSPVCPSLEHDAGLLYIGELNAPLELPDPPATEVVNMAIRLFAFVFPLTPAKVQESVLEQIATYTSAGSLQRDPGRKAAMNVNVASALLSTLKVAVKETQSATGNVTNLAVEKLLQEMIREFIIDPDQYIRHLGYNAIARLCNASGNAFTNNEVKHLVDTIVGNREPSARAGCSMALGWIQAKVGGMAAGYHLKTITGILMSLCNDPHPTVHFWALEALGKAADAAGLGFGPFVSGSLGMLAQLYLSETHHTEIASPISMSLEMELSTVTAITRCVDSLINVVGPDLQDSTKSRELILTMVEQLQNEDDIVTQRACLGCFEHLSLYAPGHMVFADYVKLLQKYLKSEHNDLRDAAVDGLYNLMKRNSYDVIEAAETGFEDQLWLALDLVPDHDGIRNLIRNWLRQTSLRDTSDWLLRCQSVLNMTRQKAADPLPKPIVKRSTTIDLQDEEVAGFAGGAGKDETQPAASSEMEPLRWQVRTFAMSCVSDIFVLINKDIAVNGESPAQPVLQSKIAEVIRTAFSASTSSVLELRIWGLKIIGAVLRMFGKTPDPDFEEAMLLEQYQAQISSALTPAFAADSSPELAAEAVNVCAAFIATGIVTDVDRMGRILKTLVTALENFSTDVENAGIGDLKGLSPNAQVMVKMSVFSAWADLQVASLEQKYLLEVLKPHINTLTPLWLASLREFARLRFEPDISMTLGPPSMSGSLETIYSALNRETLLRFYQESWLKLVDAIASLIEQDSEFVFDALDGKETDGPAPNGTSKGVDINYRDEPVAFFFVLFGIAFEALATRPGQADSLATQEQTLEILQALKKILHPSVSGHAIYREAIFSETMDLLDRLVLTEGLDVQGAIVEIARALCVGHPSARKKGQAEEGDLTEDIEQLFELTRIIVLVLSGLLPNLTEAGQPVRHQLTEESILLIRSGLNAIVDAAEVFPAIIKTDLHACIIHIFGTILATPSCQEIIVPQALPMFKRFVVSMTSRIAKDGRSPTDTQIQGCLRRFLSIYLNAQKREAPNSLQCVKNCLLAVTILFTGGNNRLPATDRVVIKYLDELLDCLTDRMTAKIAANCVRSLILQPSPTPADQSITRYLLPRLVSFVSNTEPDDPEDARKLVAHTLTQYVSIVGKDHAQIVMSVIGPTLLSRAANEGEAVYKETSARLLEMASSDQAAFRGMVGSMNEGQKAFMEEVIRSGRQASDADRDSGNSNQPTIALKMNFGGS

SEQ ID NO: 28752 - DNA, 6523 bp, Muscodor strobelii
  misc_feature: SGI EST ID NO. CUFF.67838.0
  misc_feature: Variant of the nucleotide sequence at SEQ ID NO 28750
ctaccatttaagacacgagggacaacacctggaattctgcacttcacccgcatactgcaggatagaaactgccgcgcatagctgttcgattcaaacctctcctttcactcagtccgccatgttcatgcgatcccgttagtgtttttcgagcgcctccgcccatcctcataatcgccaatgtcgtcaccaagttcccctcgcgcatcgcagggagctgccccggctgcggccccagcaccgactccagctcccgcacgagcgccctccacgaacccggaactcgagttgtctaagctgcaggcactaccggtcgagcagcaggacctgtatctgctcaacttcgtagccagcctcaccaagcatgttctggcgctcgtccccgatgactgcaccgcgcagcagttctacctcaagaaagaagtcttccagatcatcagcctgcaggcgccctccccgagccgagtgatacggaataatctgggcaagatactggcccatgtgctgggaaagggcgacagaaaactcctcttcgagaccgtaaacgagctagtcgccatcatctccaatgggaagtccaaaaccgaggctgaggttcgcacccgacatgctgccgtcgtgtgtctaggtgatgtgtactcagcagccggtgatagcgtcattggtctgcatccgttggcatgtgggagcttgacgaagctactgaaatcctctcagacacacgctgggctacgcgctgctactttcatctgtctcactaagatcgccggcatgattcaaggcagcatggaagagaccatagccagagatatatggaagcaagcgcgcagtgccgcgaccaatgacaagggatcacttaccatcgtctctgcttgtcgatgtctgaagtcattggtgaagaataccccgtattttgagaattcaggcgatttcgagagcttgaaatcgacgatattcaaagttattgactcgagctcttctcaagtccgacatgctgcagctgactgtctcgccgaagctatggtaaagagccattctgagctgggagctagtaccgtgcccaaaatcaaaaagcctaaatcaaaagccagtaaaagagtttccatggccccgggtatgggtcttgaagaggacgacgacataccatcacgacctggaagtcctgttcccggaggaggaaagaagagtcaggatttgatcctctctttaagtgatatttttaagacactgtccggtcaattcactcggtcgtcgacaaccaacagagccagagctgccattggagtgtgctatggcagggttgccagacgactaggagagaggttcattgagacaagctacctacggattgtcgagcacttgacaatcgacatccttggcaattcgaatattctcaataatcgatatagactgctgatttctcggcgcatcgtagacattttcctccaggatgtcatcggacggcgggtccttggagaatccggccagattgctgcagctaaagccattgtcaacgatgtcttcaagaactaccctgaggccatcaaagagcgaccagagccaagtaaatacactctcatcgtatctttaagtgcggtagcatcgctgattgaatcgcttggatctgctgcgaacaacttcgcagaaccctgccgagatgctttattgcaaattctgcagcacccaagctatacggtgcaagtctatgcatcgcattgtatgaagacgttcgtccatgcatgtccccagcagctcttaccgtgtttgtctgtatgcatgaacagtctcagcagagagcttaacttgctctccagcggacggaactcgccgagaagatgtataggatttgctcacggactagcagcgacgttaagcgctagccctacacgcccactatacggttctctagatatcaacaaccgggtctattcaatggctacaaatctactcaagtctagcggcaagtcagagctacgtgcttcaagtacacaagtgcaggttgcatggatcctgctcggcggcttaatgtccctggggccaaatttcgtcaaaatccatttgtcacagctgttggtgttgtggaagaacgcgctccccaagccattagcgaaagacaacttcgcacatcgtagcattcttgaggtctctttcttgacccatgtcaaagaatgcgctcttggttgcatcctctcgtttctccaatacaatagtcggttgttgactgtcgatgtctcgaagcgtattgccacaatgcttcaaggtacaacactgttcttgaagctgctcccatcaaagaaaaccacagacgatatcgcgcagcgattgacaccggctttgcaactgcaagatcttgacatgatggcacagaggcgtgttcttcaatgttatgtcaagcttgtaaaccagagtccagccggtggtagcgaagcactcttacagtctaatcttcttaccatcgctatctctctctttgccgaccctgagaattatggcggaaactcattgtccgcttcgatcgctaatgccgccggcacatttgagaccatatgggatgttggtgacaactctggttttggcgtcaatggcttgattcgaggatttacatcaaagaagcttcccggagaaaagaatgaagagccagacggattactgatggatcctactgatccagacaacatgattgatggcttactccagtcaccagtgtgcccttcgctggaacacgatgcgggcttattatacataggcgagctgaatgctcccttggagcttccagaccctccagcgactgaagtggtcaacatggccatccgactatttgcgttcgtgttccctctgactcctgctaaagtgcaagagagcgtcttagagcaaatcgctacttatacctccgctggctctttgcaacgcgatcctggcagaaaggctgccatgaacgtcaatgttgcgagtgcactactatcaactctcaaagtagcagtaaaagagacgcagtctgcgacaggcaatgtgacgaatctggcggtagaaaagctgctacaagaaatgatcagagaattcataattgatcctgatcagtacattcgacatctagggtataacgccattgcgagattgtgcaacgcttccggtaacgcatttacgaataatgaggtgaagcatttggttgataccattgttggcaacagggaacccagtgcacgtgcaggttgctccatggcactgggatggatccaggccaaagtcggtggtatggcggctggataccacttgaagaccattacggggatcttgatgtctttgtgcaatgatccccacccgacagtgcatttttgggctttagaggcattaggcaaagcagcagacgcagcaggcctgggcttcggtcccttcgtttctggaagcttagggatgcttgcgcagctctacctctctgagacccatcatactgagatcgcgtcacccatatcgatgagccttgaaatggagctctcgactgtcacagctattacgcgatgcgttgattccctgatcaatgtagtcggtccagacttgcaagactccacaaagtctcgagagctgattcttacgatggtggagcaacttcaaaacgaagatgatattgtaacccagagagcttgtctgggatgttttgaacacctctcactttacgctcccggtcatatggtttttgcggattatgtgaaattgttgcaaaagtatctcaagtccgaacacaacgatcttcgtgatgccgctgttgatggactctataatctcatgaagcggaattcatacgatgtgattgaagcagcggagacaggttttgaagatcagctgtggttggctttagaccttgtgcccgatcatgatggtattcgcaatctcatccgcaactggttacggcagacctcattaagggacacgagcgactggcttttgcggtgccaaagtgtgctcaacatgactcgacaaaaggctgctgatccattaccaaaaccaattgtcaaacgcagcactaccattgaccttcaggatgaagaggtcgctggattcgcaggcggcgcaggtaaagatgagacccaaccggctgctagctctgagatggagcctttacgatggcaagtgagaacgtttgctatgagttgcgtcagcgatatttttgttctcatcaacaaggacattgctgtcaacggcgaatcccccgcacagcctgtcctgcagagcaagatcgcagaggtaatccgtaccgcgttctctgcctcgacgtccagcgtcttagagcttcggatatggggtctaaaaatcattggcgcagttctaagaatgttcggcaaaacgccagatcctgactttgaagaagccatgcttctagagcagtaccaagctcaaattagctccgcgttgacacctgcgtttgcggcagattcatcaccggaattggcagccgaagctgtcaatgtgtgtgctgcattcattgcgactggaattgtgaccgatgtcgaccgaatggggcgcatcttgaagacattagtgactgcccttgaaaatttctcaactgatgttgaaaatgcaggcattggtgatctcaaaggactcagcccaaatgcccaagttatggtcaagatgtctgtcttctcagcctgggcggatcttcaggtcgctagtctagagcagaaataccttctcgaggttctcaagccgcacattaacaccctgacccctctttggctagcctctctccgcgaatttgctcgtttgcgtttcgaaccagacatctcaatgactcttgggccaccctcgatgtcgggcagcctcgaaacaatctattccgccctcaaccgtgagactttactgagattctaccaagagtcatggctcaagcttgttgatgctatagcaagccttatcgagcaagacagcgagtttgtctttgatgccctagatggcaaggaaaccgatggccctgcgccgaatgggacttcgaagggtgttgatatcaattaccgtgacgagcctgtggccttcttctttgtcctcttcggtatcgcttttgaagctctcgcaactcggccagggcaggccgattcccttgccactcaggagcagactcttgaaattctccaggctctaaagaaaatcctgcatccaagtgtgtcaggtcacgcgatttatcgggaggcaattttttccgagactatggatcttctagatcgcctcgtgctgaccgaggggctggatgttcaaggtgccatcgtcgaaatagcacgagctctctgtgtcggtcacccttcggctcggaaaaagggtcaggctgaagaaggggacctgaccgaagatatcgagcaactcttcgaactcaccaggatcatcgtattagtcctttctgggctactccctaatttgacagaagccggtcaacctgtccgtcatcagctgactgaggaatccatactgcttattcgatcaggtctgaatgccatcgtagatgctgccgaggtattccctgctattataaagaccgaccttcacgcttgcatcattcacatatttggcactatacttgcaacgccttcttgccaggagatcatcgtccctcaggcgctacccatgttcaaacgatttgtcgttagcatgacttctcgcattgctaaagatgggcggtctcccacagatacccagattcaaggctgccttcggaggttcctctccatttacctaaatgcacaaaaacgagaagctccaaactctcttcaatgcgttaagaattgtctgctcgctgttacgattttattcacaggcggtaacaatcgattacccgcaacagatcgtgttgtcataaagtatttagacgaactcttggactgtctaactgaccgcatgaccgcaaagattgccgcaaactgtgtcagatctctgatcttgcagccttcaccaacacctgcagatcaatctattacgcgctatcttctccctcgtcttgtgtcattcgtgtctaatactgagcctgatgatcctgaagacgcaaggaaacttgttgcacatacactaacacaatatgtgtctatcgtgggcaaagaccacgcacaaattgttatgtcagtcataggcccaactttattatctcgcgctgcaaatgagggagaagctgtgtataaggaaactagtgccagattactcgagatggcatcgtcagatcaggcagctttcagaggaatggtaggatctatgaatgagggccagaaggcttttatggaagaggtgataagatctggtagacaggccagtgacgcagatcgcgatagcggcaattcgaaccagcctactatcgctttgaagatgaattttggtggaagttagacacattcattgtcactctgtcatcaggtgttacggcacctgggttctttggattggtccatgggtcaaaatggaaggagcgcatgtggttcaaaaattagaagcatattcccaccagtgagtagaatacttatagccacgaaattcagaaactattgaacatttt

SEQ ID NO: 28753 - DNA, 615 bp, Muscodor strobelii
  misc_feature: SGI cDNA ID NO. 569865
  misc_feature: Encodes the peptide sequence at SEQ ID NO 28754
atgcccaaagccaacatcgacgacgcaatagcgcgtgggcagggccgatcacaaaccggcgcaaagctcgagagcgctacactcgaagtcatgcttgcgccctcaatggcactgatcatcgacatcgaaacagacaataaaaatcgctctcttgcagacttgaggatgatatgtgtcaagaaacacggcggaaccgtaacccctacggcctttctcttcacgcgccggggacgcgcggtcctagcgcctcggggtgaggagcaggaaattgaagactttgacgatgtcatgatgcaggctcttgatgccggcgctgaggatgtcgagcaggatagcgatggaaatcttgtcctatggacacaacctaatatgacgcatcaagtggcgcagaagctctcgaaggcgttggattttgaaattcatagctctgatatcatatggttgtgtacttcggacaagactaaggtcgatgatcccgaggccgctgatcgtctcgcgaaactcctgctggatatttcggaatacgcagatgtccaagctgtgtaccataataccgagcgtggcgcggtctcggaagatgagtgggacgcagtcgaacaggcgatcgaggcctga

SEQ ID NO: 28754 - protein, 204 aa, Muscodor strobelii
  misc_feature: SGI Peptide ID NO. 569865
  misc_feature (1)..(186): Pfam Id: PF01709 Pfam Desc: Domain of function DUF28
  misc_feature (1)..(199): NCBI GI: 261358174 Blast Desc: DUF28 domain-containing protein [Verticillium albo-atrum VaMs.102]
  misc_feature (1)..(196): NCBI GI: 154300598 Blast Desc: BC1G_10887 [Botryotinia fuckeliana B05.10] gi|150856494|gb|EDN31686.1| BC1G_10887 [Botryotinia fuckeliana B05.10]
  misc_feature (2)..(203): NCBI GI: 256732690 Blast Desc: [Nectria haematococca mpVI 77-13-4]
  misc_feature (1)..(203): NCBI GI: 46125053 Blast Desc: FG06904.1 [Gibberella zeae PH-1]
  misc_feature (9)..(196): NCBI GI: 156048450 Blast Desc: SS1G_08956 [Sclerotinia sclerotiorum 1980] gi|154693353|gb|EDN93091.1| SS1G_08956 [Sclerotinia sclerotiorum 1980]
  misc_feature (2)..(203): NCBI GI: 164423128 Blast Desc: NCU10169 [Neurospora crassa OR74A] gi|157069960|gb|EDO64938.1| [Neurospora crassa OR74A]
  misc_feature (1)..(202): NCBI GI: 189194844 Blast Desc: PTRG_03427 [Pyrenophora tritici-repentis Pt-1C-BFP] gi|187979639|gb|EDU46265.1| PTRG_03427 [Pyrenophora tritici-repentis Pt-1C-BFP]
  misc_feature (1)..(203): NCBI GI: 116207506 Blast Desc: CHGG_03046 [Chaetomium globosum CBS 148.51] gi|88183643|gb|EAQ91111.1| CHGG_03046 [Chaetomium globosum CBS 148.51]
  misc_feature (1)..(202): NCBI GI: 171686314 Blast Desc: protein product [Podospora anserina] gi|170943118|emb|CAP68771.1| protein product [Podospora anserina]
  misc_feature (1)..(203): NCBI GI: 39940518 Blast Desc: MGG_04981 [Magnaporthe grisea 70-15] gi|145010781|gb|EDJ95437.1| MGG_04981 [Magnaporthe grisea 70-15]
MPKANIDDAIARGQGRSQTGAKLESATLEVMLAPSMALIIDIETDNKNRSLADLRMICVKKHGGTVTPTAFLFTRRGRAVLAPRGEEQEIEDFDDVMMQALDAGAEDVEQDSDGNLVLWTQPNMTHQVAQKLSKALDFEIHSSDIIWLCTSDKTKVDDPEAADRLAKLLLDISEYADVQAVYHNTERGAVSEDEWDAVEQAIEA

SEQ ID NO: 28755 - DNA, 955 bp, Muscodor strobelii
  misc_feature: SGI EST ID NO. CUFF.67798.0
  misc_feature: Variant of the nucleotide sequence at SEQ ID NO 28753
gtatgcccaaagccaacatcgacgacgcaatagcgcgtgggcagggccgatcacaaaccggcgcaaagctcgagagcgctacactcgaagtcatgcttgcgccctcaatggcactgatcatcgacatcgaaacagacaataaaaatcgctctcttgcagacttgaggatgatatgtgtcaagaaacacggcggaaccgtaacccctacggcctttctcttcacgcgccggggacgcgcggtcctagcgcctcggggtgaggagcaggaaattgaagactttgacgatgtcatgatgcaggctcttgatgccggcgctgaggatgtcgagcaggatagcgatggaaatcttgtcctatggacacaacctaatatgacgcatcaagtggcgcagaagctctcgaaggcgttggattttgaaattcatagctctgatatcatatggttgtgtacttcggacaagactaaggtcgatgatcccgaggccgctgatcgtctcgcgaaactcctgctggatatttcggaatacgcagatgtccaagctgtgtaccataataccgagcgtggcgcggtctcggaagatgagtgggacgcagtcgaacaggcgatcgaggcctgatcaagcctaagatcggacatgtaagatactgtatataccgagacatgtataacacgatgtatcaaagaactgtatatataaggcagccatgtagggaagttagcttggagcccgtgctaaggcagtcacggtgggggggttggtctttatattgcagaacagctgtctggttatcaacatccaatggcctagcggtcaatcgtctagattcggttctagaggtagtgggttcgatccctaccacggttgcgtctttgacaattggtcctggttagtttgcttcggttcgtcctggcgctgcttcccatcccaaaggggccttaccaaagatactccca

SEQ ID NO: 28756 - DNA, 288 bp, Muscodor strobelii
  misc_feature: SGI cDNA ID NO. 569866
  misc_feature: Encodes the peptide sequence at SEQ ID NO 28757
atgggcgggctaaacctcgaagtcttcaagttcggcatgtacgtcatgttcccaatcggaatcatgtactacttcggcacgaacctcgacgagcgcttctccgtcccggacttctggcccaaacccgagcaagcgaacaaagtgccgctagaccgcgacgagatacatgctgagttgcagcgattgaggaataggagactgtttttgagggatcaacggatacagcaggaggctgccgagaggaggaatgatggaaatgggagtgggaatggtggaagcgattcataa

SEQ ID NO: 28757 - protein, 95 aa, Muscodor strobelii
  misc_feature: SGI Peptide ID NO. 569866
  misc_feature (1)..(75): NCBI GI: 156048448 Blast Desc: SS1G_08955 [Sclerotinia sclerotiorum 1980] gi|154693352|gb|EDN93090.1| SS1G_08955 [Sclerotinia sclerotiorum 1980]
  misc_feature (1)..(75): NCBI GI: 154300600 Blast Desc: BC1G_10888 [Botryotinia fuckeliana B05.10] gi|150856495|gb|EDN31687.1| BC1G_10888 [Botryotinia fuckeliana B05.10]
  misc_feature (1)..(71): NCBI GI: 39940520 Blast Desc: MGG_04980 [Magnaporthe grisea 70-15] gi|145010782|gb|EDJ95438.1| MGG_04980 [Magnaporthe grisea 70-15]
  misc_feature (1)..(78): NCBI GI: 85091680 Blast Desc: NCU08992 [Neurospora crassa OR74A] gi|28920416|gb|EAA29784.1| [Neurospora crassa OR74A]
  misc_feature (1)..(95): NCBI GI: 46125055 Blast Desc: FG06905.1 [Gibberella zeae PH-1]
  misc_feature (1)..(82): NCBI GI: 171686316 Blast Desc: protein product [Podospora anserina] gi|170943119|emb|CAP68772.1| protein product [Podospora anserina]
  misc_feature (1)..(56): NCBI GI: 116207504 Blast Desc: CHGG_03045 [Chaetomium globosum CBS 148.51] gi|88183642|gb|EAQ91110.1| CHGG_03045 [Chaetomium globosum CBS 148.51]
  misc_feature (1)..(80): NCBI GI: 261358173 Blast Desc: mitochondrial cytochrome c oxidase assembly factor [Verticillium albo-atrum VaMs.102]
  misc_feature (1)..(80): NCBI GI: 119467606 Blast Desc: NFIA_050570 [Neosartorya fischeri NRRL 181] gi|119405761|gb|EAW15712.1| conserved [Neosartorya fischeri NRRL 181]
  misc_feature (1)..(82): NCBI GI: 121703732 Blast Desc: conserved [Aspergillus clavatus NRRL 1] gi|119398274|gb|EAW08704.1| conserved [Aspergillus clavatus NRRL 1]
MGGLNLEVFKFGMYVMFPIGIMYYFGTNLDERFSVPDFWPKPEQANKVPLDRDEIHAELQRLRNRRLFLRDQRIQQEAAERRNDGNGSGNGGSDS

SEQ ID NO: 28758 - DNA, 912 bp, Muscodor strobelii
  misc_feature: SGI EST ID NO. CUFF.67823.0
  misc_feature: Variant of the nucleotide sequence at SEQ ID NO 28756
cggatccaagcactttaattggcccacatgtcaaccttcgatccctgtcgcgggagtagtgcagggaaatggatttatcgacaagggcatcgtctttcgatctcgtcattcaacatcacctcgtaccacgaaacgacacaaaacgaaacacatcaaagcctcttctagttgtactgcgcgccagactccaattgacgggctcgcatcccgcacacatttcttgcgccgatacgcgactgtaactccgagaatcttgctactactgaaaacgcttcgcgagcacagctcaatcttcacaatgggcgggctaaacctcgaagtcttcaagttcggcatgtacgtcatgttcccaatcggaatcatgtactacttcggcacgaacctcgacgagcgcttctccgtcccggacttctggcccaaacccgagcaagcgaacaaagtgccgctagaccgcgacgagatacatgctgagttgcagcgattgaggaataggagactgtttttgagggatcaacggatacagcaggaggctgccgagaggaggaatgatggaaatgggagtgggaatggtggaagcgattcataagatgttggatcaaggacgatactacatgacgaacgaacgaacgaacataatggtgctgaaaaacttcacgtattgcgatcacggcgcaaagagctgggtcagtaagtgaatcgcagtctggacaatatttgcgcatggctatccggcgtaggcggaacgggagaagaaaagattgtacgatgtgtatcgatgagaatgtacagcaacaacacataatttctgtacaccaaattcttcagtctattgtttgaggagatacatactagggagatatgaaaaatgagaactgagaaacaagttaaagacgatactgttttctaatacgg

SEQ ID NO: 28759 - DNA, 3789 bp, Muscodor strobelii
  misc_feature: SGI cDNA ID NO. 569867
  misc_feature: Encodes the peptide sequence at SEQ ID NO 28760
atggcctcagatcttgaacccgagaatgatgcagagtttcaggaatttctagactggctatccacagacaatcatcgcaagcactacatcgatatatcgagtcagagacgctctggctcgtcccactggtttctcgactcggaatcgtaccaaaactggcttgcaacggagcagcatatagtcatcgccgacagtgcaccaggcgtggaaacatccgtgctcgcatctgcagtcattgatgatctaactgctcgcttcgaggcccatgatgcaccggccccgattggcttggcatatttatacggcgaggttcttaggcttggtgatccgaaagactgcgagtcgctcatacttcctgtcattcgccagttattatcacaggcggcaagtaaggggctggatctttcggccgaggcactcgactggcaccaatactacggtattcgagacgaacccgaatggatctcaaagcgacccctgaggatgctcgaaagtgcgatcgagtcatttgaacatacttttcttgttattgatagtattgatcaattcaacagcacatcgtacattcgggactttgacaatcccgagatacttcctttgtgcgcacattatcaagacctcacacgttacattgatgaggacgtcttggcaatttccagacaggtcgatgggatggtgcagggcgaggaagtcaggaacggtattgtgagttgcccggatggaagttccttccttgtccaacctacaaaaaactgtctagctgttgaatcgtcgtccgaaggcgttcgaagcttcatatgccgtcaagaaatagttgtgtcttcgtacgacgaggttcttgataaagctatggaatgcatttgcaattcatccactcaggaacatcttctggcgcgagaacttatgatgtggcttgtgtgcgcaagacgctggttgagctttcaagagataaaagcggccatgacccacagtctttgtactacaggtcagacttacgaggttccgtccattaagacggcggtggctacatgttgcggcatagttgtgctcgatcgagaatcttgtgtcgtccgactggttaaccaggtcgcagaagattatttcggccgcaagttaaagaaatggtacccagatgcgagtatcaaaattgcgtatacgtgtttaacatatctcttccaagatgatttcaggactggaccctgtcactcaaatggcgaattgagagaacggctggaacgatttcccctttacagctacgcagcacaaaatcttggcaatcacgctggaaatttgaatgagaccagtatcttgcagattggcgtggacttattgatgagcccttccaaaatggaggcagcttgtcaagtaaagatgatgccggtgcggtgtgaaaagattgacaaaccaaatcattaccagagataccctcatgacctaaatgctattcatgtgtcggccttttatggtctccgctacgttacagaggcactattaagaattcaaagtcttacgtcacttgtagatatgaaggacagagatggacgaactccgctttcctatgctgctgctcaaggccacatcgacattgtgcaactgctcgtgggccacgataaggttcaaatcaatagtcgagacgaccagggccgtaccccgatttcattcgcagcggaaaacggatatgatgatctcgtggggttcctgatgcatcaaggggccaatccgaagctgaaagacttgatccgtgctacgccgttgtggtatgctgcccgacaaggtcacgcggctatcttggagcggcttctacgacgccatgaattcgatttgagtttggcggtcgacaaaacatttaggcctacaccactttatgtggctattgtaggagggcacactggcgtattggatctgctcttaaagcaggacacgatggacccgtacctgaaggaatcggattattgccgtgcagtaaccaatgctattgaagcccgcaacgaggcggccgtgcagcttctccttagcagactcgacactagggccgttcctcctgattcggattatttaaaattagctgtcgaaattggcgatgcgaagattgtgaagcacctccttaagcgaaattcagccagtatcaacaaagacatatatcgccaactccttgaagctgcacgcttaggtgatgaagcattggtcaggttgttgctcgcccatgtggattgcttttcccacccgctcgctttagaaggagcatttatagaatcagtacaggcgggccatcatcacatggtaaacatgtttctgactctaggtgcagatccaagcattgaagtttcgggttggggaataccactcgtagaagctgcaaagcattcctatcacaacgtggtgagagaactaattgcagacgagcgtatcgagatagacgcatgcgatagaggggggcgcactgcattgtcttgggccgcgtttccgtattaccacttccgcaaggatagtggctccgtaaagacggttgaactacttctcgcagctggatgcgacgtcaatatccgagataatcatggaaggacagcgctctcacatgctatagagtgcgaaaacgactcggtggtcgacttacttctcagccatcgagcaatcgacatcggcttatcggatcatgacggcagaacagcgctgatttgggctacgaagatgtgcaatgaggcgctagtgcggcgcctcctaggaagactatctgataacctaaaacactatgaacagcaaatttcgctcttcttcggaacaaatctattgccacgggctgtggctatgggcaagcttgaaatcatccagcttctgatcgagaagggtgttcttaatattgatacttatgacaaggaaccagaagatgctctgatgcgagcaacaaagacgggtgatgctgctactgtagagcgattacttcaattgtgtagctctaagagatcattcgaggagcttagccgcagcttgatttttattgctgcacgggagggccacgaagtgatcgtcgacctgctcttacgagtagcacaagttgatcccaactgcttggatgatgaagggcgtaccccgctatcgtgggctgcgcaatgggggagaaggaaagtggttgaacatatgctgaatatcaaaactgtggacccaaatttgcaggatgtaaatggacggacgccgctttcttggtcagttgagggtgcaaaggacgtagtccaactcctgatcaatacagatggtgtggctgtcgatgccaaggacgcgggcggtcggactgcgctatcatgggcagtcaatcttccatggcgggcaattgaactaggtacgacacagagacaggccattgtagcactgctagcggctcatgagggaaatgacactaagtatgaagatacgaaaagtcagatcacttcgactgttgctcgaacaaagactaaactccttctcgatgtgctcaagctttccatacactcctttctagaaagctggagaccgatcttggatagagacgaatccagaagcctggacaccgaaatacaaattagtttggcacggggaaacatgtattggcgcgaggtggttcaaattatactgcagccccagacaggtgatgatcaagaacatcaggaactttgccagtcttgcagctctttagatctggataaggcgttctcatcgcggccgacagagacgaatagcaagcgtcttctaagtattgcaataggtggattgattgcatgtatttatggtgtgtccctatctaaagggttctactag

SEQ ID NO: 28760 - protein, 1262 aa, Muscodor strobelii
  misc_feature: SGI Peptide ID NO. 569867
  misc_feature (513)..(546): Pfam Id: PF00023 Pfam Desc: Ankyrin repeat
  misc_feature (1026)..(1059): Pfam Id: PF00023 Pfam Desc: Ankyrin repeat
  misc_feature (547)..(579): Pfam Id: PF00023 Pfam Desc: Ankyrin repeat
  misc_feature (811)..(851): Pfam Id: PF00023 Pfam Desc: Ankyrin repeat
  misc_feature (14)..(1098): NCBI GI: 242821429 Blast Desc: ankyrin repeat-containing protein, [Talaromyces stipitatus ATCC 10500] gi|218712600|gb|EED12025.1| ankyrin repeat-containing protein, [Talaromyces stipitatus ATCC 10500]
  misc_feature (1)..(1102): NCBI GI: 238508580 Blast Desc: Pfs, NACHT and Ankyrin domain protein [Aspergillus flavus NRRL3357] gi|220688371|gb|EED44724.1| Pfs, NACHT and Ankyrin domain protein [Aspergillus flavus NRRL3357]
  misc_feature (163)..(1068): NCBI GI: 238500846 Blast Desc: Pfs, NACHT and Ankyrin domain protein [Aspergillus flavus NRRL3357] gi|220691894|gb|EED48241.1| Pfs, NACHT and Ankyrin domain protein [Aspergillus flavus NRRL3357]
  misc_feature (8)..(1065): NCBI GI: 258572672 Blast Desc: conserved [Uncinocarpus reesii 1704] gi|237905368|gb|EEP79769.1| conserved [Uncinocarpus reesii 1704]
  misc_feature (14)..(947): NCBI GI: 212528994 Blast Desc: Pfs, NACHT and Ankyrin domain protein [Penicillium marneffei ATCC 18224] gi|210074052|gb|EEA28139.1| Pfs, NACHT and Ankyrin domain protein [Penicillium marneffei ATCC 18224]
  misc_feature (8)..(906): NCBI GI: 225557065 Blast Desc: ankyrin repeat protein [Ajellomyces capsulatus G186AR]
  misc_feature (274)..(1102): NCBI GI: 159123470 Blast Desc: Ankyrin repeat protein [Aspergillus fumigatus A1163]
  misc_feature (8)..(861): NCBI GI: 255939916 Blast Desc: Pc16g03680 [Penicillium chrysogenum Wisconsin 54-1255] gi|211585350|emb|CAP93038.1| Pc16g03680 [Penicillium chrysogenum Wisconsin 54-1255]
  misc_feature (9)..(739): NCBI GI: 115390338 Blast Desc: conserved [Aspergillus terreus NIH2624] gi|114195070|gb|EAU36770.1| conserved [Aspergillus terreus NIH2624]
  misc_feature (6)..(907): NCBI GI: 154313093 Blast Desc: BC1G_05548 [Botryotinia fuckeliana B05.10] gi|150849633|gb|EDN24826.1| BC1G_05548 [Botryotinia fuckeliana B05.10]
MASDLEPENDAEFQEFLDWLSTDNHRKHYIDISSQRRSGSSHWFLDSESYQNWLATEQHIVIADSAPGVETSVLASAVIDDLTARFEAHDAPAPIGLAYLYGEVLRLGDPKDCESLILPVIRQLLSQAASKGLDLSAEALDWHQYYGIRDEPEWISKRPLRMLESAIESFEHTFLVIDSIDQFNSTSYIRDFDNPEILPLCAHYQDLTRYIDEDVLAISRQVDGMVQGEEVRNGIVSCPDGSSFLVQPTKNCLAVESSSEGVRSFICRQEIVVSSYDEVLDKAMECICNSSTQEHLLARELMMWLVCARRWLSFQEIKAAMTHSLCTTGQTYEVPSIKTAVATCCGIVVLDRESCVVRLVNQVAEDYFGRKLKKWYPDASIKIAYTCLTYLFQDDFRTGPCHSNGELRERLERFPLYSYAAQNLGNHAGNLNETSILQIGVDLLMSPSKMEAACQVKMMPVRCEKIDKPNHYQRYPHDLNAIHVSAFYGLRYVTEALLRIQSLTSLVDMKDRDGRTPLSYAAAQGHIDIVQLLVGHDKVQINSRDDQGRTPISFAAENGYDDLVGFLMHQGANPKLKDLIRATPLWYAARQGHAAILERLLRRHEFDLSLAVDKTFRPTPLYVAIVGGHTGVLDLLLKQDTMDPYLKESDYCRAVTNAIEARNEAAVQLLLSRLDTRAVPPDSDYLKLAVEIGDAKIVKHLLKRNSASINKDIYRQLLEAARLGDEALVRLLLAHVDCFSHPLALEGAFIESVQAGHHHMVNMFLTLGADPSIEVSGWGIPLVEAAKHSYHNVVRELIADERIEIDACDRGGRTALSWAAFPYYHFRKDSGSVKTVELLLAAGCDVNIRDNHGRTALSHAIECENDSVVDLLLSHRAIDIGLSDHDGRTALIWATKMCNEALVRRLLGRLSDNLKHYEQQISLFFGTNLLPRAVAMGKLEIIQLLIEKGVLNIDTYDKEPEDALMRATKTGDAATVERLLQLCSSKRSFEELSRSLIFIAAREGHEVIVDLLLRVAQVDPNCLDDEGRTPLSWAAQWGRRKVVEHMLNIKTVDPNLQDVNGRTPLSWSVEGAKDVVQLLINTDGVAVDAKDAGGRTALSWAVNLPWRAIELGTTQRQAIVALLAAHEGNDTKYEDTKSQITSTVARTKTKLLLDVLKLSIHSFLESWRPILDRDESRSLDTEIQISLARGNMYWREVVQIILQPQTGDDQEHQELCQSCSSLDLDKAFSSRPTETNSKRLLSIAIGGLIACIYGVSLSKGFY

SEQ ID NO: 28761 - DNA, 861 bp, Muscodor strobelii
  misc_feature: SGI EST ID NO. CUFF.67811.0
  misc_feature: Variant of the nucleotide sequence at SEQ ID NO 28759
ccgagatacttcctttgtgcgcacattatcaagacctcacacgttacattgatgaggacgtcttggcaatttccagacaggtcgatgggatggtgcagggcgaggaagtcaggaacggtattgtgagttgcccggatggaagttccttccttgtccaacctacaaaaaactgtctagctgttgaatcgtcgtccgaaggcgttcgaagcttcatatgccgtcaagaaatagttgtgtcttcgtacgacgaggttcttgataaagctatggaatgcatttgcaattcatccactcaggaacatcttctggcgcgagaacttatgatgtggcttgtgtgcgcaagacgctggttgagctttcaagagataaaagcggccatgacccacagtctttgtactacaggtcagacttacgaggttccgtccattaagacggcggtggctacatgttgcggcatagttgtgctcgatcgagaatcttgtgtcgtccgactggttaaccaggtcgcagaagattatttcggccgcaagttaaagaaatggtacccagatgcgagtatcaaaattgcgtatacgtgtttaacatatctcttccaagatgatttcaggactggaccctgtcactcaaatggcgaattgagagaacggctggaacgatttcccctttacagctacgcagcacaaaatcttggcaatcacgctggaaatttgaatgagaccagtatcttgcagattggcgtggacttattgatgagcccttccaaaatggaggcagcttgtcaagtaaagatgatgccggtgcggtgtgaaaagattgacaaaccaaatcattaccagagataccctcatgacctaaatgcta

SEQ ID NO: 28762 - DNA, 408 bp, Muscodor strobelii
  misc_feature: SGI cDNA ID NO. 569868
  misc_feature: Elevated expression when VOC is produced
  misc_feature: Encodes the peptide sequence at SEQ ID NO 28763
atggcccgtctcgctggggtacgacaactcgcgccaaactgggccggccggattgtctttctcgagactgcccttgcggatcatgacgcaacggctggcgtgccgctggaccgcatacaagctgcaattgcggatctaatagcacaaggagtttttgacacggctgctggcttggttgtgggtcgcccgtttggctacaatactcttgagcagcgagaggcatatatgtccattattagaggcttgctatgcgagggacgcctagcagagaaaaatccagattttccgatcctctttggcgttgacttcggtcatactacgcccatggtcacgttaccatatgacgcgcttgctgagctcgatggggaaaatgatcgatttaccattctagagtctggcgtattgtag

SEQ ID NO: 28763 - protein, 135 aa, Muscodor strobelii
  misc_feature: SGI Peptide ID NO. 569868
  misc_feature (96)..(121): Pfam Id: PF02016 Pfam Desc: LD-carboxypeptidase
  misc_feature (1)..(134): NCBI GI: 46115644 Blast Desc: FG03664.1 [Gibberella zeae PH-1]
  misc_feature (3)..(135): NCBI GI: 256724275 Blast Desc: NECHADRAFT_97623 [Nectria haematococca mpVI 77-13-4]
  misc_feature (13)..(134): NCBI GI: 228959452 Blast Desc: Peptidase U61 LD-carboxypeptidase A [Bacillus thuringiensis serovar pakistani str. T13001] gi|228800228|gb|EEM47156.1| Peptidase U61 LD-carboxypeptidase A
  misc_feature (13)..(134): NCBI GI: 163940911 Blast Desc: peptidase U61 LD-carboxypeptidase A [Bacillus weihenstephanensis KBAB4] gi|163863108|gb|ABY44167.1| peptidase U61 LD-carboxypeptidase A [Bacillus weihenstephanensis KBAB4]
  misc_feature (13)..(134): NCBI GI: 30021341 Blast Desc: microcin C7 self-immunity protein mccF [Bacillus cereus ATCC 14579] gi|229128516|ref|ZP_04257494.1| Peptidase U61 LD-carboxypeptidase A [Bacillus cereus BDRD-Cer4] Microcin C7 U61
  misc_feature (13)..(134): NCBI GI: 118478535 Blast Desc: microcin C7 self-immunity protein [Bacillus thuringiensis str. Al Hakam] gi|196042985|ref|ZP_03110224.1| conserved [Bacillus cereus 03BB108] BCA_3305 [Bacillus cereus U61
  misc_feature (13)..(134): NCBI GI: 229097711 Blast Desc: Peptidase U61 LD-carboxypeptidase A [Bacillus cereus Rock3-29] gi|229116720|ref|ZP_04246104.1| Peptidase U61 LD-carboxypeptidase A [Bacillus cereus Rock1-3] Peptidase U61 A A
  misc_feature (13)..(134): NCBI GI: 229110660 Blast Desc: Peptidase U61 LD-carboxypeptidase A [Bacillus cereus Rock1-15] gi|228672728|gb|EEL28008.1| Peptidase U61 LD-carboxypeptidase A [Bacillus cereus Rock1-15]
  misc_feature (13)..(134): NCBI GI: 229018487 Blast Desc: Peptidase U61 LD-carboxypeptidase A [Bacillus cereus AH1273] gi|229024743|ref|ZP_04181182.1| Peptidase U61 LD-carboxypeptidase A [Bacillus cereus AH1272] Peptidase U61 A A
  misc_feature (13)..(134): NCBI GI: 218898311 Blast Desc: microcin C7 self-immunity protein MccF [Bacillus cereus G9842] gi|218540786|gb|ACK93180.1| microcin C7 self-immunity protein MccF [Bacillus cereus G9842]
  misc_feature: Useful for introducing or modulating the production of volatile compounds
MARLAGVRQLAPNWAGRIVFLETALADHDATAGVPLDRIQAAIADLIAQGVFDTAAGLVVGRPFGYNTLEQREAYMSIIRGLLCEGRLAEKNPDFPILFGVDFGHTTPMVTLPYDALAELDGENDRFTILESGVL

SEQ ID NO: 28764 - DNA, 1816 bp, Muscodor strobelii
  misc_feature: SGI EST ID NO. CUFF.67865.0
  misc_feature: Variant of the nucleotide sequence at SEQ ID NO 28762
cgagtactaatcacggagagggtgatgttggccaccgtgtcttaagacttcttgcttaatcagcgtctgaacgagaaggaatgaagcatgttagtgtaagaatccgactgtaaggttcagtacttggtgcaggcaagcaatttcccctcttcgagtgtacaggaaacttcaatcggggccaagggatgttggtatttatatgcattggcaaagtcttgtaatattccagagagacaaatgatcgcaacggactactaataagtcctctcggaattgcacctcacatcattgccactgggtaccacatcaccttttcgtatagacagctttacacataggaagctaaatagtgaagatgtcgctcccaacacccattcgacccccagcccttaaacttggcgacactattgccttcatttccccttccgcacgtctcaatatctctcacgcaagagccattgcgtctgctagcaccgtgctcacaaaccgggggttcaaagtccgagagatcttccaccccgaaacctccggttccattcaagatactatcaccaaacgcctggctgagtttcgtgaggcattcacagatccatctattgcagccgttatatgcacaataggcggaacggcatttacagagcttctgccatcgttgctcgaagatgtcgagctgcacgccgctattcgttccaaccctaagatcgtactgggctatagtgacattacgggtgtgcattggtttctcaacgccgtcacggggttgcgcacattctatgggcctggtatgatccccgagctcgtggggactgagtccgcttccgggcaagaatcaactctcgattttacagttcgcaatctacttgctgcgataacgacgacagagccaataggcgatgtgcaacgctcaaagtggtacaacccacggctgcaacaacacatgctgaaacccacaccggatgcgtctctagatgcagatgaagtcgcgcctaatccagggtggacatggattcggaagggtacatagcccatccagggacggctctttggcggcttcctcatggcaatggcccgtctcgctggggtacgacaactcgcgccaaactgggccggccggattgtctttctcgagactgcccttgcggatcatgacgcaacggctggcgtgccgctggaccgcatacaagctgcaattgcggatctaatagcacaaggagtttttgacacggctgctggcttggttgtgggtcgcccgtttggctacaatactcttgagcagcgagaggcatatatgtccattattagaggcttgctatgcgagggacgcctagcagagaaaaatccagattttccgatcctctttggcgttgacttcggtcatactacgcccatggtcacgttaccatatgacgcgcttgctgagctcgatggggaaaatgatcgatttaccattctagagtctggcgtattgtagactgagacaaaagagagcgcgagagtaacgagaagggatcacgctttcttccgacaaacgatcgtagatgtaaattcagcaaggacctgactgaatatttctaggagccaagaagaagtcagcaatgaccattacagaagatacaataattggggcattccggcctattgcgaaagaaccctgaggttttcaagtatcagcacgaagaaagccaaacttcccctctcggctacatacgatccgcttcagcggcggtgcagaaaaatgccttgcattggtgaagaagctaccaagttaggtaacaacgctctcctcgacatgcataacagtctgctcttattgaaa

SEQ ID NO: 28765 - DNA, 924 bp, Muscodor strobelii
  misc_feature: SGI cDNA ID NO. 569869
  misc_feature: Encodes the peptide sequence at SEQ ID NO 28766
atgcgctggggacttaatatgagcttgctagagatcgccgacacctttgagcattggaaaagcgaaggtcccttgaaggacaactttcttatcagcatcggcgctgatatctgcagaacaaaagatgaccagggtgaatttgttattgacactattatggataaagtcgtccaggatgtcgatgagaccgagggcactggggcgtggactctggaagaagccgcccgactacatgtccctatccctactattgcggcggcacacatgttccgtctcggtagtgcgtacgctgcccgccggtcggcagccgcagcggtcttcggaaacactgctcagagcgaccacacggtggcgaatactgcgtgggcaggagataggcatacggcgatcatggatttaggtcgcgctttacatgcatcattcctcctgtgctttatccaaggtctgcagcttcttgcagtagcatccgagaagaagcaatggaacctgaactttgtacatgtccttcagctctggcgaggaggttgcatcatccgtagtgacgctatcatcaatctatttacgggtatttatcagcattcgacagcggaaaagtttaatccgcataatttattggcgaatgaagttgtagcgtctgcgctccaagatgtcattggtctcggtctgcggcgcgttgtcatacacgcaatcgaggctgatctcgcggtgccttctctcggcgcgagcctcgaatatttcaagatttcaacttcgacgttattacccatgcgcttcatggaagcccagctcgactactttggtatgcacatatacgacaaggttagcgagggacctggtgaacctcgaactggatcacatcacttcgaatggaagccggcgcgtgggcctcgggaggaaagccaactagcggaggaaagcaaataa

SEQ ID NO: 28766 - protein, 307 aa, Muscodor strobelii
  misc_feature: SGI Peptide ID NO. 569869
  misc_feature (1)..(291): Pfam Id: PF00393 Pfam Desc: 6-phosphogluconate dehydrogenase, C-terminal domain
  misc_feature (1)..(180): Pfam Id: PF00393 Pfam Desc: 6-phosphogluconate dehydrogenase, C-terminal domain
  misc_feature (221)..(246): Pfam Id: PF00393 Pfam Desc: 6-phosphogluconate dehydrogenase, C-terminal domain
  misc_feature (1)..(295): NCBI GI: 85110942 Blast Desc: NCU00837 [Neurospora crassa OR74A] gi|28925416|gb|EAA34467.1| [Neurospora crassa OR74A]
  misc_feature (1)..(293): NCBI GI: 242772920 Blast Desc: 6-phosphogluconate dehydrogenase, decarboxylating [Talaromyces stipitatus ATCC 10500] gi|218721754|gb|EED21172.1| 6-phosphogluconate dehydrogenase, decarboxylating [Talaromyces
  misc_feature (1)..(293): NCBI GI: 21954536 Blast Desc: 6-phosphogluconate dehydrogenase [Aspergillus oryzae]
  misc_feature (1)..(293): NCBI GI: 238501620 Blast Desc: 6-phosphogluconate dehydrogenase, decarboxylating [Aspergillus flavus NRRL3357] gi|220692281|gb|EED48628.1| 6-phosphogluconate dehydrogenase, decarboxylating [Aspergillus
  misc_feature (1)..(293): NCBI GI: 169769176 Blast Desc: [Aspergillus oryzae RIB40] gi|83766916|dbj|BAE57056.1| protein product [Aspergillus oryzae]
  misc_feature (4)..(293): NCBI GI: 119469903 Blast Desc: 6-phosphogluconate dehydrogenase, decarboxylating [Neosartorya fischeri NRRL 181] gi|119406141|gb|EAW16092.1| 6-phosphogluconate dehydrogenase, decarboxylating [Neosartorya
  misc_feature (1)..(293): NCBI GI: 145244188 Blast Desc: An11g06120 [Aspergillus niger] gi|134079286|emb|CAK96915.1| protein product [Aspergillus niger]
  misc_feature (4)..(293): NCBI GI: 70991827 Blast Desc: 6-phosphogluconate dehydrogenase, decarboxylating [Aspergillus fumigatus Af293] gi|66848395|gb|EAL88724.1| 6-phosphogluconate dehydrogenase, decarboxylating [Aspergillus
  misc_feature (4)..(293): NCBI GI: 159124324 Blast Desc: 6-phosphogluconate dehydrogenase, decarboxylating [Aspergillus fumigatus A1163]
  misc_feature (1)..(293): NCBI GI: 212531449 Blast Desc: 6-phosphogluconate dehydrogenase, decarboxylating [Penicillium marneffei ATCC 18224] gi|210071245|gb|EEA25334.1| 6-phosphogluconate dehydrogenase, decarboxylating [Penicillium
  misc_feature (1)..(290): SWISSPROT Homolog: EC 1.1.1.44 Phosphogluconate dehydrogenase (decarboxylating)
MRWGLNMSLLEIADTFEHWKSEGPLKDNFLISIGADICRTKDDQGEFVIDTIMDKVVQDVDETEGTGAWTLEEAARLHVPIPTIAAAHMFRLGSAYAARRSAAAAVFGNTAQSDHTVANTAWAGDRHTAIMDLGRALHASFLLCFIQGLQLLAVASEKKQWNLNFVHVLQLWRGGCIIRSDAIINLFTGIYQHSTAEKFNPHNLLANEVVASALQDVIGLGLRRVVIHAIEADLAVPSLGASLEYFKISTSTLLPMRFMEAQLDYFGMHIYDKVSEGPGEPRTGSHHFEWKPARGPREESQLAEESK

SEQ ID NO: 28767 - DNA, 2241 bp, Muscodor strobelii
  misc_feature: SGI EST ID NO. CUFF.67831.0
  misc_feature: Variant of the nucleotide sequence at SEQ ID NO 28765
ctgtagctaaagtagaaagagaatgggccgtgttagcgaagcaggagccgtcagtatatcaccaataggtcttcgtttatgacgttgatatagcacttatcgcgggttgcatctcggggcggggcctgtcatgatgatgtaaatttctgggtcagggcagtaccaaatctcaataatttagagagaaaaagatccttcaccttagaaagcattgcaatacaatcataacaacttgcgaaaagacgagcgtttgatatcgtacgaataaagatggatgtcgagcagatcggacttatcggcgccggcggcatgggcgggatgctggcgctgcttctcgcagagcttggcatcactgtacatttccttgacccttccgacgacaacgccaaagcagtgctttctaacgcacgcaacgcaaaatttggtgataaagtccagcgccacgatgatcatgcatcactctgcgacgcccttccgccgccccgggctatcatgttctcgctgccgcatggcagcgtcatcgattccaccgtagagtcccttctccctaatctccaggccggcgacttactgatggacgcctctaacgagcactttgcctcgaccgagcggcgccaggcgtctctatccaagcacgatgtgcactatatcggtatgggcgtctctggcggctaccagtcggcccgccatggaccgagcatctcacctggtggtactgagaaggctcttgagcttgcttacccgctgctcgagaaaatatgcgcgcgggatgtccacgggaagtcctgcctggcgaagctcggccccggtggtgcgggtcattatgtcaagatggtccacaacggcattgagcaggggctcctgggctcactctgtgaagtctggggcatcatgcgctggggacttaatatgagcttgctagagatcgccgacacctttgagcattggaaaagcgaaggtcccttgaaggacaactttcttatcagcatcggcgctgatatctgcagaacaaaagatgaccagggtgaatttgttattgacactattatggataaagtcgtccaggatgtcgatgagaccgagggcactggggcgtggactctggaagaagccgcccgactacatgtccctatccctactattgcggcggcacacatgttccgtctcggtagtgcgtacgctgcccgccggtcggcagccgcagcggtcttcggaaacactgctcagagcgaccacacggtggcgaatactgcgtgggcaggagataggcatacggcgatcatggatttaggtcgcgctttacatgcatcattcctcctgtgctttatccaaggtctgcagcttcttgcagtagcatccgagaagaagcaatggaacctgaactttgtacatgtccttcagctctggcgaggaggttgcatcatccgtagtgacgctatcatcaatctatttacgggtatttatcagcattcgacagcggaaaagtttaatccgcataatttattggcgaatgaagttgtagcgtctgcgctccaagatgtcattggtctcggtctgcggcgcgttgtcatacacgcaatcgaggctgatctcgcggtgccttctctcggcgcgagcctcgaatatttcaagatttcaacttcgacgttattacccatgcgcttcatggaagcccagctcgactactttggtatgcacatatacgacaaggttagcgagggacctggtgaacctcgaactggatcacatcacttcgaatggaagccggcgcgtgggcctcgggaggaaagccaactagcggaggaaagcaaataagaccagggggaggagatgagatatctagtacaccattgagcacgtctactctttcaaaagttgcgagaatacgattataacgaaatcactggcgaacgttgtatttcgcatcctgctgatcgagtggcacgaaggacacaaattgaagtgtagtctaaatatcgccatgacttgagtgcggattccgccttcatgaaacggtcttgcggaaagcaaataatttggtgcagaccataatcaatggcttccgactaagaatttagtaaattttcgtgcgagagaaaggcaggaagaaagttgcaagcccaatctggctaaaaggcaatgtggtcgtaaagtgaaaagaggcaaaagaataagtctccaaagcggaatggaaaaaaatggacgagtagggaattgaaccctagacctttcgcaattttg

SEQ ID NO: 28768 - DNA, 1545 bp, Muscodor strobelii
  misc_feature: SGI cDNA ID NO. 569870
  misc_feature: Encodes the peptide sequence at SEQ ID NO 28769
atggatgtcgagcagatcggacttatcggcgccggcggcatgggcgggatgctggcgctgcttctcgcagagcttggcatcactgtacatttccttgacccttccgacgacaacgccaaagcagtgctttctaacgcacgcaacgcaaaatttggtgataaagtccagcgccacgatgatcatgcatcactctgcgacgcccttccgccgccccgggctatcatgttctcgctgccgcatggcagcgtcatcgattccaccgtagagtcccttctccctaatctccaggccggcgacttactgatggacgcctctaacgagcactttgcctcgaccgagcggcgccaggcgtctctatccaagcacgatgtgcactatatcggtatgggcgtctctggcggctaccagtcggcccgccatggaccgagcatctcacctggtggtactgagaaggctcttgagcttgcttacccgctgctcgagaaaatatgcgcgcgggatgtccacgggaagtcctgcctggcgaagctcggccccggtggtgcgggtcattatgtcaagatggtccacaacggcattgagcaggggctcctgggctcactctgtgaagtctggggcatcatgcgctggggacttaatatgagcttgctagagatcgccgacacctttgagcattggaaaagcgaaggtcccttgaaggacaactttcttatcagcatcggcgctgatatctgcagaacaaaagatgaccagggtgaatttgttattgacactattatggataaagtcgtccaggatgtcgatgagaccgagggcactggggcgtggactctggaagaagccgcccgactacatgtccctatccctactattgcggcggcacacatgttccgtctcggtagtgcgtacgctgcccgccggtcggcagccgcagcggtcttcggaaacactgctcagagcgaccacacggtggcgaatactgcgtgggcaggagataggcatacggcgatcatggatttaggtcgcgctttacatgcatcattcctcctgtgctttatccaaggtctgcagcttcttgcagtagcatccgagaagaagcaatggaacctgaactttgtacatgtccttcagctctggcgaggaggttgcatcatccgtagtgacgctatcatcaatctatttacgggtatttatcagcattcgacagcggaaaagtttaatccgcataatttattggcgaatgaagttgtagcgtctgcgctccaagatgtcattggtctcggtctgcggcgcgttgtcatacacgcaatcgaggctgatctcgcggtgccttctctcggcgcgagcctcgaatatttcaagatttcaacttcgacgttattacccatgcgcttcatggaagcccagctcgactactttggtatgcacatatacgacaaggttagcgagggacctggtgaacctcgaactggatcacatcacttcgaatggaagccggcgcgtgggcctcgggaggaaagccaactagcggaggaaagcaaataa

SEQ ID NO: 28769 - protein, 514 aa, Muscodor strobelii
  misc_feature: SGI Peptide ID NO. 569870
  misc_feature (183)..(498): Pfam Id: PF00393 Pfam Desc: 6-phosphogluconate dehydrogenase, C-terminal domain
  misc_feature (3)..(179): Pfam Id: PF03446 Pfam Desc: NAD binding domain of 6-phosphogluconate dehydrogenase
  misc_feature (183)..(387): Pfam Id: PF00393 Pfam Desc: 6-phosphogluconate dehydrogenase, C-terminal domain
  misc_feature (428)..(453): Pfam Id: PF00393 Pfam Desc: 6-phosphogluconate dehydrogenase, C-terminal domain
  misc_feature (18)..(502): NCBI GI: 85110942 Blast Desc: NCU00837 [Neurospora crassa OR74A] gi|28925416|gb|EAA34467.1| [Neurospora crassa OR74A]
  misc_feature (4)..(500): NCBI GI: 238501620 Blast Desc: 6-phosphogluconate dehydrogenase, decarboxylating [Aspergillus flavus NRRL3357] gi|220692281|gb|EED48628.1| 6-phosphogluconate dehydrogenase, decarboxylating [Aspergillus
  misc_feature (4)..(500): NCBI GI: 169769176 Blast Desc: [Aspergillus oryzae RIB40] gi|83766916|dbj|BAE57056.1| protein product [Aspergillus oryzae]
  misc_feature (4)..(500): NCBI GI: 21954536 Blast Desc: 6-phosphogluconate dehydrogenase [Aspergillus oryzae]
  misc_feature (4)..(500): NCBI GI: 70991827 Blast Desc: 6-phosphogluconate dehydrogenase, decarboxylating [Aspergillus fumigatus Af293] gi|66848395|gb|EAL88724.1| 6-phosphogluconate dehydrogenase, decarboxylating [Aspergillus
  misc_feature (4)..(500): NCBI GI: 119469903 Blast Desc: 6-phosphogluconate dehydrogenase, decarboxylating [Neosartorya fischeri NRRL 181] gi|119406141|gb|EAW16092.1| 6-phosphogluconate dehydrogenase, decarboxylating [Neosartorya
  misc_feature (4)..(500): NCBI GI: 159124324 Blast Desc: 6-phosphogluconate dehydrogenase, decarboxylating [Aspergillus fumigatus A1163]
  misc_feature (6)..(500): NCBI GI: 242772920 Blast Desc: 6-phosphogluconate dehydrogenase, decarboxylating [Talaromyces stipitatus ATCC 10500] gi|218721754|gb|EED21172.1| 6-phosphogluconate dehydrogenase, decarboxylating [Talaromyces
  misc_feature (14)..(505): NCBI GI: 169595384 Blast Desc: SNOG_00430 [Phaeosphaeria nodorum SN15] gi|160701086|gb|EAT91925.2| SNOG_00430 [Phaeosphaeria nodorum SN15]
  misc_feature (6)..(500): NCBI GI: 212531449 Blast Desc: 6-phosphogluconate dehydrogenase, decarboxylating [Penicillium marneffei ATCC 18224] gi|210071245|gb|EEA25334.1| 6-phosphogluconate dehydrogenase, decarboxylating [Penicillium
  misc_feature (67)..(497): SWISSPROT Homolog: EC 1.1.1.44 Phosphogluconate dehydrogenase (decarboxylating)
MDVEQIGLIGAGGMGGMLALLLAELGITVHFLDPSDDNAKAVLSNARNAKFGDKVQRHDDHASLCDALPPPRAIMFSLPHGSVIDSTVESLLPNLQAGDLLMDASNEHFASTERRQASLSKHDVHYIGMGVSGGYQSARHGPSISPGGTEKALELAYPLLEKICARDVHGKSCLAKLGPGGAGHYVKMVHNGIEQGLLGSLCEVWGIMRWGLNMSLLEIADTFEHWKSEGPLKDNFLISIGADICRTKDDQGEFVIDTIMDKVVQDVDETEGTGAWTLEEAARLHVPIPTIAAAHMFRLGSAYAARRSAAAAVFGNTAQSDHTVANTAWAGDRHTAIMDLGRALHASFLLCFIQGLQLLAVASEKKQWNLNFVHVLQLWRGGCIIRSDAIINLFTGIYQHSTAEKFNPHNLLANEVVASALQDVIGLGLRRVVIHAIEADLAVPSLGASLEYFKISTSTLLPMRFMEAQLDYFGMHIYDKVSEGPGEPRTGSHHFEWKPARGPREESQLAEESK

SEQ ID NO: 28770 - DNA, 2241 bp, Muscodor strobelii; identical to SEQ ID NO: 28767
  misc_feature: SGI EST ID NO. CUFF.67831.0
  misc_feature: Variant of the nucleotide sequence at SEQ ID NO 28768

SEQ ID NO: 28771 - DNA, 1017 bp, Muscodor strobelii
  misc_feature: SGI cDNA ID NO. 569871
  misc_feature: Encodes the peptide sequence at SEQ ID NO 28772
atgtcgccaacagtccacgtcctggacaactactacctagccataacgctcctaataacaatcgggtaccaactattcttcttcagcatagcatatacgctcaaattcgacaagttgaccgacttcgcgggcggtacgaacttcgcgctactcgccataataaccctagctttcaacggatcacccaacacgcgatcactcgtcgcatccctgttcctcatcgtctgggcattgcgcctctccggatttctactgttcagaattattaagactgggaaagatgatagatttgacgataagagagacaaattctttccattcctggggttctgggtgttccagatgatttgggtttggacttgcagcttacctgttacggtgctgaattcgccgaatgtgaagcagtatgatcagaagagtttcggaacgggcagagatattgcgggcgtgatattgtacgcgattggattgatcatggaggcttggagcgatgtggataaatatcggttccgacagagaaacgacaagcaggctgtttgcgacaagggcttttggtatttgacgaggcatccgaattactttggagagatcatcattcagttctctatttacatgatctccgtctcggcggcggcagatggatatgttggcggccaagcctttagagctctatacgcgacgatagtcgggcccttcttcttgacaattctattacttttcgtctctggcttgcctctgtccgaaagacctggtgcgaagaagcgatacgagaagggtctgaactgggaggcctactcgcgttatctcaaccgcacgagcatcttgattccatttccgccgcaaatttacgagaaaatgcccacatttatcaagcgaacggtatttctcgaattaccgatatatgtctttgatcccgcgaagcactcggacgtggcagcctcggggcaagaggcggcggaacaggggcagaatagacatggccgccagagtggtgagcgcttgacggacaataattga

SEQ ID NO: 28772 - protein, 338 aa, Muscodor strobelii
  misc_feature: SGI Peptide ID NO. 569871
  misc_feature (27)..(272): Pfam Id: PF06966 Pfam Desc: Domain of function (DUF1295)
  misc_feature (4)..(335): NCBI GI: 156040455 Blast Desc: SS1G_12244 [Sclerotinia sclerotiorum 1980] gi|154696300|gb|EDN96038.1| SS1G_12244 [Sclerotinia sclerotiorum 1980]
  misc_feature (4)..(332): NCBI GI: 261355187 Blast Desc: conserved [Verticillium albo-atrum VaMs.102]
  misc_feature (4)..(334): NCBI GI: 256730587 Blast Desc: NECHADRAFT_30337 [Nectria haematococca mpVI 77-13-4]
  misc_feature (1)..(335): NCBI GI: 145615882 Blast Desc: MGG_03731 [Magnaporthe grisea 70-15] gi|145009670|gb|EDJ94326.1| MGG_03731 [Magnaporthe grisea 70-15]
  misc_feature (4)..(333): NCBI GI: 189203231 Blast Desc: conserved [Pyrenophora tritici-repentis Pt-1C-BFP] gi|187985050|gb|EDU50538.1| conserved [Pyrenophora tritici-repentis Pt-1C-BFP]
  misc_feature (1)..(333): NCBI GI: 169603053 Blast Desc: SNOG_04533 [Phaeosphaeria nodorum SN15] gi|160706317|gb|EAT88293.2| SNOG_04533 [Phaeosphaeria nodorum SN15]
  misc_feature (74)..(336): NCBI GI: 154320760 Blast Desc: BC1G_01852 [Botryotinia fuckeliana B05.10] gi|150853541|gb|EDN28733.1| BC1G_01852 [Botryotinia fuckeliana B05.10]
  misc_feature (1)..(317): NCBI GI: 169849724 Blast Desc: CC1G_11558 [Coprinopsis cinerea okayama7#130] gi|116507339|gb|EAU90234.1| CC1G_11558 [Coprinopsis cinerea okayama7#130]
  misc_feature (7)..(310): NCBI GI: 259490034 Blast Desc: LOC100304216 [Zea mays] gi|223942193|gb|ACN25180.1| [Zea mays]
  misc_feature (4)..(256): NCBI GI: 71006464 Blast Desc: UM01751.1 [Ustilago maydis 521] gi|46097216|gb|EAK82449.1| UM01751.1 [Ustilago maydis 521]
MSPTVHVLDNYYLAITLLITIGYQLFFFSIAYTLKFDKLTDFAGGTNFALLAIITLAFNGSPNTRSLVASLFLIVWALRLSGFLLFRIIKTGKDDRFDDKRDKFFPFLGFWVFQMIWVWTCSLPVTVLNSPNVKQYDQKSFGTGRDIAGVILYAIGLIMEAWSDVDKYRFRQRNDKQAVCDKGFWYLTRHPNYFGEIIIQFSIYMISVSAAADGYVGGQAFRALYATIVGPFFLTILLLFVSGLPLSERPGAKKRYEKGLNWEAYSRYLNRTSILIPFPPQIYEKMPTFIKRTVFLELPIYVFDPAKHSDVAASGQEAAEQGQNRHGRQSGERLTDNN

SEQ ID NO: 28773 - DNA, 895 bp, Muscodor strobelii
  misc_feature: SGI EST ID NO. CUFF.67871.0
  misc_feature: Variant of the nucleotide sequence at SEQ ID NO 28771
gttcctcatcgtctgggcattgcgcctctccggatttctactgttcagaattattaagactgggaaagatgatagatttgacgataagagagacaaattctttccattcctggggttctgggtgttccagatgatttgggtttggacttgcagcttacctgttacggtgctgaattcgccgaatgtgaagcagtatgatcagaagagtttcggaacgggcagagatattgcgggcgtgatattgtacgcgattggattgatcatggaggcttggagcgatgtggataaatatcggttccgacagagaaacgacaagcaggctgtttgcgacaagggcttttggtatttgacgaggcatccgaattactttggagagatcatcattcagttctctatttacatgatctccgtctcggcggcggcagatggatatgttggcggccaagcctttagagctctatacgcgacgatagtcgggcccttcttcttgacaattctattacttttcgtctctggcttgcctctgtccgaaagacctggtgcgaagaagcgatacgagaagggtctgaactgggaggcctactcgcgttatctcaaccgcacgagcatcttgattccatttccgccgcaaatttacgagaaaatgcccacatttatcaagcgaacggtatttctcgaattaccgatatatgtctttgatcccgcgaagcactcggacgtggcagcctcggggcaagaggcggcggaacaggggcagaatagacatggccgccagagtggtgagcgcttgacggacaataattgagaatggttggtttaaactgaatgttataataatctctgtagaacttatttatagtgttttagtccttcctaaacgcgtacgaaatgcgtg

SEQ ID NO: 28774 - DNA, 279 bp, Muscodor strobelii
  misc_feature: SGI cDNA ID NO. 569872
  misc_feature: Reduced expression when VOC is produced
  misc_feature: Encodes the peptide sequence at SEQ ID NO 28775
atgcagcagcgagccacgttcgcccagtctccgccgctgcatcaccccgtcccgcaacatgtctcgaccgtgccgcagctgagatcgccgccgccgcccacctcgtcgcagccgcagcaccagggcgcatacggcaacccctaccagcaccagcagggcacgccccagcagcaacagggccagccgggcgtgggcgtgggcgtgggcaacgtcttcggggccaacttgggccagttcatggacaacccgctggccgcgcagttcgcgggccagctgggg

SEQ ID NO: 28775 - protein, 93 aa, Muscodor strobelii
  misc_feature: SGI Peptide ID NO. 569872
  misc_feature (2)..(93): NCBI GI: 85074793 Blast Desc: NCU00624 [Neurospora crassa OR74A] gi|28927577|gb|EAA36528.1| NCU00624 [Neurospora crassa OR74A]
  misc_feature (2)..(93): NCBI GI: 46128870 Blast Desc: FG08784.1 [Gibberella zeae PH-1]
  misc_feature (2)..(93): NCBI GI: 256733508 Blast Desc: NECHADRAFT_67285 [Nectria haematococca mpVI 77-13-4]
  misc_feature (8)..(93): NCBI GI: 225683853 Blast Desc: transport protein YIF1 [Paracoccidioides brasiliensis Pb03]
  misc_feature (8)..(93): NCBI GI: 226293237 Blast Desc: transport protein yif1 [Paracoccidioides brasiliensis Pb18]
  misc_feature (8)..(93): NCBI GI: 226277961 Blast Desc: transport protein yif1 [Paracoccidioides brasiliensis Pb01]
  misc_feature (1)..(93): NCBI GI: 149209829 Blast Desc: MGCH7_ch7g396 [Magnaporthe grisea 70-15] gi|86196351|gb|EAQ70989.1| MGCH7_ch7g396 [Magnaporthe grisea 70-15]
  misc_feature (8)..(93): NCBI GI: 115386446 Blast Desc: conserved [Aspergillus terreus NIH2624] gi|114190762|gb|EAU32462.1| conserved [Aspergillus terreus NIH2624]
  misc_feature (1)..(93): NCBI GI: 145610181 Blast Desc: MGG_12628 [Magnaporthe grisea 70-15] gi|145017542|gb|EDK01905.1| MGG_12628 [Magnaporthe grisea 70-15]
  misc_feature (8)..(93): NCBI GI: 242780868 Blast Desc: ER to Golgi transport protein Yif1 [Talaromyces stipitatus ATCC 10500] gi|218719833|gb|EED19252.1| ER to Golgi transport protein Yif1 [Talaromyces stipitatus ATCC 10500]
  misc_feature: Useful for introducing or modulating the production of volatile compounds
MQQRATFAQSPPLHHPVPQHVSTVPQLRSPPPPTSSQPQHQGAYGNPYQHQQGTPQQQQGQPGVGVGVGNVFGANLGQFMDNPLAAQFAGQLG

SEQ ID NO: 28776 - DNA, 649 bp, Muscodor strobelii
  misc_feature: SGI EST ID NO. CUFF.67868.0
  misc_feature: Variant of the nucleotide sequence at SEQ ID NO 28774
caatgcacactgtgtgtctcgtgggggagtaacagcactgttacagggcttggcttggatgtggtcacagtctgggtcacgactccattgccctccgttacgcgcatcatgccacataattaattgctgtcacattggacccaacgcagctacaccaccaccacattcacacatcaaacagccctgccatccagcctctgccatctcaaagcccgctgcctatctttctgggacacgacacaccaccacaccctcctccctttttccccctcttccccctcaattctctcgtgcccatcctcaaccaccgactctcccgcgcccgacgacacactcgagccctccgtccctcccctccccgtccctcacgatgcagcagcgagccacgttcgcccagtctccgccgctgcatcaccccgtcccgcaacatgtctcgaccgtgccgcagctgagatcgccgccgccgcccacctcgtcgcagccgcagcaccagggcgcatacggcaacccctaccagcaccagcagggcacgccccagcagcaacagggccagccgggcgtgggcgtgggcgtgggcaacgtcttcggggccaacttgggccagttcatggacaacccgctggccgcgcagttcgcgggccagctgggg

SEQ ID NO: 28777 - DNA, 2004 bp, Muscodor strobelii
  misc_feature: SGI cDNA ID NO. 569873
  misc_feature: Encodes the peptide sequence at SEQ ID NO 28778
atgctcgacacgttcgagatcctgacgacgtcgggggtggtgctgtggtcgcggacgtatgcgcccatcagcccgtccatcgtcaacaacttcatcaccgacgtcttcatcgaggagaagtcggcctctgccgccgccaaggacgaccagcccgccgcccacaaccctccctaccgctccgaccagcacaccgtgaaatggacctttgtcaaggaactcggcatcatcttcgtcgccgtctatagatctctgctgcacctgtcctggatcgacaagctcgtcgacaacctcaagaccatattcgtcgatctctacggcgaccagctgaagaagcccaacaccaccgtcgtccactgcaccaagttcaacgagtacttcgaccagcagtataaagagctcgagtccggcgcaggcacgagggggaaccagcccctcgacctgagggacgaccgcgagcgcatcatatctggcgacaccaacgacgacgagccacccctcccgcccgggctcaaacaccgcgccaatgctcaacatgtcccgacgcccaccgagaccacgcccgtcatcacccccaacacgtcccgtccctctacccccagcggcgccagtaccagccacttggtcaccggcaaggctggtcccatgggacgcatgtcccgcaaggctaggaagatgcagaacaacatgtcggccgcgcccatgtcctcgggcgacgagggtccttcacggaaaggcaagaaggcgcccaagaaaggccgcaagtgggatgccgatggtttcgctgacgaggaggacgatgtgcagctcgactactccgtcaccaagaacactctgaccagcgacagcgaagtggagcccgtcggcaagtcgaccgctgtcgagggtgtggatgcctccagctgggggaccacaacgtccaagggccagttcgtcctcaaggatctaggcgacgtagaggatgaggcgcattccattctccaggctgccaaggacaagagtgctgctagctcgacaacgaggggaggactggtgggctctggtttaagcacgttaggtggactgttccgcggcgtggtgggcggcaagaccttgacgaaagaagacttagacaaagctatgaagggtatggaggatcatctgctgaaaaagaacgtcgctcgcgaggctgcgctgcgactatgcgagggcgtggagaaagaattagtcggactgaagacaggcaccttcgagagcatcaatgcgcgcatcgcgaaagccatggaggcgtctctcaccaagatgctgaccccaacttcgtcgctggacctgctgcgcgagatcgacgctgtcaccaagccgtcggtaacttcaatgcgcaaggcgcggccctacgtcatctctattgtaggagtcaacggcgtgggcaagtccaccaacctgtccaagatatgcttcttcctcctgcagaacaagtacaaggtcttgatcgctgccggagacacattccgatctggcgcggttgagcagttgaaggtccacgtacggaatctcaaggagttgaccgagcgagaaggcggcaaagtcgagatttttgaaaaggggtatggaggggatgccgccaccgtggccaaggacgccgtgagggaagctgctaacgagggatacgacgtcgtcctcatcgacacggctggacgacgacacaacgatcaacgcctcatgtcatctctggagaagtttgccaagtttgcacagcctgataagatattgatggttggcgaggccctcgtggggacagactccgtggctcaagctcggaacttcaactcatcctttgggcccggacggaccctggatgggttcatcatctccaaatgtgacacggtgggtgacatggtgggaacacttgtcagcatcgtccacgcgactaatgtcccggttttatttgtcggtgttggacaacactactcggacataaggaatttctctgttaaatgggccgtcgagaagttgctgagcagcacatag

SEQ ID NO: 28778 - protein, 667 aa, Muscodor strobelii
  misc_feature: SGI Peptide ID NO. 569873
  misc_feature (23)..(320): Pfam Id: PF04086 Pfam Desc: Signal recognition particle, alpha subunit, N-terminal
  misc_feature (455)..(665): Pfam Id: PF00448 Pfam Desc: SRP54-type protein, GTPase domain
  misc_feature (23)..(137): Pfam Id: PF04086 Pfam Desc: Signal recognition particle, alpha subunit, N-terminal
  misc_feature (455)..(619): Pfam Id: PF00448 Pfam Desc: SRP54-type protein, GTPase domain
  misc_feature (626)..(665): Pfam Id: PF00448 Pfam Desc: SRP54-type protein, GTPase domain
  misc_feature (1)..(666): NCBI GI: 46128914 Blast Desc: FG08785.1 [Gibberella zeae PH-1]
  misc_feature (1)..(666): NCBI GI: 171683961 Blast Desc: protein product [Podospora anserina] gi|170941941|emb|CAP67593.1| protein product [Podospora anserina]
  misc_feature (1)..(667): NCBI GI: 116193091 Blast Desc: CHGG_06263 [Chaetomium globosum CBS 148.51] gi|88182176|gb|EAQ89644.1| CHGG_06263 [Chaetomium globosum CBS 148.51]
  misc_feature (1)..(666): NCBI GI: 256734014 Blast Desc: [Nectria haematococca mpVI 77-13-4]
  misc_feature (1)..(666): NCBI GI: 164428471 Blast Desc: NCU11187 [Neurospora crassa OR74A] gi|157072159|gb|EDO65366.1| NCU11187 [Neurospora crassa OR74A]
  misc_feature (1)..(665): NCBI GI: 154302571 Blast Desc: BC1G_09862 [Botryotinia fuckeliana B05.10] gi|150855351|gb|EDN30543.1| BC1G_09862 [Botryotinia fuckeliana B05.10]
  misc_feature (1)..(665): NCBI GI: 156055398 Blast Desc: SS1G_05051 [Sclerotinia sclerotiorum 1980] gi|154702835|gb|EDO02574.1| SS1G_05051 [Sclerotinia sclerotiorum 1980]
  misc_feature (1)..(666): NCBI GI: 145610183 Blast Desc: MGG_02663 [Magnaporthe grisea 70-15] gi|145017543|gb|EDK01906.1| MGG_02663 [Magnaporthe grisea 70-15]
  misc_feature (1)..(666): NCBI GI: 149209827 Blast Desc: MGCH7_ch7g395 [Magnaporthe grisea 70-15] gi|86196350|gb|EAQ70988.1| MGCH7_ch7g395 [Magnaporthe grisea 70-15]
  misc_feature (1)..(667): NCBI GI: 261353150 Blast Desc: signal recognition particle receptor subunit alpha [Verticillium albo-atrum VaMs.102]
MLDTFEILTTSGVVLWSRTYAPISPSIVNNFITDVFIEEKSASAAAKDDQPAAHNPPYRSDQHTVKWTFVKELGIIFVAVYRSLLHLSWIDKLVDNLKTIFVDLYGDQLKKPNTTVVHCTKFNEYFDQQYKELESGAGTRGNQPLDLRDDRERIISGDTNDDEPPLPPGLKHRANAQHVPTPTETTPVITPNTSRPSTPSGASTSHLVTGKAGPMGRMSRKARKMQNNMSAAPMSSGDEGPSRKGKKAPKKGRKWDADGFADEEDDVQLDYSVTKNTLTSDSEVEPVGKSTAVEGVDASSWGTTTSKGQFVLKDLGDVEDEAHSILQAAKDKSAASSTTRGGLVGSGLSTLGGLFRGVVGGKTLTKEDLDKAMKGMEDHLLKKNVAREAALRLCEGVEKELVGLKTGTFESINARIAKAMEASLTKMLTPTSSLDLLREIDAVTKPSVTSMRKARPYVISIVGVNGVGKSTNLSKICFFLLQNKYKVLIAAGDTFRSGAVEQLKVHVRNLKELTEREGGKVEIFEKGYGGDAATVAKDAVREAANEGYDVVLIDTAGRRHNDQRLMSSLEKFAKFAQPDKILMVGEALVGTDSVAQARNFNSSFGPGRTLDGFIISKCDTVGDMVGTLVSIVHATNVPVLFVGVGQHYSDIRNFSVKWAVEKLLSST

SEQ ID NO: 28779 - DNA, 2381 bp, Muscodor strobelii
  misc_feature: SGI EST ID NO. CUFF.67901.0
  misc_feature: Variant of the nucleotide sequence at SEQ ID NO 28777
cgggatcggcctttggtgggtgaattactacgaactgcgcccatgccatactgtactgtatgtagccagctcactatcaacgctgaacccgaggtactacacctcatcttcatccaacttgtacatggccctgcatctgctctccccgtcgctcctttccccctctagcatctcctagttaaggttgcaagtaatccggaccgatgctcgacacgttcgagatcctgacgacgtcgggggtggtgctgtggtcgcggacgtatgcgcccatcagcccgtccatcgtcaacaacttcatcaccgacgtcttcatcgaggagaagtcggcctctgccgccgccaaggacgaccagcccgccgcccacaaccctccctaccgctccgaccagcacaccgtgaaatggacctttgtcaaggaactcggcatcatcttcgtcgccgtctatagatctctgctgcacctgtcctggatcgacaagctcgtcgacaacctcaagaccatattcgtcgatctctacggcgaccagctgaagaagcccaacaccaccgtcgtccactgcaccaagttcaacgagtacttcgaccagcagtataaagagctcgagtccggcgcaggcacgagggggaaccagcccctcgacctgagggacgaccgcgagcgcatcatatctggcgacaccaacgacgacgagccacccctcccgcccgggctcaaacaccgcgccaatgctcaacatgtcccgacgcccaccgagaccacgcccgtcatcacccccaacacgtcccgtccctctacccccagcggcgccagtaccagccacttggtcaccggcaaggctggtcccatgggacgcatgtcccgcaaggctaggaagatgcagaacaacatgtcggccgcgcccatgtcctcgggcgacgagggtccttcacggaaaggcaagaaggcgcccaagaaaggccgcaagtgggatgccgatggtttcgctgacgaggaggacgatgtgcagctcgactactccgtcaccaagaacactctgaccagcgacagcgaagtggagcccgtcggcaagtcgaccgctgtcgagggtgtggatgcctccagctgggggaccacaacgtccaagggccagttcgtcctcaaggatctaggcgacgtagaggatgaggcgcattccattctccaggctgccaaggacaagagtgctgctagctcgacaacgaggggaggactggtgggctctggtttaagcacgttaggtggactgttccgcggcgtggtgggcggcaagaccttgacgaaagaagacttagacaaagctatgaagggtatggaggatcatctgctgaaaaagaacgtcgctcgcgaggctgcgctgcgactatgcgagggcgtggagaaagaattagtcggactgaagacaggcaccttcgagagcatcaatgcgcgcatcgcgaaagccatggaggcgtctctcaccaagatgctgaccccaacttcgtcgctggacctgctgcgcgagatcgacgctgtcaccaagccgtcggtaacttcaatgcgcaaggcgcggccctacgtcatctctattgtaggagtcaacggcgtgggcaagtccaccaacctgtccaagatatgcttcttcctcctgcagaacaagtacaaggtcttgatcgctgccggagacacattccgatctggcgcggttgagcagttgaaggtccacgtacggaatctcaaggagttgaccgagcgagaaggcggcaaagtcgagatttttgaaaaggggtatggaggggatgccgccaccgtggccaaggacgccgtgagggaagctgctaacgagggatacgacgtcgtcctcatcgacacggctggacgacgacacaacgatcaacgcctcatgtcatctctggagaagtttgccaagtttgcacagcctgataagatattgatggttggcgaggccctcgtggggacagactccgtggctcaagctcggaacttcaactcatcctttgggcccggacggaccctggatgggttcatcatctccaaatgtgacacggtgggtgacatggtgggaacacttgtcagcatcgtccacgcgactaatgtcccggttttatttgtcggtgttggacaacactactcggacataaggaatttctctgttaaatgggccgtcgagaagttgctgagcagcacatagcaaggcgttgcatgaagactaataataaagtaaattccgggccaccagttttcagtcgtctcttgcctgtgacaaacgaaaatgacagtgaactggtctatctaccgtgagttcaatgtatgctggatatctacatggtaggtagtatccatattgcctataggcctaacgtgc

SEQ ID NO: 28780 - DNA, 900 bp, Muscodor strobelii
  misc_feature: SGI cDNA ID NO. 569874
  misc_feature: Encodes the peptide sequence at SEQ ID NO 28781
atgcagtgctggaaatatctcctccgtatccttctgcctggcattcttgcgctcagcacagtagcctcgccgcagtcgctagtcgttgtccctgtacctcatgaggatgctgacccgcccatcaacagcagcctcacctatgctggcgccaccatcgacatcccggccggcaataacacagagatgcccgctgttggcagcgtaactgccacttggacagtccctcgtctttgtcttggtgagggcactagcaacgtttcgcgggaggttatgacttggatcggtgtttctggaaaggactgtgatcccaagggcgctcttgtccaggtcggcgtacaggtcaaactgaacgatgacaacacaacctctgcccgcgcatgggcaagttggtaccccgccatcggctggatcaacatcgtcaacttcgatgtccgccccggagacacaatcaccgtggcccttaccatattcaacacgaccaatgcattgatccagatgatcaaccagcgtaccgctcacctcgtcacccaatctgtcttctcgcctgagaaggacatcggagactttgagctctgtcccagtgccactggcggcggtcgggtctgggccgcagtcgagggcgctttcacatgggagcaagagcctcctgacaccacgacgtccatcacctctcttccgcacttcgaggatgtcggcttcaagagattgacggccaagggctttggaaatggcgatgtagatccagtggatattcatgctggaggtagtgatggggtctacggaacattgtaccaggctgtggatatggatggtgtgaaactcggcgtcgatacacttggtacgaacggatttatgatttttggcaacgggtcttgcgttggtgagatgattatggattga

SEQ ID NO: 28781 - protein, 299 aa, Muscodor strobelii
  misc_feature: SGI Peptide ID NO. 569874
  misc_feature (11)..(178): NCBI GI: 212530358 Blast Desc: aspergillopepsin-2 precursor, [Penicillium marneffei ATCC 18224] gi|210074734|gb|EEA28821.1| aspergillopepsin-2 precursor, [Penicillium marneffei ATCC 18224]
  misc_feature (41)..(186): NCBI GI: 169604590 Blast Desc: SNOG_05309 [Phaeosphaeria nodorum SN15] gi|111066580|gb|EAT87700.1| SNOG_05309 [Phaeosphaeria nodorum SN15]
  misc_feature (6)..(175): NCBI GI: 212527274 Blast Desc: aspergillopepsin-2 precursor, [Penicillium marneffei ATCC 18224] gi|210073192|gb|EEA27279.1| aspergillopepsin-2 precursor, [Penicillium marneffei ATCC 18224]
  misc_feature (42)..(184): NCBI GI: 171695636 Blast Desc: protein product [Podospora anserina] gi|170948060|emb|CAP60224.1| protein product [Podospora anserina]
  misc_feature (6)..(183): NCBI GI: 238506359 Blast Desc: aspergillopepsin, [Aspergillus flavus NRRL3357] gi|220689094|gb|EED45445.1| aspergillopepsin, [Aspergillus flavus NRRL3357]
  misc_feature (6)..(183): NCBI GI: 169785367 Blast Desc: [Aspergillus oryzae RIB40] gi|83775892|dbj|BAE66011.1| protein product [Aspergillus oryzae]
  misc_feature (41)..(179): NCBI GI: 116181288 Blast Desc: CHGG_01272 [Chaetomium globosum CBS 148.51] gi|88185569|gb|EAQ93037.1| CHGG_01272 [Chaetomium globosum CBS 148.51]
  misc_feature (35)..(188): NCBI GI: 154321167 Blast Desc: BC1G_01458 [Botryotinia fuckeliana B05.10] gi|150851996|gb|EDN27188.1| BC1G_01458 [Botryotinia fuckeliana B05.10]
  misc_feature (61)..(183): NCBI GI: 189193169 Blast Desc: acid protease [Pyrenophora tritici-repentis Pt-1C-BFP] gi|187978487|gb|EDU45113.1| acid protease [Pyrenophora tritici-repentis Pt-1C-BFP]
  misc_feature (67)..(184): NCBI GI: 242780216 Blast Desc: aspergillopepsin-2 precursor, [Talaromyces stipitatus ATCC 10500] gi|218719696|gb|EED19115.1| aspergillopepsin-2 precursor, [Talaromyces stipitatus ATCC 10500]
MQCWKYLLRILLPGILALSTVASPQSLVVVPVPHEDADPPINSSLTYAGATIDIPAGNNTEMPAVGSVTATWTVPRLCLGEGTSNVSREVMTWIGVSGKDCDPKGALVQVGVQVKLNDDNTTSARAWASWYPAIGWINIVNFDVRPGDTITVALTIFNTTNALIQMINQRTAHLVTQSVFSPEKDIGDFELCPSATGGGRVWAAVEGAFTWEQEPPDTTTSITSLPHFEDVGFKRLTAKGFGNGDVDPVDIHAGGSDGVYGTLYQAVDMDGVKLGVDTLGTNGFMIFGNGSCVGEMIMD

SEQ ID NO: 28782 - DNA, 2061 bp, Muscodor strobelii
  misc_feature: SGI cDNA ID NO. 569875
  misc_feature: Encodes the peptide sequence at SEQ ID NO 28783
atggcggtgtccgttcagaacctctcgtttcttgttcgggcacagggcgctgacaatgctcttcccgaaatcagagagtccgaataccagactgaagtcctccgcccgtccgccgagggtcccgacgcctatcttggcgaactcatgatgcgggctgcaactttgggcatttccctagcccgtgattctacatctaccgacgatgtgtcggctcccgacaagcgaaacacgtcaggcgtcgagtcgaatatcaccttcgatacatcgcacacacgcactgtctcgacaggatcgcacgactctgtcagcaccactttaacatcacattcttctagcgacggtcatgacttcgctggcaaattcctggctagaaggcgatcgagaggtctatcattcacgcagtacaacacttatctcactcaactcgagccaaaggctggccagcagaagcttttgagttctgcgtcaacgattgatgtcgacattgcacagagtctcttcagcgtcaccacgaggaagagctatgccagtgttaggaaaaccttatccagaatgcgtggtcgacggaagccatctcctggcgaacccttgatattttcttgcagcgcatgccgagatgacctacagcccgacaaggaattacaaaagctaccatgtggacatggctactgtccgccttgcctacgcattatgattaatcaagccgcgactgaagaatctaatatgccaccgcgatgctgtacgcaacctatacctggcctgacgatcaagtcaattctttcgcgagaagaacagaaccattttttgaatgctgttttacagttcagtacgccatgggagtcccgcgtgttttgctcgaacccgtcttgcggtgacttcattcctcctcgtaataagatcgacccgagacatcccttcgaagtggagtgtcgcaaatgtcggacccgcgtgtgcatagtatgtaagaggaacgctcatcctctgggccaggattgtccagatgataaggagctagaggctgtgttaaaaatgggcgagaagtcgggttggcgaaggtgctacaagtgccgcacccttgtagaactcactcaaggttgcacccacatgacatgcaggtgcaaagcgcaattctgttacatatgcggagcggtgtgggatccaactgttggctgccctaacttttgcaatggtgatgccgaaatggatcggaggcgacaagaggaagaggagcgcctagctgccctggaggctgaggaagctgccaagcgagaggcagcagcaaaagaggaggccgaaagactggaggcagaggaacgtaccgaaaaaagtgacgagttcaaagcgatgcgggccgaacaaagcaaagaaatggatcgatgccaagcatttgagcggaaatcaaagtggcagctgtggacgagacacgctcaacagaagattgaacttgtgggaaagcacacggcggccatcgagaagatgcaagagcgtcatgctaagacggctgcaaatctcgaagaccggcaggtggcggctgagatggagctgcgcgctacattggaccagagcgagaggaacgtgcggatccgcttaaagcatatggaagcctactgcgacggattaggccagcatcccaactcacaaatgccgtctcgcgtggttacagagcgagatctacgtgaacttggtcagcaatacaacctggagaagaatatgaagcagcttcatcaggctaaagttaatgtcatgcgagaccggcaggcgaaggcattggaggagctcctggagaggcaagaatccgagctgagtcggctgacggagaagaatgcgaaagaagtcgagcagatggagctggggtttgcggatgaagaaggaaacttggctacgacgttccgctcgcgtcgaaagacgttggaaacgcgatgggcgttggaggcggagatcaagcgaagggaattggagaaccgggagtgcggagtcaagtacgcagtgttgccgcctctagactggccgtttgaaaaggacgccttagaagaagcactaactgcggtagacttgacgtga

SEQ ID NO: 28783 - protein, 686 aa, Muscodor strobelii
  misc_feature: SGI Peptide ID NO. 569875
  misc_feature (22)..(684): NCBI GI: 261352155 Blast Desc: IBR domain-containing protein [Verticillium albo-atrum VaMs.102]
  misc_feature (18)..(675): NCBI GI: 256733651 Blast Desc: NECHADRAFT_92059 [Nectria haematococca mpVI 77-13-4]
  misc_feature (22)..(670): NCBI GI: 85074927 Blast Desc: NCU00691 [Neurospora crassa OR74A] gi|28927644|gb|EAA36595.1| [Neurospora crassa OR74A]
  misc_feature (21)..(665): NCBI GI: 149210235 Blast Desc: MGCH7_ch7g595 [Magnaporthe grisea 70-15] gi|86196550|gb|EAQ71188.1| MGCH7_ch7g595 [Magnaporthe grisea 70-15]
  misc_feature (21)..(665): NCBI GI: 145609966 Blast Desc: MGG_02839 [Magnaporthe grisea 70-15] gi|145017346|gb|EDK01709.1| MGG_02839 [Magnaporthe grisea 70-15]
  misc_feature (22)..(672): NCBI GI: 171684825 Blast Desc: protein product [Podospora anserina] gi|170942373|emb|CAP68025.1| protein product [Podospora anserina]
  misc_feature (22)..(673): NCBI GI: 46128523 Blast Desc: FG08639.1 [Gibberella zeae PH-1]
  misc_feature (263)..(670): NCBI GI: 156046278 Blast Desc: SS1G_09393 [Sclerotinia sclerotiorum 1980] gi|154693788|gb|EDN93526.1| SS1G_09393 [Sclerotinia sclerotiorum 1980]
  misc_feature (19)..(544): NCBI GI: 116193303 Blast Desc: CHGG_06369 [Chaetomium globosum CBS 148.51] gi|88182282|gb|EAQ89750.1| CHGG_06369 [Chaetomium globosum CBS 148.51]
  misc_feature (446)..(670): NCBI GI: 154319728 Blast Desc: BC1G_02345 [Botryotinia fuckeliana B05.10] gi|150856003|gb|EDN31195.1| BC1G_02345 [Botryotinia fuckeliana B05.10]
MAVSVQNLSFLVRAQGADNALPEIRESEYQTEVLRPSAEGPDAYLGELMMRAATLGISLARDSTSTDDVSAPDKRNTSGVESNITFDTSHTRTVSTGSHDSVSTTLTSHSSSDGHDFAGKFLARRRSRGLSFTQYNTYLTQLEPKAGQQKLLSSASTIDVDIAQSLFSVTTRKSYASVRKTLSRMRGRRKPSPGEPLIFSCSACRDDLQPDKELQKLPCGHGYCPPCLRIMINQAATEESNMPPRCCTQPIPGLTIKSILSREEQNHFLNAVLQFSTPWESRVFCSNPSCGDFIPPRNKIDPRHPFEVECRKCRTRVCIVCKRNAHPLGQDCPDDKELEAVLKMGEKSGWRRCYKCRTLVELTQGCTHMTCRCKAQFCYICGAVWDPTVGCPNFCNGDAEMDRRRQEEEERLAALEAEEAAKREAAAKEEAERLEAEERTEKSDEFKAMRAEQSKEMDRCQAFERKSKWQLWTRHAQQKIELVGKHTAAIEKMQERHAKTAANLEDRQVAAEMELRATLDQSERNVRIRLKHMEAYCDGLGQHPNSQMPSRVVTERDLRELGQQYNLEKNMKQLHQAKVNVMRDRQAKALEELLERQESELSRLTEKNAKEVEQMELGFADEEGNLATTFRSRRKTLETRWALEAEIKRRELENRECGVKYAVLPPLDWPFEKDALEEALTAVDLT

SEQ ID NO: 28784 - DNA, 3687 bp, Muscodor strobelii
  misc_feature: SGI EST ID NO. CUFF.67886.0
  misc_feature: Variant of the nucleotide sequence at SEQ ID NO 28782
gatgaaggttccctctttcccttcgtcaccgcccccctggctcgacggaatactacgttccctgtcggcctgccctcccgtcatttgcatgcgggagtgcttgcctttcgtcccatttttgcctgtcaaacttgtcccttcgattgcagcttccgaatattcttcttctgtcttctgacaactgttgtcaagcctccccactcgagagccactgctggactatcccttcccttctgctcagtccagatcgaaagtctaagtcttgccggtcgtcgtagtcgttggactccgtaatgttccaggctgtagatccacaaatcctagacatccgcttgtgcagggcagtcaggcattgtgcatcaccatcaccaccgcccgccctgcgaccttgttgaccgcatgtcgtctccaatttttgttctcaccgagcccaaattgcctgtcactggtatcacaacagccatagcaaaaacaacagatatctgcccatagcataacttgcgcgacctgagcacctgtttgcccctcttgattcgacacttgaacggctccgtgaacccctcctcagcatcccagcactatcctggcattccaccccaggttcccaaatcaacactggcctggctgggtgagttgggatcggtgtcatttgccttacaccctctcgcctgcccgtggagccggcaaacgataatattggacaactagtcattttgtctcccgttcacagcccgtcgtcgcctctggcccttcggcgccgtttgtcttgttctgcggtcctgcctgatccccacccggcaacctggcaaacatccgctcggatgctggtgtcattcgaccccgagctgccactgttattccgtttgtcacgatattgaaggattccgatcgcctcgctcagtctgccaatctgcccaagtttggccgtctgccctttctccactcaaacgccccatcacgtatctcgctgcagggtttttcttcctgtctgggttcccgcatcgtcaagggctccccgctgtggtgctgcattcgtcactcgtcattcgtcttatcgacggcgtctagtccgccgcgcgctgcgtcccgagctccccaccgcattaatgccgccgatcgtctaatgatgatacaagccatttgagacttatcccggtgtggattttcctgcgactcgccccctctctatcgtcgaccatggcggtgtccgttcagaacctctcgtttcttgttcgggcacagggcgctgacaatgctcttcccgaaatcagagagtccgaataccagactgaagtcctccgcccgtccgccgagggtcccgacgcctatcttggcgaactcatgatgcgggctgcaactttgggcatttccctagcccgtgattctacatctaccgacgatgtgtcggctcccgacaagcgaaacacgtcaggcgtcgagtcgaatatcaccttcgatacatcgcacacacgcactgtctcgacaggatcgcacgactctgtcagcaccactttaacatcacattcttctagcgacggtcatgacttcgctggcaaattcctggctagaaggcgatcgagaggtctatcattcacgcagtacaacacttatctcactcaactcgagccaaaggctggccagcagaagcttttgagttctgcgtcaacgattgatgtcgacattgcacagagtctcttcagcgtcaccacgaggaagagctatgccagtgttaggaaaaccttatccagaatgcgtggtcgacggaagccatctcctggcgaacccttgatattttcttgcagcgcatgccgagatgacctacagcccgacaaggaattacaaaagctaccatgtggacatggctactgtccgccttgcctacgcattatgattaatcaagccgcgactgaagaatctaatatgccaccgcgatgctgtacgcaacctatacctggcctgacgatcaagtcaattctttcgcgagaagaacagaaccattttttgaatgctgttttacagttcagtacgccatgggagtcccgcgtgttttgctcgaacccgtcttgcggtgacttcattcctcctcgtaataagatcgacccgagacatcccttcgaagtggagtgtcgcaaatgtcggacccgcgtgtgcatagtatgtaagaggaacgctcatcctctgggccaggattgtccagatgataaggagctagaggctgtgttaaaaatgggcgagaagtcgggttggcgaaggtgctacaagtgccgcacccttgtagaactcactcaaggttgcacccacatgacatgcaggtgcaaagcgcaattctgttacatatgcggagcggtgtgggatccaactgttggctgccctaacttttgcaatggtgatgccgaaatggatcggaggcgacaagaggaagaggagcgcctagctgccctggaggctgaggaagctgccaagcgagaggcagcagcaaaagaggaggccgaaagactggaggcagaggaacgtaccgaaaaaagtgacgagttcaaagcgatgcgggccgaacaaagcaaagaaatggatcgatgccaagcatttgagcggaaatcaaagtggcagctgtggacgagacacgctcaacagaagattgaacttgtgggaaagcacacggcggccatcgagaagatgcaagagcgtcatgctaagacggctgcaaatctcgaagaccggcaggtggcggctgagatggagctgcgcgctacattggaccagagcgagaggaacgtgcggatccgcttaaagcatatggaagcctactgcgacggattaggccagcatcccaactcacaaatgccgtctcgcgtggttacagagcgagatctacgtgaacttggtcagcaatacaacctggagaagaatatgaagcagcttcatcaggctaaagttaatgtcatgcgagaccggcaggcgaaggcattggaggagctcctggagaggcaagaatccgagctgagtcggctgacggagaagaatgcgaaagaagtcgagcagatggagctggggtttgcggatgaagaaggaaacttggctacgacgttccgctcgcgtcgaaagacgttggaaacgcgatgggcgttggaggcggagatcaagcgaagggaattggagaaccgggagtgcggagtcaagtacgcagtgttgccgcctctagactggccgtttgaaaaggacgccttagaagaagcactaactgcggtagacttgacgtgaacactatactcgctgggtccccgatatcacacaaacatcataaatcaaatgattatttggcaggaggccgcgcggcgcctgagcccggtaaagactgggcggaatccggtcactgccgtcacgatgtatggactggcactgcacaccacactttcatatcatctcatttgttcgcatcatcaaggttggcgatgcgagatacctaaacatgggacgggagtttatgtgttgaacataaggcacatgaggtggcgttagcatctagcattttgctttgcattcgcttctacggcatcggcaaaatgccactgttgttcattgcggaagatatacccctttttcatggtacagggctatttggtccagcggtgatttgagagctagtgtctacttagctatcacaagcaactactcatcatatgtccttcc

SEQ ID NO: 28785 - DNA, 435 bp, Muscodor strobelii
  misc_feature: SGI cDNA ID NO. 569876
  misc_feature: Reduced expression when VOC is produced
  misc_feature: Encodes the peptide sequence at SEQ ID NO 28786
atgtccgccaacatcgagtccccgtcgtggcgtacggtcgaggtcggccgcctcgtcctcatcagccaaggccccttcgccggccgggttgccgccatcaccgagatcatttctgagaagcgtgtcctcgtcgatggccccagctccaacgagaaggccgtagtccccaagggacccgtcgccctgtccgacgtcttcctcaccgacatcaagctcgacataccccgtgccctccgcaccggcacgctgaagaaggtctgggagaacgagggtgtcgacaagaagtgggccgacagcaaatgggccaagcgcagcgagcggacggagaagagaaaggctctgaccgacttccagcgcttccagctcctccgcgccaagaagcagcagcgctacgaggtccgcaaggccctcgccaaggtcaaggcctccgcctaa
